United States Patent Application Publication US 2024/0327476 A1 - sequence listing, part 90

SEQ ID NO: 173225 - DNA, 798 bp, synthetic construct
  misc_feature 1..798: note = Description of Artificial Sequence: Synthetic coding sequence
  source 1..798: mol_type = other DNA
atgctgctgtggcccctgcggggctgggccgcccgggccctgcgctgctttggacctggcagccggggcagccctgccagcggccctggcccccggcgggtgcagaggcgggcctggcccccagacaaggagcaggagaaggagaagaagagcgtcatctgtgtggagggcaacatcgccagcggcaagaccacctgcctggagttcttcagcaatgccacagatgtggaggtgctgacagagcctgtgtccaagtggagaaatgtgcggggccacaaccccctgggcctgatgtaccatgatgccagccgctggggcctgaccctgcagacctacgtgcagctgaccatgctggacagacacacccggccccaggtgtcctctgtgcggctgatggagaggagcatccacagcgcccgctacatctttgtggagaacctgtaccgcagcggcaagatgcctgaggtggactatgtggtgctgtctgagtggtttgactggatcctgaggaacatggatgtgtctgtggacctgattgtgtacctgcggaccaaccctgagacctgctaccagaggctgaagaagcgctgccgggaggaggagaaggtgatccccctggagtacctggaggccatccaccacctgcacgaggagtggctgatcaagggcagcctcttccccatggccgcccctgtgctggtgattgaagctgaccaccacatggagaggatgctggagctgtttgagcagaacagagaccgcatcctgaccccagaaaataggaagcactgcccctag

SEQ ID NO: 173226 - DNA, 507 bp, synthetic construct
  misc_feature 1..507: note = Description of Artificial Sequence: Synthetic coding sequence
  source 1..507: mol_type = other DNA
atgtaccatgatgccagccgctggggcctgaccctgcagacctacgtgcagctgaccatgctggacagacacacccggccccaggtgtcctctgtgcggctgatggagaggagcatccacagcgcccgctacatctttgtggagaacctgtacagaagtggcaagatgcctgaggtggactatgtggtgctgtctgagtggtttgactggatcctgaggaacatggatgtgtctgtggacctgattgtgtacctgcggaccaaccctgagacctgctaccagaggctgaagaagcgctgccgggaggaggagaaggtgatccccctggagtacctggaggccatccaccacctgcacgaggagtggctgatcaagggcagcctcttccccatggccgcccctgtgctggtgattgaggccgaccaccacatggagaggatgctggagctgtttgagcagaacagagaccgcatcctgaccccagagaacaggaagcactgcccctag

SEQ ID NO: 173227 - DNA, 705 bp, synthetic construct
  misc_feature 1..705: note = Description of Artificial Sequence: Synthetic coding sequence
  source 1..705: mol_type = other DNA
atgggcgccttctgccagaggcccagcagtgacaaggagcaggagaaggagaagaagagcgtcatctgtgtggagggcaacatcgccagcggcaagaccacctgcctggagttcttcagcaatgccacagatgtggaggtgctgacagagcctgtgtccaagtggagaaatgtgcggggccacaaccccctgggcctgatgtaccatgatgccagccgctggggcctgaccctgcagacctacgtgcagctgaccatgctggacagacacacccggccccaggtgtcctctgtgcggctgatggagaggagcatccacagcgcccgctacatctttgtggagaacctgtacagaagtggcaagatgcctgaggtggactatgtggtgctgtctgagtggtttgactggatcctgaggaacatggatgtgtctgtggacctgattgtgtacctgcggaccaaccctgagacctgctaccagaggctgaagaagcgctgccgggaggaggagaaggtgatccccctggagtacctggaggccatccaccacctgcacgaggagtggctgatcaagggcagcctcttccccatggccgcccctgtgctggtgattgaggccgaccaccacatggagaggatgctggagctgtttgagcagaacagagaccgcatcctgaccccagagaacaggaagcactgcccctag

SEQ ID NO: 173228 - DNA, 507 bp, synthetic construct; identical to SEQ ID NO: 173226
  misc_feature 1..507: note = Description of Artificial Sequence: Synthetic coding sequence
  source 1..507: mol_type = other DNA

SEQ ID NO: 173229 - DNA, 651 bp, synthetic construct
  misc_feature 1..651: note = Description of Artificial Sequence: Synthetic coding sequence
  source 1..651: mol_type = other DNA
atgaccagcatctgtgtggagggcaacatcgccagcggcaagaccacctgcctggagttcttcagcaatgccacagatgtggaggtgctgacagagcctgtgtccaagtggagaaatgtgcggggccacaaccccctgggcctgatgtaccatgatgccagccgctggggcctgaccctgcagacctacgtgcagctgaccatgctggacagacacacccggccccaggtgtcctctgtgcggctgatggagaggagcatccacagcgcccgctacatctttgtggagaacctgtacagaagtggcaagatgcctgaggtggactatgtggtgctgtctgagtggtttgactggatcctgaggaacatggatgtgtctgtggacctgattgtgtacctgcggaccaaccctgagacctgctaccagaggctgaagaagcgctgccgggaggaggagaaggtgatccccctggagtacctggaggccatccaccacctgcacgaggagtggctgatcaagggcagcctcttccccatggccgcccctgtgctggtgattgaggccgaccaccacatggagaggatgctggagctgtttgagcagaacagagaccgcatcctgaccccagagaacaggaagcactgcccctag

SEQ ID NO: 173230 - DNA, 723 bp, synthetic construct
  misc_feature 1..723: note = Description of Artificial Sequence: Synthetic coding sequence
  source 1..723: mol_type = other DNA
atgctgctgtggcccctgcggggctgggccgcccgggccctgcgctgctttggacctggcagccggggcagccctgccagcggccctggcccccggcgggtgcagaggcgggcctggcccccagacaaggagcaggagaaggagaagaagtctgtggtgctgacagagcctgtgtccaagtggagaaatgtgcggggccacaaccccctgggcctgatgtaccatgatgccagccgctggggcctgaccctgcagacctacgtgcagctgaccatgctggacagacacacccggccccaggtgtcctctgtgcggctgatggagaggagcatccacagcgcccgctacatctttgtggagaacctgtacagaagtggcaagatgcctgaggtggactatgtggtgctgtctgagtggtttgactggatcctgaggaacatggatgtgtctgtggacctgattgtgtacctgcggaccaaccctgagacctgctaccagaggctgaagaagcgctgccgggaggaggagaaggtgatccccctggagtacctggaggccatccaccacctgcacgaggagtggctgatcaagggcagcctcttccccatggccgcccctgtgctggtgattgaggccgaccaccacatggagaggatgctggagctgtttgagcagaacagagaccgcatcctgaccccagagaacaggaagcactgcccctag

SEQ ID NO: 173231 - DNA, 840 bp, synthetic construct
  misc_feature 1..840: note = Description of Artificial Sequence: Synthetic coding sequence
  source 1..840: mol_type = other DNA
atgcctgtggccggcagcgagctgccccggcggcccctgcccccagctgcccaggagagagatgctgagccccggcccccccacggggagctgcagtacctgggccagatccagcacatcctgcgctgtggggtgaggaaggatgacagaactggaacaggcaccctgtctgtgtttggcatgcaggcccgctacagcctgagagatgagttccccctgctgaccaccaagagggtcttctggaagggcgtgctggaggagctgctgtggttcatcaagggcagcaccaatgccaaggagctgagcagcaagggcgtgaagatctgggatgccaacggcagccgggacttcctggacagcctgggcttcagcacccgggaggagggggacctgggccctgtgtatggcttccagtggaggcactttggagctgagtacagagacatggagagtgacctgcccctgatggccctgcccccctgccacgccctgtgccagttctacgtggtgaacagcgagctgagctgccagctgtaccagaggtctggggacatgggcctgggcgtgcccttcaacatcgccagctatgccctgctgacctacatgattgcccacatcaccggcctgaagccaggggacttcatccacaccctgggagatgcccacatctacctgaaccacatcgagcccctgaagatccagctgcagcgggagccccggcccttccccaagctgcgcatcctgaggaaggtggagaagattgatgacttcaaggccgaggacttccagatcgagggctacaacccccaccccaccatcaagatggagatggctgtgtag

SEQ ID NO: 173232 - DNA, 693 bp, synthetic construct
  misc_feature 1..693: note = Description of Artificial Sequence: Synthetic coding sequence
  source 1..693: mol_type = other DNA
atgcctgtggccggcagcgagctgccccggcggcccctgcccccagctgcccaggagagagatgctgagccccggcccccccacggggagctgcagtacctgggccagatccagcacatcctgcgctgtggggtgaggaaggatgacagaactggaacaggcaccctgtctgtgtttggcatgcaggcccgctacagcctgcgggactacagcggccagggcgtggaccagctgcagagggtcatcgacaccatcaagaccaacccagatgaccggcgcatcatcatgtgtgcctggaacccccgggacctgcccctgatggccctgcccccctgccacgccctgtgccagttctacgtggtgaacagcgagctgagctgccagctgtaccagaggtctggggacatgggcctgggcgtgcccttcaacatcgccagctatgccctgctgacctacatgattgcccacatcaccggcctgaagccaggggacttcatccacaccctgggagatgcccacatctacctgaaccacatcgagcccctgaagatccagctgcagcgggagccccggcccttccccaagctgcgcatcctgaggaaggtggagaagattgatgacttcaaggccgaggacttccagatcgagggctacaacccccaccccaccatcaagatggagatggctgtgtag

SEQ ID NO: 173233 - DNA, 942 bp, synthetic construct
  misc_feature 1..942: note = Description of Artificial Sequence: Synthetic coding sequence
  source 1..942: mol_type = other DNA
atgcctgtggccggcagcgagctgccccggcggcccctgcccccagctgcccaggagagagatgctgagccccggcccccccacggggagctgcagtacctgggccagatccagcacatcctgcgctgtggggtgaggaaggatgacagaactggaacaggcaccctgtctgtgtttggcatgcaggcccgctacagcctgagagatgagttccccctgctgaccaccaagagggtcttctggaagggcgtgctggaggagctgctgtggttcatcaagggcagcaccaatgccaaggagctgagcagcaagggcgtgaagatctgggatgccaacggcagccgggacttcctggacagcctgggcttcagcacccgggaggagggggacctgggccctgtgtatggcttccagtggaggcactttggagctgagtacagagacatggagagtgactacagcggccagggcgtggaccagctgcagagggtgattgacaccatcaagaccaacccagatgaccggcgcatcatcatgtgtgcctggaacccccgggacctgcccctgatggccctgcccccctgccacgccctgtgccagttctacgtggtgaacagcgagctgagctgccagctgtaccagaggtctggggacatgggcctgggcgtgcccttcaacatcgccagctatgccctgctgacctacatgattgcccacatcaccggcctgaagccaggggacttcatccacaccctgggagatgcccacatctacctgaaccacatcgagcccctgaagatccagctgcagcgggagccccggcccttccccaagctgcgcatcctgaggaaggtggagaagattgatgacttcaaggccgaggacttccagatcgagggctacaacccccaccccaccatcaagatggagatggctgtgtag

SEQ ID NO: 173234 - DNA, 678 bp, synthetic construct
  misc_feature 1..678: note = Description of Artificial Sequence: Synthetic coding sequence
  source 1..678: mol_type = other DNA
atgagccggcccaggaagaggctggccggcaccagcggcagtgacaagggcctgagcggcaagaggaccaagacagagaacagcggggaggccctggccaaggtggaggacagcaacccccagaagaccagcgccaccaagaactgcctgaagaacctgagcagccactggctgatgaagtctgagcctgagagccggctggagaagggcgtggatgtgaagttcagcattgaggacctgaaggcccagcccaagcagaccacctgctgggatggagtgaggaactaccaggccaggaacttcctgcgggccatgaagctgggggaggaggccttcttctaccacagcaactgcaaggagcccggcattgctggcctgatgaagatcgtgaaggaggcctacccagaccacacccagtttgagaagaacaacccccactatgaccccagcagcaaagaagacaaccccaagtggagcatggtggatgtgcagtttgtgaggatgatgaagcgcttcatccccctggccgagctgaagagctaccaccaggcccacaaggccaccggcggccccctgaagaacatggtgctcttcacccggcagaggctgagcatccagcccctgacccaggaggagtttgattttgtgctgagcctggaggagaaggagcccagctag

SEQ ID NO: 173235 - DNA, 501 bp, synthetic construct
  misc_feature 1..501: note = Description of Artificial Sequence: Synthetic coding sequence
  source 1..501: mol_type = other DNA
atgagccggcccaggaagaggctggccggcaccagcggcagtgacaagggcctgagcggcaagaggaccaagacagagaacagcggggaggccctggccaaggtggaggacagcaacccccagaagaccagcgccaccaagaactgcctgaagaacctgagcagccactggctgatgaagtctgagcctgagagccggctggagaagggcgtggatgtgaagttcagcattgaggacctgaaggcccagcccaagcagaccacctgctgggatggagtgaggaactaccaggccaggaacttcctgcgggccatgaagctgggggaggaggccttcttctaccacagcaactgcaaggagcccggcattgctggcctgatgaagatcgtgaaggaggcctacccagaccacacccagtttgagaagaacaacccccactatgaccccagcagcaaagaagacaaccccaagtggagcatgaagagcctcatcctcttctag

SEQ ID NO: 173236 - DNA, 678 bp, synthetic construct; identical to SEQ ID NO: 173234
  misc_feature 1..678: note = Description of Artificial Sequence: Synthetic coding sequence
  source 1..678: mol_type = other DNA

SEQ ID NO: 173237 - DNA, 678 bp, synthetic construct; identical to SEQ ID NO: 173234
  misc_feature 1..678: note = Description of Artificial Sequence: Synthetic coding sequence
  source 1..678: mol_type = other DNA

SEQ ID NO: 173238 - DNA, 1926 bp, synthetic construct
  misc_feature 1..1926: note = Description of Artificial Sequence: Synthetic coding sequence
  source 1..1926: mol_type = other DNA
atggccctgagcctggaggagtttgtgcacagcctggacctgcggaccctgccccgggtgctggagatccaggccggcatctacctggagggcagcatctatgagatgtttggaaatgaatgctgcttcagcactggagaggtgatcaagatcaccggcctgaaggtgaagaagatcatcgccgagatctgtgagcagatcgagggctgtgagagcctgcagccctttgagctgcccatgaacttccctggcctcttcaagatcgtggccgacaagaccccctacctgaccatggaggagatcaccaggaccatccacatcggccccagccggctgggccacccctgcttctaccaccagaaggacatcaagctggagaacctgatcatcaagcagggcgagcagatcatgctgaacagcgtggaggagattgatggagagatcatggtgtcctgtgctgtggccaggaaccaccagacccacagcttcaacctgcccctgagccaggagggggagttctatgaatgtgaagatgagcgcatctacaccctgaaggagatcgtggagtggaagatccccaagaacagaaccaggacagtgaacctgacagacttcagcaacaagtgggacagcaccaaccccttccccaaggacttctacggcaccctcatcctgaagcctgtgtatgagatccagggcgtgatgaagttcaggaaggacatcatccgcatcctgcccagcctggatgtggaggtgaaggacatcacagacagctatgatgccaactggttcctgcagctgctgagcacagaggacctgtttgagatgaccagcaaggagttccccatcgtgacagaggtgattgaggcccctgagggcaaccacctgccccagagcatcctgcagcccgggaagaccatcgtcatccacaagaagtaccaggccagccgcatcctggccagcgagatccgcagcaacttccccaagaggcacttcctgatccccaccagctacaagggcaagttcaagaggcggccccgggagttccccacagcctatgacctggagatcgccaagtctgagaaggagcccctgcacgtggtggccaccaaggccttccacagcccccatgacaagctgagctctgtgtctgtgggggaccagttcctggtgcaccagagcgagaccacagaggtgctgtgtgagggcatcaagaaggtggtgaatgtgctggcctgtgagaagatcctgaagaagagctatgaagctgccctgctgcccctgtacatggagggcggctttgtggaggtgattcatgacaagaagcagtaccccatcagcgagctgtgcaagcagttccggctgcccttcaacgtgaaggtgtctgtgcgggacctgagcattgaggaggatgtgctggccgccaccccaggcctgcagctggaggaggacatcacagacagctacctgctgatcagtgactttgccaaccccacagagtgctgggagatccctgtgggccgcctgaacatgacagtgcagctggtgagcaacttcagcagagatgctgagcccttcctggtgaggaccctggtggaggagatcacagaggagcagtactacatgatgagaagatatgagagcagcgccagccaccccccacccaggcctcccaagcaccccagcgtggaggagaccaagctgaccctgctgaccctggccgaggagaggacagtggacctgcccaagagccccaagaggcaccacgtggacatcaccaagaagctgcaccccaaccaggccggcctggacagcaaggtgctgattggcagccagaatgacctggtggatgaggagaaggagaggagcaacagaggagccacagccatcgccgagaccttcaagaatgagaagcaccagaagtag

SEQ ID NO: 173239 - DNA, 1689 bp, synthetic construct
  misc_feature 1..1689: note = Description of Artificial Sequence: Synthetic coding sequence
  source 1..1689: mol_type = other DNA
atgaacttccctggcctcttcaagatcgtggccgacaagaccccctacctgaccatggaggagatcaccaggaccatccacatcggccccagccggctgggccacccctgcttctaccaccagaaggacatcaagctggagaacctgatcatcaagcagggcgagcagatcatgctgaacagcgtggaggagattgatggagagatcatggtgtcctgtgctgtggccaggaaccaccagacccacagcttcaacctgcccctgagccaggagggggagttctatgaatgtgaagatgagcgcatctacaccctgaaggagatcgtggagtggaagatccccaagaacagaaccaggacagtgaacctgacagacttcagcaacaagtgggacagcaccaaccccttccccaaggacttctacggcaccctcatcctgaagcctgtgtatgagatccagggcgtgatgaagttcaggaaggacatcatccgcatcctgcccagcctggatgtggaggtgaaggacatcacagacagctatgatgccaactggttcctgcagctgctgagcacagaggacctgtttgagatgaccagcaaggagttccccatcgtgacagaggtgattgaggcccctgagggcaaccacctgccccagagcatcctgcagcccgggaagaccatcgtcatccacaagaagtaccaggccagccgcatcctggccagcgagatccgcagcaacttccccaagaggcacttcctgatccccaccagctacaagggcaagttcaagagaagaccccgggagttccccacagcctatgacctggagatcgccaagtctgagaaggagcccctgcacgtggtggccaccaaggccttccacagcccccatgacaagctgagctctgtgtctgtgggggaccagttcctggtgcaccagagcgagaccacagaggtgctgtgtgagggcatcaagaaggtggtgaatgtgctggcctgtgagaagatcctgaagaagagctatgaggccgccctgctgcccctgtacatggagggcggctttgtggaggtgattcatgacaagaagcagtaccccatcagcgagctgtgcaagcagttccggctgcccttcaacgtgaaggtgtctgtgcgggacctgagcattgaagaagatgtgctggccgccaccccaggcctgcagctggaggaggacatcacagacagctacctgctgatcagtgactttgccaaccccacagagtgctgggagatccctgtgggccgcctgaacatgacagtgcagctggtgagcaacttcagcagagatgctgagcccttcctggtgaggaccctggtggaggagatcacagaggagcagtactacatgatgagaagatatgagagcagcgccagccaccccccaccccggccccccaagcaccccagcgtggaggagaccaagctgaccctgctgaccctggccgaggagaggacagtggacctgcccaagagccccaagaggcaccacgtggacatcaccaagaagctgcaccccaaccaggccggcctggacagcaaggtgctgattggcagccagaatgacctggtggatgaggagaaggagaggagcaacagaggagccacagccatcgccgagaccttcaagaatgagaagcaccagaagtag

SEQ ID NO: 173240 - DNA, 372 bp, synthetic construct
  misc_feature 1..372: note = Description of Artificial Sequence: Synthetic coding sequence
  source 1..372: mol_type = other DNA
atgaacttccctgtgaggaaggacatcatccgcatcctgcccagcctggatgtggaggtgaaggacatcacagacagctatgatgccaactggttcctgcagctgctgagcacagaggacctgtttgagatgaccagcaaggagttccccatcgtgacagaggtgattgaggcccctgagggcaaccacctgccccagagcatcctgcagcccgggaagaccatcgtcatccacaagaagtaccaggccagccgcatcctggccagcgagatccgcagcaacttccccaagaggcacttcctgatccccaccagctacaagggcaagttcaagaggcggccccgggagttccccacagcctatgacctgtag

SEQ ID NO: 173241 - DNA, 1821 bp, synthetic construct
  misc_feature 1..1821: note = Description of Artificial Sequence: Synthetic coding sequence
  source 1..1821: mol_type = other DNA
atgtttggaaatgaatgctgcttcagcactggagaggtgatcaagatcaccggcctgaaggtgaagaagatcatcgccgagatctgtgagcagatcgagggctgtgagagcctgcagccctttgagctgcccatgaacttccctggcctcttcaagatcgtggccgacaagaccccctacctgaccatggaggagatcaccaggaccatccacatcggccccagccggctgggccacccctgcttctaccaccagaaggacatcaagctggagaacctgatcatcaagcagggcgagcagatcatgctgaacagcgtggaggagattgatggagagatcatggtgtcctgtgctgtggccaggaaccaccagacccacagcttcaacctgcccctgagccaggagggggagttctatgaatgtgaagatgagcgcatctacaccctgaaggagatcgtggagtggaagatccccaagaacagaaccaggacagtgaacctgacagacttcagcaacaagtgggacagcaccaaccccttccccaaggacttctacggcaccctcatcctgaagcctgtgtatgagatccagggcgtgatgaagttcaggaaggacatcatccgcatcctgcccagcctggatgtggaggtgaaggacatcacagacagctatgatgccaactggttcctgcagctgctgagcacagaggacctgtttgagatgaccagcaaggagttccccatcgtgacagaggtgattgaggcccctgagggcaaccacctgccccagagcatcctgcagcccgggaagaccatcgtcatccacaagaagtaccaggccagccgcatcctggccagcgagatccgcagcaacttccccaagaggcacttcctgatccccaccagctacaagggcaagttcaagagaagaccccgggagttccccacagcctatgacctggagatcgccaagtctgagaaggagcccctgcacgtggtggccaccaaggccttccacagcccccatgacaagctgagctctgtgtctgtgggggaccagttcctggtgcaccagagcgagaccacagaggtgctgtgtgagggcatcaagaaggtggtgaatgtgctggcctgtgagaagatcctgaagaagagctatgaggccgccctgctgcccctgtacatggagggcggctttgtggaggtgattcatgacaagaagcagtaccccatcagcgagctgtgcaagcagttccggctgcccttcaacgtgaaggtgtctgtgcgggacctgagcattgaagaagatgtgctggccgccaccccaggcctgcagctggaggaggacatcacagacagctacctgctgatcagtgactttgccaaccccacagagtgctgggagatccctgtgggccgcctgaacatgacagtgcagctggtgagcaacttcagcagagatgctgagcccttcctggtgaggaccctggtggaggagatcacagaggagcagtactacatgatgagaagatatgagagcagcgccagccaccccccaccccggccccccaagcaccccagcgtggaggagaccaagctgaccctgctgaccctggccgaggagaggacagtggacctgcccaagagccccaagaggcaccacgtggacatcaccaagaagctgcaccccaaccaggccggcctggacagcaaggtgctgattggcagccagaatgacctggtggatgaggagaaggagaggagcaacagaggagccacagccatcgccgagaccttcaagaatgagaagcaccagaagtag

SEQ ID NO: 173242 - DNA, 2043 bp, synthetic construct
  misc_feature 1..2043: note = Description of Artificial Sequence: Synthetic coding sequence
  source 1..2043: mol_type = other DNA
atggccctgagcctggaggagtttgtgcacagcctggacctgcggaccctgccccgggtgctggagatccaggccggcatctacctggagggcagcatctatgagatgtttggaaatgaatgctgcttcagcactggagaggtgatcaagatcaccggcctgaaggtgaagaagatcatcgccgagatctgtgagcagatcgagggctgtgagagcctgcagccctttgagctgcccatgaacttccctggcctcttcaagatcgtggccgacaagaccccctacctgaccatggaggagatcaccaggaccatccacatcggccccagccggctgggccacccctgcttctaccaccagaaggacatcaagctggagaacctgatcatcaagcagggcgagcagatcatgctgaacagcgtggaggagattgatggagagatcatggtgtcctgtgctgtggccaggaaccaccagacccacagcttcaacctgcccctgagccaggagggggagttctatgaatgtgaagatgagcgcatctacaccctgaaggagatcgtggagtggaagatccccaagaacagaaccaggacagtgaacctgacagacttcagcaacaagtgggacagcaccaaccccttccccaaggacttctacggcaccctcatcctgaagcctgtgtatgagatccagggcgtgatgaagttcaggaaggacatcatccgcatcctgcccagcctggatgtggaggtgaaggacatcacagacagctatgatgccaactggttcctgcagctgctgagcacagaggacctgtttgagatgaccagcaaggagttccccatcgtgacagaggtgattgaggcccctgagggcaaccacctgccccagagcatcctgcagcccgggaagaccatcgtcatccacaagaagtaccaggccagccgcatcctggccagcgagatccgcagcaacttccccaagaggcacttcctgatccccaccagctacaagggcaagttcaagaggcggccccgggagttccccacagcctatgacctggagatcgccaagtctgagaaggagcccctgcacgtggtggccaccaaggccttccacagcccccatgacaagctgagctctgtgtctgtgggggaccagttcctggtgcaccagagcgagaccacagaggtgctgtgtgagggcatcaagaaggtggtgaatgtgctggcctgtgagaagatcctgaagaagagctatgaagctgccctgctgcccctgtacatggagggcggctttgtggaggtgattcatgacaagaagcagtaccccatcagcgagctgtgcaagcagttccggctgcccttcaacgtgaaggtgtctgtgcgggacctgagcattgaggaggatgtgctggccgccaccccaggcctgcagctggaggaggacatcacagacagctacctgctgatcagtgactttgccaaccccacagagtgctgggagatccctgtgggccgcctgaacatgacagtgcagctggtgagcaacttcagcagagatgctgagcccttcctggtgaggaccctggtggaggagatcacagaggagcagtactacatgatgagaagatatgagagcagcgccagccaccccccacccaggcctcccaagcaccccagcgtggaggagaccaagctgaccctgctgaccctggccgaggagaggacagtggacctgcccaagagccccaaggccggcgtgcagtggagggacctgggcagcctgcagcccctgcccccaggcttcaagcagttcagcgccagcgccagccacgtggccggcatcaccggcaccccccaccacgtgcagaggcaccacgtggacatcaccaagaagctgcaccccaaccaggccggcctggacagcaaggtgctgattggcagccagaatgacctggtggatgaggagaaggagaggagcaacagaggagccacagccatcgccgagaccttcaagaatgagaagcaccagaagtag

SEQ ID NO: 173243 - DNA, 1581 bp, synthetic construct
  misc_feature 1..1581: note = Description of Artificial Sequence: Synthetic coding sequence
  source 1..1581: mol_type = other DNA
atggatgtgcgcttctacccacctccagcccagcctgctgctgccccagatgccccctgcctgggccccagcccctgcctggacccctactactgcaacaagtttgatggagagaacatgtacatgtccatgacagagcccagccaggactatgtgcctgccagccagagctacccaggccccagcctggagagcgaggacttcaacatcccccccatcaccccacccagcctgcctgaccacagcctggtgcacctgaatgaggtggagagcggctaccacagcctgtgccaccccatgaaccacaacggcctgctgcccttccacccccagaacatggacctgcctgagatcaccgtgagcaacatgctgggccaggacggcaccctgctgagcaacagcatctctgtgatgccagacatccggaaccctgagggcacccagtacagcagccacccccagatggccgccatgaggccccggggccagcctgctgacatccggcagcagcccggcatgatgccccacggccagctgaccaccatcaaccagagccagctgagcgcccagctgggcctgaacatgggcggcagcaatgtgccccacaacagccccagccccccaggcagcaagagcgccacccccagccccagcagctctgtgcatgaagatgaaggagatgacaccagcaagatcaatggaggagagaagaggcctgccagtgacatgggcaagaagcccaagacccccaagaagaagaagaagaaggaccccaatgagccccagaagcctgtgtctgcctatgccctcttcttccgggacacccaggccgccatcaagggccagaaccccaatgccaccttcggggaggtgtccaagatcgtggcctccatgtgggatggcctgggggaggagcagaagcaggtgtacaagaagaagacagaggccgccaagaaggagtacctgaagcagctggccgcctaccgggccagcctggtgtccaagagctacagcgagcctgtggatgtgaagaccagccagcccccccagctgatcaacagcaagcccagcgtcttccacggccccagccaggcccacagcgccctgtacctgagcagccactaccaccagcagcccggcatgaacccccacctgacagccatgcaccccagcctgcccaggaacatcgcccccaagcccaacaaccagatgcctgtgacagtgtccatcgccaacatggctgtgtccccacctccacccctgcagatcagcccccccctgcaccagcacctgaacatgcagcagcaccagcccctgaccatgcagcagcccctgggcaaccagctgcccatgcaggtgcagagcgccctgcacagccccaccatgcagcagggcttcaccctgcagcctgactaccagaccatcatcaaccccaccagcacagctgcccaggtggtgacccaggccatggagtatgtgcgcagcggctgcaggaaccccccaccccagcctgtggactggaacaatgactactgcagcagcggcggcatgcagagggacaaggccctgtacctgacctag

SEQ ID NO: 173244 - DNA, 831 bp, synthetic construct
  misc_feature 1..831: note = Description of Artificial Sequence: Synthetic coding sequence
  source 1..831: mol_type = other DNA
atgggcaagaagcccaagacccccaagaagaagaagaagaaggaccccaatgagccccagaagcctgtgtctgcctatgccctcttcttccgggacacccaggccgccatcaagggccagaaccccaatgccaccttcggggaggtgtccaagatcgtggcctccatgtgggatggcctgggggaggagcagaagcaggtgtacaagaagaagacagaggccgccaagaaggagtacctgaagcagctggccgcctaccgggccagcctggtgtccaagagctacagcgagcctgtggatgtgaagaccagccagcccccccagctgatcaacagcaagcccagcgtcttccacggccccagccaggcccactaccaccagcagcccggcatgaacccccacctgacagccatgcaccccagcctgcccaggaacatcgcccccaagcccaacaaccagatgcctgtgacagtgtccatcgccaacatggctgtgtccccacctccacccctgcagatcagcccccccctgcaccagcacctgaacatgcagcagcaccagcccctgaccatgcagcagcccctgggcaaccagctgcccatgcaggtgcagagcgccctgcacagccccaccatgcagcagggcttcaccctgcagcctgactaccagaccatcatcaaccccaccagcacagctgcccaggtggtgacccaggccatggagtatgtgcgcagcggctgcaggaaccccccaccccagcctgtggactggaacaatgactactgcagcagcggcggcatgcagagggacaaggccctgtacctgacctag

SEQ ID NO: 173245 - DNA, 747 bp, synthetic construct
  misc_feature 1..747: note = Description of Artificial Sequence: Synthetic coding sequence
  source 1..747: mol_type = other DNA
atgcctgagttcctggaggaccccagcgtgctgaccaaggacaagctgaagtctgagctggtggccaacaacgtgaccctgcctgctggggagcagaggaaggatgtgtatgtgcagctgtacctgcagcacctgacagccaggaacagaccacccctgcctgctggcaccaacagcaagggccccccagacttcagcagtgatgaggagcgggagcccacccctgtgctgggcagcggggctgctgctgctggccgcagcagagctgctgtgggcaggaaggccaccaagaagacagacaagccccggcaggaggacaaggatgacctggatgtgacagagctgaccaatgaagacctgctggaccagctggtgaagtatggagtgaaccctggccccatcgtgggcaccaccaggaagctgtatgagaagaagctgctgaagctgcgggagcagggcacagagagccgcagcagcacccccctgcccaccatcagcagcagcgctgagaacacccggcagaatggcagcaatgacagcgaccgctacagcgacaatgaggaggacagcaagattgagctgaagctggagaagcgggagcccctgaagggccgggccaagacccctgtgaccctgaagcagaggagagtggagcacaaccaggtgtccctggtgctgctgcccccctgcaccggcatcaacaacctgctgaccaccctcatccacgtgctggccttcaatggatag

SEQ ID NO: 173246 - DNA, 2085 bp, synthetic construct
  misc_feature 1..2085: note = Description of Artificial Sequence: Synthetic coding sequence
  source 1..2085: mol_type = other DNA
atgcctgagttcctggaggaccccagcgtgctgaccaaggacaagctgaagtctgagctggtggccaacaacgtgaccctgcctgctggggagcagaggaaggatgtgtatgtgcagctgtacctgcagcacctgacagccaggaacagaccacccctgcctgctggcaccaacagcaagggccccccagacttcagcagtgatgaggagcgggagcccacccctgtgctgggcagcggggctgctgctgctggccgcagcagagctgctgtgggcaggaaggccaccaagaagacagacaagccccggcaggaggacaaggatgacctggatgtgacagagctgaccaatgaagacctgctggaccagctggtgaagtatggagtgaaccctggccccatcgtgggcaccaccaggaagctgtatgagaagaagctgctgaagctgcgggagcagggcacagagagccgcagcagcacccccctgcccaccatcagcagcagcgctgagaacacccggcagaatggcagcaatgacagcgaccgctacagcgacaatgaggagggcaagaagaaggagcacaagaaggtgaagagcacccgggacatcgtgcccttcagcgagctgggcaccacccccagcggcggcggcttcttccagggcatctccttccctgagatcagcaccaggcctcccctgggcagcacagagctgcaggccgccaagaaggtgcacaccagcaagggggacctgccccgggagcccctggtggccaccaacctgcccggccggggccagctgcagaagctggccagcgagaggaacctcttcatcagctgcaagagcagccatgaccgctgcctggagaagagcagcagcagcagcagccagcctgagcacagcgccatgctggtgtccacagctgccagccccagcctcatcaaggagaccaccaccggctactacaaggacatcgtggagaacatctgtggccgggagaagagcggcatccagcccctgtgcccagagaggagccacatcagtgaccagagccccctgagcagcaagaggaaggccctggaggagagcgagagcagccagctgatcagcccccccctggcccaggccatccgggactatgtgaacagcctgctggtgcagggcggcgtgggcagcctgcccggcaccagcaacagcatgccacccctggatgtggagaacatccagaagagaattgaccagagcaagttccaggagacagagttcctgagcccccccaggaaggtgccccggctgtctgagaagtctgtggaggagcgggacagcggcagctttgtggccttccagaacatccctggcagcgagctgatgagcagctttgccaagacagtggtgagccacagcctgaccaccctgggcctggaggtggccaagcagagccagcacgacaagattgatgccagcgagctgtccttccccttccacgagagcatcctgaaggtgattgaggaggagtggcagcaggtggaccggcagctgcccagcctggcctgcaagtaccctgtgagcagccgggaggccacccagatcctgtctgtgcccaaggtggatgatgagatcctgggcttcatcagcgaggccacccccctgggcggcatccaggccgccagcacagagagctgcaaccagcagctggacctggccctgtgccgggcctatgaagctgctgccagcgccctgcagatcgccacccacacagcctttgtggccaaggccatgcaggccgacatcagccaggccgcccagatcctgagcagtgaccccagcaggacccaccaggccctgggcatcctgagcaagacctatgatgctgccagctacatctgtgaggccgcctttgatgaggtgaagatggccgcccacaccatgggaaatgccaccgtgggccgccgctacctgtggctgaaggactgcaagatcaacctggccagcaagaacaagctggccagcacccccttcaagggcggcaccctgtttggaggagaggtgtgcaaggtgatcaagaagaggggcaacaagcactag

SEQ ID NO: 173247 - DNA, 1245 bp, synthetic construct
  misc_feature 1..1245: note = Description of Artificial Sequence: Synthetic coding sequence
  source 1..1245: mol_type = other DNA
atgcctgagttcctggaggaccccagcgtgctgaccaaggacaagctgaagtctgagctggtggccaacaacgtgaccctgcctgctggggagcagaggaaggatgtgtatgtgcagctgtacctgcagcacctgacagccaggaacagaccacccctgcctgctggcaccaacagcaagggccccccagacttcagcagtgatgaggagcgggagcccacccctgtgctgggcagcggggctgctgctgctggccgcagcagagctgctgtgggcaggaaggccaccaagaagacagacaagccccggcaggaggacaaggatgacctggatgtgacagagctgaccaatgaagacctgctggaccagctggtgaagtatggagtgaaccctggccccatcgtgggcaccaccaggaagctgtatgagaagaagctgctgaagctgcgggagcagggcacagagagccgcagcagcacccccctgcccaccatcagcagcagcgctgagaacacccggcagaatggcagcaatgacagcgaccgctacagcgacaatgaggaggacagcaagattgagctgaagctggagaagcgggagcccctgaagggccgggccaagacccctgtgaccctgaagcagaggagagtggagcacaaccaggtggagaccagcgagcacttcagaattgatggccctgtgatcagcgagagcacccccatcgccgagaccatcatggccagcagcaatgaaagcctggtggtgaacagagtgactggaaacttcaagcacgccagccccatcctgcccatcacagagttcagtgacatcccccggcgggcccccaagaagcccctgaccagggctgaggtgggggagaagacagaggagcggcgggtggagcgggacatcctgaaggagatgttcccctatgaggccagcacccccaccggcatcagcgccagctgccggcggcccatcaagggagctgctggccggcccctggagctgagtgacttcaggatggaggagagcttcagcagcaaatatgtgcccaagtatgtgcccctggctgatgtgaagtctgagaagaccaagaagggccgcagcatccctgtgtggatcaagatcctgctgtttgtggtggtggccgtgttcctgttcctggtgtaccaggccatggagaccaaccaggtgaaccccttcagcaacttcctgcacgtggaccccaggaagagcaactag

SEQ ID NO: 173248 - DNA, 1038 bp, synthetic construct
  misc_feature 1..1038: note = Description of Artificial Sequence: Synthetic coding sequence
  source 1..1038: mol_type = other DNA
atgcctgagttcctggaggaccccagcgtgctgaccaaggacaagctgaagtctgagctggtggccaacaacgtgaccctgcctgctggggagcagaggaaggatgtgtatgtgcagctgtacctgcagcacctgacagccaggaacagaccacccctgcctgctggcaccaacagcaagggccccccagacttcagcagtgatgaggagcgggagcccacccctgtgctgggcagcggggctgctgctgctggccgcagcagagctgctgtgggcaggaaggccaccaagaagacagacaagccccggcaggaggacaaggatgacctggatgtgacagagctgaccaatgaagacctgctggaccagctggtgaagtatggagtgaaccctggccccatcgtgggcaccaccaggaagctgtatgagaagaagctgctgaagctgcgggagcagggcacagagagccgcagcagcacccccctgcccaccatcagcagcagcgctgagaacacccggcagaatggcagcaatgacagcgaccgctacagcgacaatgaggaggacagcaagattgagctgaagctggagaagcgggagcccctgaagggccgggccaagacccctgtgaccctgaagcagaggagagtggagcacaaccaggtgggggagaagacagaggagaggagagtggagcgggacatcctgaaggagatgttcccctatgaggccagcacccccaccggcatcagcgccagctgcagaagacccatcaagggagctgctggccggcccctggagctgagtgacttcaggatggaggagagcttcagcagcaaatatgtgcccaagtatgtgcccctggctgatgtgaagtctgagaagaccaagaagggccgcagcatccctgtgtggatcaagatcctgctgtttgtggtggtggccgtgttcctgttcctggtgtaccaggccatggagaccaaccaggtgaaccccttcagcaacttcctgcacgtggaccccaggaagagcaactag

SEQ ID NO: 173249 - DNA, 1365 bp, synthetic construct
  misc_feature 1..1365: note = Description of Artificial Sequence: Synthetic coding sequence
  source 1..1365: mol_type = other DNA
atgcctgagttcctggaggaccccagcgtgctgaccaaggacaagctgaagtctgagctggtggccaacaacgtgaccctgcctgctggggagcagaggaaggatgtgtatgtgcagctgtacctgcagcacctgacagccaggaacagaccacccctgcctgctggcaccaacagcaagggccccccagacttcagcagtgatgaggagcgggagcccacccctgtgctgggcagcggggctgctgctgctggccgcagcagagctgctgtgggcaggaaggccaccaagaagacagacaagccccggcaggaggacaaggatgacctggatgtgacagagctgaccaatgaagacctgctggaccagctggtgaagtatggagtgaaccctggccccatcgtgggcaccaccaggaagctgtatgagaagaagctgctgaagctgcgggagcagggcacagagagccgcagcagcacccccctgcccaccatcagcagcagcgctgagaacacccggcagaatggcagcaatgacagcgaccgctacagcgacaatgaggaggacagcaagattgagctgaagctggagaagcgggagcccctgaagggccgggccaagacccctgtgaccctgaagcagaggagagtggagcacaaccagagctacagccaggccggcatcacagaaacagagtggaccagcggcagcagcaaaggaggccccctgcaggccctgacccgggagagcacccggggcagcaggaggacccccaggaagagggtggagaccagcgagcacttcagaattgatggccctgtgatcagcgagagcacccccatcgccgagaccatcatggccagcagcaatgaaagcctggtggtgaacagagtgactggaaacttcaagcacgccagccccatcctgcccatcacagagttcagtgacatcccccggcgggcccccaagaagcccctgaccagggctgaggtgggggagaagacagaggagcggcgggtggagcgggacatcctgaaggagatgttcccctatgaggccagcacccccaccggcatcagcgccagctgccggcggcccatcaagggagctgctggccggcccctggagctgagtgacttcaggatggaggagagcttcagcagcaaatatgtgcccaagtatgtgcccctggctgatgtgaagtctgagaagaccaagaagggccgcagcatccctgtgtggatcaagatcctgctgtttgtggtggtggccgtgttcctgttcctggtgtaccaggccatggagaccaaccaggtgaaccccttcagcaacttcctgcacgtggaccccaggaagagcaactag

SEQ ID NO: 173250 - DNA, 135 bp, synthetic construct
  misc_feature 1..135: note = Description of Artificial Sequence: Synthetic coding sequence
  source 1..135: mol_type = other DNA
atgtctgacaagccagacatggccgagattgagaagtttgacaagagcaagctgaagaagacagagacccaggagaagaaccccctgcccagcaaggagaccatcgagcaggagaagcaggccggggagagctag

SEQ ID NO: 173251 - DNA, 135 bp, synthetic construct; identical to SEQ ID NO: 173250
  misc_feature 1..135: note = Description of Artificial Sequence: Synthetic coding sequence
  source 1..135: mol_type = other DNA

SEQ ID NO: 173252 - DNA, 135 bp, synthetic construct; identical to SEQ ID NO: 173250
  misc_feature 1..135: note = Description of Artificial Sequence: Synthetic coding sequence
  source 1..135: mol_type = other DNA

SEQ ID NO: 173253 - DNA, 135 bp, synthetic construct; identical to SEQ ID NO: 173250
  misc_feature 1..135: note = Description of Artificial Sequence: Synthetic coding sequence
  source 1..135: mol_type = other DNA

SEQ ID NO: 173254 - DNA, 135 bp, synthetic construct
  misc_feature 1..135: note = Description of Artificial Sequence: Synthetic coding sequence
  source 1..135: mol_type = other DNA
atgtctgacaagccaggcatggccgagattgagaagtttgacaagagcaagctgaagaagacagagacccaggagaagaaccccctgagcagcaaggagaccatcgagcaggagcggcaggccggggagagctag

SEQ ID NO: 173255 - DNA, 1299 bp, synthetic construct
  misc_feature 1..1299: note = Description of Artificial Sequence: Synthetic coding sequence
  source 1..1299: mol_type = other DNA
atgggccctgctggcagcctgctgggcagcggccagatgcagatcaccctgtggggcagcctggccgctgtggccatcttcttcgtcatcaccttcctgatcttcctgtgcagcagctgtgaccgggagaagaagccccggcagcacagcggggaccacgagaacctgatgaatgtgcccagcgacaaggagatgttcagccgctctgtgaccagcctggccacagatgccccagccagcagcgagcagaatggagccctgaccaatggagacatcctgtctgaggacagcaccctgacctgcatgcagcactatgaggaggtgcagaccagcgccagtgacctgctggacagccaggacagcacaggcaagcccaagtgccaccagagccgggagctgccccgcatccccccagagagcgctgtggacaccatgctgacagcccggtctgtggatggagaccagggcctgggcatggagggcccctatgaggtgctgaaggacagcagcagccaggagaacatggtggaggactgcctgtatgaaacagtgaaggagatcaaggaggtggccgctgctgcccacctggagaagggccacagcggcaaggccaagagcaccagcgccagcaaggagctgcccggcccccagacagagggcaaggccgagtttgctgaatatgcctctgtggacaggaacaagaagtgccggcagagcgtgaatgtggagagcatcctgggcaacagctgtgaccctgaggaggaggcccctcctcctgtgcctgtgaagctgctggatgaaaatgaaaacctgcaggagaaggagggcggggaggccgaggagagcgccacagacaccaccagcgagaccaacaagcgcttcagcagcctgagctacaagagccgggaggaggaccccaccctgacagaggaggagatcagcgccatgtacagctctgtgaacaagccaggccagctggtgaacaagagcggccagagcctgactgtgcctgagagcacctacaccagcatccagggcgacccccagaggagccccagcagctgcaatgacctgtatgccaccgtgaaggactttgagaagacccccaacagcaccctgcccccagctggccggcccagcgaggagcctgagccagactatgaggccatccagaccctgaaccgggaggaggagaaggccaccctgggcaccaacggccaccacggcctggtgcccaaggaaaatgactatgagagcatcagtgacctgcagcagggccgggacatcacccggctgtag

SEQ ID NO: 173256 - DNA, 8136 bp, synthetic construct
  misc_feature 1..8136: note = Description of Artificial Sequence: Synthetic coding sequence
  source 1..8136: mol_type = other DNA
atggccctggtgctggagatcttcaccctgctggccagcatctgctgggtgtctgccaacatctttgagtaccaggtggatgcccagcccctgcggccctgtgagctgcagcgggagacagccttcctgaagcaggccgactatgtgccccagtgtgccgaggatggcagcttccagacagtgcagtgccagaatgatggccgcagctgctggtgtgtgggcgccaacggcagcgaggtgctgggcagccggcagcccggccggcctgtggcctgcctgtccttctgccagctgcagaagcagcagatcctgctgagcggctacatcaacagcacagacaccagctacctgccccagtgccaggacagcggggactatgcccctgtgcagtgtgatgtgcagcaggtgcagtgctggtgtgtggatgctgagggcatggaggtgtatggcacccggcagctgggccggcccaagcgctgccccaggagctgtgagatccggaacagaaggctgctgcatggagtgggggacaagagccccccccagtgcagcgctgagggggagttcatgcctgtgcagtgcaagtttgtgaacaccacagacatgatgatctttgacctggtgcacagctacaaccgcttcccagatgcctttgtgaccttcagcagcttccagaggcgcttccctgaggtgtctggctactgccactgtgccgacagccagggccgggagctggccgagaccggcctggagctgctgctggatgagatctatgacaccatctttgctggcctggacctgcccagcaccttcacagagaccaccctgtaccgcatcctgcagaggcgcttcctggccgtgcagagcgtcatcagcggccgcttccgctgccccaccaagtgtgaggtggagcgcttcaccgccaccagctttggccacccctacgtgcccagctgcagaagaaatggagactaccaggccgtgcagtgccagacagagggcccctgctggtgtgtggatgcccagggcaaggagatgcacggcacccggcagcagggcgagccccccagctgtgccgagggccagagctgtgccagcgagcggcagcaggccctgagccggctgtacttcggcaccagcggctacttcagccagcacgacctcttcagcagccctgagaagcgctgggccagcccccgggtggccaggtttgccaccagctgcccccccaccatcaaggagctgtttgtggacagcggcctgctgcggcccatggtggagggccagagccagcagttctctgtgtctgagaacctgctgaaggaggccatccgggccatcttccccagccggggcctggcccggctggccctgcagttcaccaccaaccccaagaggctgcagcagaacctgtttggaggcaagttcctggtgaatgtgggccagttcaacctgagcggggccctgggcacccggggcaccttcaacttcagccagttcttccagcagctgggcctggccagcttcctgaatggaggccggcaggaggacctggccaagcccctgtctgtgggcctggacagcaacagcagcacaggcaccccagaggccgccaagaaggatggcaccatgaacaagcccaccgtgggcagctttggatttgagatcaacctgcaggagaaccagaatgccctgaagttcctggccagcctgctggagctgcctgagttcctgctcttcctgcagcacgccatctctgtgcctgaagatgtggcccgggacctgggagatgtgatggagaccgtgctgagcagccagacctgtgagcagaccccagagcggctgtttgtgcccagctgcaccacagagggcagctatgaagatgtgcagtgcttctctggagagtgctggtgtgtgaacagctggggcaaggagctgcccggcagccgggtgcggggcggccagccccgctgccccacagactgtgagaagcagagggccaggatgcagagcctgatgggcagccagcctgctggcagcaccctgtttgtgcctgcctgcaccagcgagggccacttcctgcctgtgcagtgcttcaacagcgagtgctactgtgtggatgctgagggccaggccatccctggcaccaggtctgccatcggcaagcccaagaagtgccccaccccctgccagctgcagagcgagcaggccttcctgaggacagtgcaggccctgctgagcaacagctccatgctgcccaccctgagtgacacctacatcccccagtgcagcacagatggccagtggaggcaggtgcagtgcaatggacctcctgagcaggtgtttgagctgtaccagcgctgggaggcccagaacaagggccaggacctgaccccagccaagctgctggtgaagatcatgagctaccgggaggccgccagcggcaacttcagcctcttcatccagagcctgtatgaagctggccagcaggatgtgtttcctgtgctgagccagtaccccagcctgcaggatgtgcccctggccgccctggagggcaagaggccccagccccgggagaacatcctgctggagccctacctgttctggcagatcctgaatggccagctgagccagtacccaggcagctacagcgacttcagcacccccctggcccactttgacctgaggaactgctggtgtgtggatgaggccggccaggagctggagggcatgaggtctgagcccagcaagctgcccacctgccccggcagctgtgaggaggccaagctgcgggtgctgcagttcatccgggagacagaggagatcgtgtctgccagcaacagcagccgcttccccctgggggagagcttcctggtggccaagggcatccggctgagaaatgaagacctgggcctgcccccactcttccccccccgggaggcctttgctgagcagttcctgcggggcagtgactatgccatccggctggccgcccagagcaccctgtccttctaccagaggcggcgcttctccccagatgattctgctggggccagcgccctgctgcggagcggcccctacatgccccagtgtgatgccttcggctcctgggagcctgtgcagtgccacgccggcaccggccactgctggtgtgtggatgagaagggcggcttcatccctggcagcctgacagcccggagcctgcagatcccccagtgccccaccacctgtgagaagagcaggaccagcggcctgctgagctcctggaagcaggcccggagccaggagaaccccagccccaaggacctgtttgtgcctgcctgcctggagactggagaatatgcccggctgcaggccagcggggccggcacctggtgtgtggaccctgccagcggggaggagctgcggcccggcagcagcagcagcgcccagtgccccagcctgtgcaatgtgctgaagagcggcgtgctgagcagaagagtgtccccaggctacgtgcctgcctgcagagcagaagatggcggcttcagccctgtgcagtgtgaccaggcccagggcagctgctggtgtgtgatggacagcggggaggaggtgcccggcaccagggtgactggaggccagcctgcctgtgagagcccccgctgccccctgcccttcaatgccagcgaggtggtgggcggcaccatcctgtgtgagaccatcagcggccccaccggcagcgccatgcagcagtgccagctgctgtgccggcagggctcctggagcgtcttccccccaggccccctcatctgcagcctggagagcggccgctgggagagccagctgccccagccccgggcctgccagaggccccagctgtggcagaccatccagacccagggccacttccagctgcagctgcccccaggcaagatgtgcagcgctgactatgctgacctgctgcagaccttccaggtgttcatcctggatgagctgacagcccggggcttctgccagatccaggtgaagaccttcggcaccctggtgtccatccctgtgtgcaacaacagctctgtgcaggtgggctgcctgacccgggagcggctgggcgtgaatgtgacctggaagagccggctggaggacatccctgtggccagcctgcctgacctgcatgacatcgagcgggccctggtgggcaaggacctgctgggccgcttcacagacctgatccagagcggcagcttccagctgcacctggacagcaagaccttccctgctgagaccatccgcttcctgcagggcgaccacttcggcaccagccccaggacctggtttggctgcagcgagggcttctaccaggtgctgaccagcgaggccagccaggacggcctgggctgtgtgaagtgcccagagggcagctacagccaggatgaggagtgcatcccctgccctgtgggcttctaccaggagcaggccggcagcctggcctgtgtgccctgccctgtgggccgcaccaccatctctgctggggccttcagccagacccacctgatgcagaagtttgagaaggtgcctgagagcaaggtgatctttgatgccaatgcccctgtggccgtgcgcagcaaggtgcctgattctgagttccctgtgatgcagtgcctgacagactgcacagaagatgaggcctgcagcttcttcaccgtgtccaccacagagcctgagatcagctgtgacttctacgcctggaccagtgacaacgtggcctgcatgaccagtgaccagaagagagatgccctgggcaacagcaaggccaccagctttggcagcctgcgctgccaggtgaaggtgcgcagccacggccaggacagccctgctgtgtacctgaagaagggccagggcagcaccaccaccctgcagaagagatttgagcccaccggcttccagaacatgctgagcggcctgtacaaccccatcgtgttcagcgccagcggggccaacctgacagatgcccacctgttctgcctgctggcctgtgaccgggacctgtgctgtgatggctttgtgctgacccaggtgcagggcggggccatcatctgtggcctgctgagcagccccagcgtgctgctgtgcaatgtgaaggactggatggaccccagcgaggcctgggccaatgccacctgccctggggtgacctatgaccaggagagccaccaggtgatcctgcggctgggggaccaggagttcatcaagagcctgacccccctggagggcacccaggacaccttcaccaacttccagcaggtgtacctgtggaaggacagcgacatgggcagcaggcctgagagcatgggctgcaggaaggacacagtgcccaggcctgccagccccacagaggccggcctgaccacagagctgttcagccctgtggacctgaaccaggtgattgtgaatggaaaccagagcctgagcagccagaagcactggctgttcaagcacctgttcagcgcccagcaggccaacctgtggtgcctgagccgctgtgtgcaggagcacagcttctgccagctggccgagatcacagaaagtgccagcctgtacttcacctgcaccctgtacccagaggcccaggtgtgtgatgacatcatggagagcaatgcccagggctgccgcctcatcctgccccagatgcccaaggccctcttcaggaagaaggtgatcctggaggacaaggtgaagaacttctacacccggctgcccttccagaagctgatgggcatcagcatccggaacaaggtgcccatgtctgagaagagcatcagcaatggcttctttgaatgtgaaagaagatgtgatgctgacccctgctgcaccggcttcggcttcctgaatgtgtcccagctgaagggcggggaggtgacctgcctgaccctgaacagcctgggcatccagatgtgcagtgaagaaaatggaggagcctggaggatcctggactgtggcagcccagacatcgaggtgcacacctaccccttcggctggtaccagaagcccatcgcccagaacaatgcccccagcttctgccccctggtggtgctgcccagcctgacagagaaggtgtccctggacagctggcagagcctggccctgagctctgtggtggtggaccccagcatccgccactttgatgtggcccacgtgtccacagctgccaccagcaacttctctgctgtgcgggacctgtgcctgtctgagtgcagccagcacgaggcctgcctgatcaccaccctgcagacccagcccggggctgtgcgctgcatgttttatgctgacacccagagctgcacccacagcctgcagggccagaactgccgcctgctgctgcgggaggaggccacccacatctacaggaagccaggcatcagcctgctgtcctatgaggcctctgtgcccagcgtgcccatcagcacccacggccgcctgctgggccgcagccaggccatccaggtgggcacctcctggaagcaggtggaccagttcctgggcgtgccctatgctgccccacccctggccgagcggcgcttccaggcccctgagcccctgaactggacaggctcctgggatgccagcaagccccgggccagctgctggcagcccggcaccaggaccagcaccagccctggggtgtctgaggactgcctgtacctgaatgtgttcatcccccagaatgtggccccaaatgcctctgtgctggtgttcttccacaacaccatggaccgggaggagagcgagggctggccagccattgatggcagcttcctggccgctgtgggcaacctgattgtggtgacagccagctacagagtgggcgtgtttggcttcctgagcagcggcagcggggaggtgtctggcaactggggcctgctggaccaggtggccgccctgacctgggtgcagacccacatccggggctttggaggagaccccaggagagtgtccctggccgctgaccggggcggcgcagatgtggccagcatccacctgctgacagcccgggccaccaacagccagctgttcagaagagctgtgctgatgggcggcagcgccctgagccctgctgctgtgatcagccatgagcgggcccagcagcaggccatcgccctggccaaggaggtgtcctgccccatgagcagcagccaggaggtggtgtcctgcctgcggcagaagccagccaacgtgctgaatgatgcccagaccaagctgctggccgtgtctggccccttccactactggggccctgtgattgatggccacttcctgcgggagcccccagcccgggccctgaagaggagcctgtgggtggaggtggacctgctgattggcagcagccaggatgatggcctcatcaacagagccaaggctgtgaagcagtttgaggagagccggggccgcaccagcagcaagacagccttctaccaggccctgcagaacagcctgggcggagaagattctgatgcccgggtggaggccgccgccacctggtactacagcctggagcacagcacagatgattatgccagcttcagccgggccctggagaatgccacccgggactacttcatcatctgccccatcatcgacatggccagcgcctgggccaagagggcccggggaaatgtgttcatgtaccacgcccctgagaactacggccacggcagcctggagctgctggctgatgtgcagtttgccctgggcctgcccttctacccagcctatgagggccagttcagcctggaggagaagagcctgagcctgaagatcatgcagtacttcagccacttcatccgcagcggcaaccccaactacccctatgagttcagcaggaaggtgcccacctttgccaccccctggccagactttgtgcccagggctggaggagagaactacaaggagttcagcgagctgctgcccaaccggcagggcctgaagaaggctgactgcagcttctggagcaagtacatcagcagcctgaagaccagcgcagatggagccaagggcggccagagcgctgagagcgaggaggaggagctgacagctggcagcggcctgcgggaggacctgctgagcctgcaggagcccggcagcaagacctacagcaagtag

SEQ ID NO: 173257 - DNA, 2664 bp, synthetic construct
  misc_feature 1..2664: note = Description of Artificial Sequence: Synthetic coding sequence
  source 1..2664: mol_type = other DNA
atggccctggtgctggagatcttcaccctgctggccagcatctgctgggtgtctgccaacatctttgagtaccaggtggatgcccagcccctgcggccctgtgagctgcagcgggagacagccttcctgaagcaggccgactatgtgccccagtgtgccgaggatggcagcttccagacagtgcagtgccagaatgatggccgcagctgctggtgtgtgggcgccaacggcagcgaggtgctgggcagccggcagcccggccggcctgtggcctgcctgtccttctgccagctgcagaagcagcagatcctgctgagcggctacatcaacagcacagacaccagctacctgccccagtgccaggacagcggggactatgcccctgtgcagtgtgatgtgcagcaggtgcagtgctggtgtgtggatgctgagggcatggaggtgtatggcacccggcagctgggccggcccaagcgctgccccaggagctgtgagatccggaacagaaggctgctgcatggagtgggggacaagagccccccccagtgcagcgctgagggggagttcatgcctgtgcagtgcaagtttgtgaacaccacagacatgatgatctttgacctggtgcacagctacaaccgcttcccagatgcctttgtgaccttcagcagcttccagaggcgcttccctgaggtgtctggctactgccactgtgccgacagccagggccgggagctggccgagaccggcctggagctgctgctggatgagatctatgacaccatctttgctggcctggacctgcccagcaccttcacagagaccaccctgtaccgcatcctgcagaggcgcttcctggccgtgcagagcgtcatcagcggccgcttccgctgccccaccaagtgtgaggtggagcgcttcaccgccaccagctttggccacccctacgtgcccagctgcagaagaaatggagactaccaggccgtgcagtgccagacagagggcccctgctggtgtgtggatgcccagggcaaggagatgcacggcacccggcagcagggcgagccccccagctgtgccgagggccagagctgtgccagcgagcggcagcaggccctgagccggctgtacttcggcaccagcggctacttcagccagcacgacctcttcagcagccctgagaagcgctgggccagcccccgggtggccaggtttgccaccagctgcccccccaccatcaaggagctgtttgtggacagcggcctgctgcggcccatggtggagggccagagccagcagttctctgtgtctgagaacctgctgaaggaggccatccgggccatcttccccagccggggcctggcccggctggccctgcagttcaccaccaaccccaagaggctgcagcagaacctgtttggaggcaagttcctggtgaatgtgggccagttcaacctgagcggggccctgggcacccggggcaccttcaacttcagccagttcttccagcagctgggcctggccagcttcctgaatggaggccggcaggaggacctggccaagcccctgtctgtgggcctggacagcaacagcagcacaggcaccccagaggccgccaagaaggatggcaccatgaacaagcccaccgtgggcagctttggatttgagatcaacctgcaggagaaccagaatgccctgaagttcctggccagcctgctggagctgcctgagttcctgctcttcctgcagcacgccatctctgtgcctgaagatgtggcccgggacctgggagatgtgatggagaccgtgctgagcagccagacctgtgagcagaccccagagcggctgtttgtgcccagctgcaccacagagggcagctatgaagatgtgcagtgcttctctggagagtgctggtgtgtgaacagctggggcaaggagctgcccggcagccgggtgcggggcggccagccccgctgccccacagactgtgagaagcagagggccaggatgcagagcctgatgggcagccagcctgctggcagcaccctgtttgtgcctgcctgcaccagcgagggccacttcctgcctgtgcagtgcttcaacagcgagtgctactgtgtggatgctgagggccaggccatccctggcaccaggtctgccatcggcaagcccaagaagtgccccaccccctgccagctgcagagcgagcaggccttcctgaggacagtgcaggccctgctgagcaacagctccatgctgcccaccctgagtgacacctatgagggccagttcagcctggaggagaagagcctgagcctgaagatcatgcagtacttcagccacttcatccgcagcggcaaccccaactacccctatgagttcagcaggaaggtgcccacctttgccaccccctggccagactttgtgcccagggctggaggagagaactacaaggagttcagcgagctgctgcccaaccggcagggcctgaagaaggctgactgcagcttctggagcaagtacatcagcagcctgaagaccagcgcagatggagccaagggcggccagagcgctgagagcgaggaggaggagctgacagctggcagcggcctgcgggaggacctgctgagcctgcaggagcccggcagcaagacctacagcaagtag

SEQ ID NO: 173258 - DNA, 3417 bp, synthetic construct
  misc_feature 1..3417: note = Description of Artificial Sequence: Synthetic coding sequence
  source 1..3417: mol_type = other DNA
atgatgcagaagtttgagaaggtgcctgagagcaaggtgatctttgatgccaatgcccctgtggccgtgcgcagcaaggtgcctgacagcgagttccctgtgatgcagtgcctgacagactgcacagaagatgaggcctgcagcttcttcaccgtgtccaccacagagcctgagatcagctgtgacttctacgcctggaccagtgacaacgtggcctgcatgaccagtgaccagaagagagatgccctgggcaacagcaaggccaccagctttggcagcctgcgctgccaggtgaaggtgcgcagccacggccaggacagccctgctgtgtacctgaagaagggggccatcatctgtggcctgctgagcagccccagcgtgctgctgtgcaatgtgaaggactggatggaccccagcgaggcctgggccaatgccacctgccctggggtgacctatgaccaggagagccaccaggtgatcctgcggctgggggaccaggagttcatcaagagcctgacccccctggagggcacccaggacaccttcaccaacttccagcaggtgtacctgtggaaggacagcgacatgggcagcaggcctgagagcatgggctgcaggaaggacacagtgcccaggcctgccagccccacagaagctggcctgaccacagagctgttcagccctgtggacctgaaccaggtgattgtgaatggaaaccagagcctgagcagccagaagcactggctgttcaagcacctgttcagcgcccagcaggccaacctgtggtgcctgagccgctgtgtgcaggagcacagcttctgccagctggccgagatcacagagagcgccagcctgtacttcacctgcaccctgtacccagaggcccaggtgtgtgatgacatcatggagagcaatgcccagggctgccgcctcatcctgccccagatgcccaaggccctcttcaggaagaaggtgatcctggaggacaaggtgaagaacttctacacccggctgcccttccagaagctgatgggcatcagcatccggaacaaggtgcccatgtctgagaagagcatcagcaatggcttctttgaatgtgagcggcgctgtgatgctgacccctgctgcaccggcttcggcttcctgaatgtgtcccagctgaagggcggggaggtgacctgcctgaccctgaacagcctgggcatccagatgtgcagcgaggagaatggaggagcctggaggatcctggactgtggcagcccagacatcgaggtgcacacctaccccttcggctggtaccagaagcccatcgcccagaacaatgcccccagcttctgccccctggtggtgctgcccagcctgacagagaaggtgtccctggacagctggcagagcctggccctgagctctgtggtggtggaccccagcatccgccactttgatgtggcccacgtgtccacagctgccaccagcaacttctctgctgtgcgggacctgtgcctgtctgaatgttcccagcacgaggcctgcctgatcaccaccctgcagacccagcctggagctgtgcgctgcatgttttatgctgacacccagagctgcacccacagcctgcagggccagaactgccgcctgctgctgcgggaggaggccacccacatctacaggaagccaggcatcagcctgctgtcctatgaggcctctgtgcccagcgtgcccatcagcacccacggccgcctgctgggccgcagccaggccatccaggtgggcacctcctggaagcaggtggaccagttcctgggcgtgccctatgctgccccacccctggccgagcggcgcttccaggcccctgagcccctgaactggacaggctcctgggatgccagcaagccccgggccagctgctggcagcccggcaccaggaccagcaccagccctggggtgtctgaggactgcctgtacctgaatgtgttcatcccccagaatgtggccccaaatgcctctgtgctggtgttcttccacaacaccatggaccgggaggagagcgagggctggccagccattgatggcagcttcctggccgctgtgggcaacctgattgtggtgacagccagctacagagtgggcgtgtttggcttcctgagcagcggcagcggggaggtgtctggcaactggggcctgctggaccaggtggccgccctgacctgggtgcagacccacatccggggctttggaggagacccccggcgggtgtccctggccgctgacagaggaggagcagatgtggccagcatccacctgctgacagcccgggccaccaacagccagctgttccggcgggctgtgctgatgggcggcagcgccctgagccctgctgctgtgatcagccatgagcgggcccagcagcaggccatcgccctggccaaggaggtgtcctgccccatgagcagcagccaggaggtggtgtcctgcctgcggcagaagccagccaacgtgctgaatgatgcccagaccaagctgctggccgtgtctggccccttccactactggggccctgtgattgatggccacttcctgcgggagcccccagcccgggccctgaagaggagcctgtgggtggaggtggacctgctgattggcagcagccaggatgatggcctcatcaacagagccaaggctgtgaagcagtttgaggagagccggggccgcaccagcagcaagacagccttctaccaggccctgcagaacagcctgggcggggaggacagtgatgcccgggtggaggccgccgccacctggtactacagcctggagcacagcacagatgattatgccagcttcagccgggccctggagaatgccacccgggactacttcatcatctgccccatcatcgacatggccagcgcctgggccaagagggcccggggaaatgtgttcatgtaccacgccccagaaaattatggccacggcagcctggagctgctggctgatgtgcagtttgccctgggcctgcccttctacccagcctatgagggccagttcagcctggaggagaagagcctgagcctgaagatcatgcagtacttcagccacttcatccgcagcggcaaccccaactacccctatgagttcagcaggaaggtgcccacctttgccaccccctggccagactttgtgcccagggctggaggagagaactacaaggagttcagcgagctgctgcccaaccggcagggcctgaagaaggctgactgcagcttctggagcaagtacatcagcagcctgaagaccagcgcagatggagccaagggcggccagagcgctgagagcgaggaggaggagctgacagctggcagcggcctgcgggaggacctgctgagcctgcaggagcccggcagcaagacctacagcaagtag

SEQ ID NO: 173259 - DNA, 4725 bp, synthetic construct
  misc_feature 1..4725: note = Description of Artificial Sequence: Synthetic coding sequence
  source 1..4725: mol_type = other DNA
atccccaggaagcccatcagcaagaggcctgtgcggcccagcctgcccaggagcccccgctgccccctgcccttcaatgccagcgaggtggtgggcggcaccatcctgtgtgagaccatcagcggccccaccggcagcgccatgcagcagtgccagctgctgtgccggcagggctcctggagcgtcttccccccaggccccctcatctgcagcctggagagcggccgctgggagagccagctgccccagccccgggcctgccagaggccccagctgtggcagaccatccagacccagggccacttccagctgcagctgcccccaggcaagatgtgcagcgctgactatgctgacctgctgcagaccttccaggtgttcatcctggatgagctgacagcccggggcttctgccagatccaggtgaagaccttcggcaccctggtgtccatccctgtgtgcaacaacagctctgtgcaggtgggctgcctgacccgggagcggctgggcgtgaatgtgacctggaagagccggctggaggacatccctgtggccagcctgcctgacctgcatgacatcgagcgggccctggtgggcaaggacctgctgggccgcttcacagacctgatccagagcggcagcttccagctgcacctggacagcaagaccttccctgctgagaccatccgcttcctgcagggcgaccacttcggcaccagccccaggacctggtttggctgcagcgagggcttctaccaggtgctgaccagcgaggccagccaggacggcctgggctgtgtgaagtgcccagagggcagctacagccaggatgaggagtgcatcccctgccctgtgggcttctaccaggagcaggccggcagcctggcctgtgtgccctgccctgtgggccgcaccaccatctctgctggggccttcagccagacccactgtgtgacagactgccagagaaatgaagctggcctgcagtgtgaccagaatggccagtaccgggccagccagaaggaccggggcagcggcaaggccttctgtgtggatggagagggccgccgcctgccctggtgggagacagaggcccccctggaggacagccagtgcctgatgatgcagaagtttgagaaggtgcctgagagcaaggtgatctttgatgccaatgcccctgtggccgtgcgcagcaaggtgcctgacagcgagttccctgtgatgcagtgcctgacagactgcacagaagatgaggcctgcagcttcttcaccgtgtccaccacagagcctgagatcagctgtgacttctacgcctggaccagtgacaacgtggcctgcatgaccagtgaccagaagagagatgccctgggcaacagcaaggccaccagctttggcagcctgcgctgccaggtgaaggtgcgcagccacggccaggacagccctgctgtgtacctgaagaagggccagggcagcaccaccaccctgcagaagagatttgagcccaccggcttccagaacatgctgagcggcctgtacaaccccatcgtgttttctgccagcggggccaacctgacagatgcccacctgttctgcctgctggcctgtgaccgggacctgtgctgtgatggctttgtgctgacccaggtgcagggcggggccatcatctgtggcctgctgagcagccccagcgtgctgctgtgcaatgtgaaggactggatggaccccagcgaggcctgggccaatgccacctgccctggggtgacctatgaccaggagagccaccaggtgatcctgcggctgggggaccaggagttcatcaagagcctgacccccctggagggcacccaggacaccttcaccaacttccagcaggtgtacctgtggaaggacagcgacatgggcagcaggcctgagagcatgggctgcaggaaggacacagtgcccaggcctgccagccccacagaagctggcctgaccacagagctgttcagccctgtggacctgaaccaggtgattgtgaatggaaaccagagcctgagcagccagaagcactggctgttcaagcacctgttcagcgcccagcaggccaacctgtggtgcctgagccgctgtgtgcaggagcacagcttctgccagctggccgagatcacagagagcgccagcctgtacttcacctgcaccctgtacccagaggcccaggtgtgtgatgacatcatggagagcaatgcccagggctgccgcctcatcctgccccagatgcccaaggccctcttcaggaagaaggtgatcctggaggacaaggtgaagaacttctacacccggctgcccttccagaagctgatgggcatcagcatccggaacaaggtgcccatgtctgagaagagcatcagcaatggcttctttgaatgtgagcggcgctgtgatgctgacccctgctgcaccggcttcggcttcctgaatgtgtcccagctgaagggcggggaggtgacctgcctgaccctgaacagcctgggcatccagatgtgcagcgaggagaatggaggagcctggaggatcctggactgtggcagcccagacatcgaggtgcacacctaccccttcggctggtaccagaagcccatcgcccagaacaatgcccccagcttctgccccctggtggtgctgcccagcctgacagagaaggtgtccctggacagctggcagagcctggccctgagctctgtggtggtggaccccagcatccgccactttgatgtggcccacgtgtccacagctgccaccagcaacttctctgctgtgcgggacctgtgcctgtctgaatgttcccagcacgaggcctgcctgatcaccaccctgcagacccagcctggagctgtgcgctgcatgttttatgctgacacccagagctgcacccacagcctgcagggccagaactgccgcctgctgctgcgggaggaggccacccacatctacaggaagccaggcatcagcctgctgtcctatgaggcctctgtgcccagcgtgcccatcagcacccacggccgcctgctgggccgcagccaggccatccaggtgggcacctcctggaagcaggtggaccagttcctgggcgtgccctatgctgccccacccctggccgagcggcgcttccaggcccctgagcccctgaactggacaggctcctgggatgccagcaagccccgggccagctgctggcagcccggcaccaggaccagcaccagccctggggtgtctgaggactgcctgtacctgaatgtgttcatcccccagaatgtggccccaaatgcctctgtgctggtgttcttccacaacaccatggaccgggaggagagcgagggctggccagccattgatggcagcttcctggccgctgtgggcaacctgattgtggtgacagccagctacagagtgggcgtgtttggcttcctgagcagcggcagcggggaggtgtctggcaactggggcctgctggaccaggtggccgccctgacctgggtgcagacccacatccggggctttggaggagacccccggcgggtgtccctggccgctgacagaggaggagcagatgtggccagcatccacctgctgacagcccgggccaccaacagccagctgttccggcgggctgtgctgatgggcggcagcgccctgagccctgctgctgtgatcagccatgagcgggcccagcagcaggccatcgccctggccaaggaggtgtcctgccccatgagcagcagccaggaggtggtgtcctgcctgcggcagaagccagccaacgtgctgaatgatgcccagaccaagctgctggccgtgtctggccccttccactactggggccctgtgattgatggccacttcctgcgggagcccccagcccgggccctgaagaggagcctgtgggtggaggtggacctgctgattggcagcagccaggatgatggcctcatcaacagagccaaggctgtgaagcagtttgaggagagccggggccgcaccagcagcaagacagccttctaccaggccctgcagaacagcctgggcggggaggacagtgatgcccgggtggaggccgccgccacctggtactacagcctggagcacagcacagatgattatgccagcttcagccgggccctggagaatgccacccgggactacttcatcatctgccccatcatcgacatggccagcgcctgggccaagagggcccggggaaatgtgttcatgtaccacgccccagaaaattatggccacggcagcctggagctgctggctgatgtgcagtttgccctgggcctgcccttctacccagcctatgagggccagttcagcctggaggagaagagcctgagcctgaagatcatgcagtacttcagccacttcatccgcagcggcaaccccaactacccctatgagttcagcaggaaggtgcccacctttgccaccccctggccagactttgtgcccagggctggaggagagaactacaaggagttcagcgagctgctgcccaaccggcagggcctgaagaaggctgactgcagcttctggagcaagtacatcagcagcctgaagaccagcgcagatggagccaagggcggccagagcgctgagagcgaggaggaggagctgacagctggcagcggcctgcgggaggacctgctgagcctgcaggagcccggcagcaagacctacagcaagtag

SEQ ID NO: 173260 - DNA, 1356 bp, synthetic construct
  misc_feature 1..1356: note = Description of Artificial Sequence: Synthetic coding sequence
  source 1..1356: mol_type = other DNA
atggagcagaagcccagcaaggtggagtgtggcagtgaccctgaggagaacagcgcccggagcccagatggcaagaggaagaggaagaatggccagtgcagcctgaagacctccatgagcggctacatccccagctacctggacaaggatgagcagtgtgtggtgtgtggggacaaggccaccggctaccactaccgctgcatcacctgtgagggctgcaagggcttcttccggaggaccatccagaagaacctgcaccccacctacagctgcaagtatgacagctgctgcgtgattgacaagatcaccaggaaccagtgccagctgtgccgcttcaagaagtgcatcgctgtgggcatggccatggacctggtgctggatgacagcaagagggtggccaagaggaagctgattgagcagaaccgggagaggaggaggaaggaggagatgatccgcagcctgcagcagaggcctgagcccaccccagaggagtgggacctgatccacatcgccacagaggcccacaggagcaccaatgcccagggcagccactggaagcagaggaggaagttcctgcctgatgacatcggccagagccccatcgtgtccatgccagatggagacaaggtggacctggaggccttcagcgagttcaccaagatcatcaccccagccatcaccagggtggtggactttgccaagaagctgcccatgttcagcgagctgccctgtgaggaccagatcatcctgctgaagggctgctgcatggagatcatgagcctgcgggctgctgtgcgctatgaccctgagagtgacaccctgaccctgtctggagagatggctgtgaagcgggagcagctgaagaatggaggcctgggcgtggtgtctgatgccatctttgagctgggcaagagcctgagcgccttcaacctggatgacacagaggtggccctgctgcaggccgtgctgctgatgagcacagacaggagcggcctgctgtgtgtggacaagattgagaagagccaggaggcctacctgctggcctttgagcactacgtgaaccacaggaagcacaacatcccccacttctggcccaagctgctgatgaagggcccccaggtgcggcagctggagcagcagctgggggaggccggcagcctgcagggccctgtgctgcagcaccagagccccaagagcccccagcagaggctgctggagctgctgcacaggagcggcatcctgcacgcccgggctgtgtgtggggaggatgacagcagcgaggccgacagccccagcagcagcgaggaggagcctgaggtgtgtgaggacctggccggaaatgctgccagcccctag

SEQ ID NO: 173261 - DNA, 5940 bp, synthetic construct
  misc_feature 1..5940: note = Description of Artificial Sequence: Synthetic coding sequence
  source 1..5940: mol_type = other DNA
atgagctcctggctgggcggcctgggcagcggcctgggccagagcctgggccaggtgggcggcagcctggccagcctgaccggccagatcagcaacttcaccaaggacatgctgatggagggcacagaggaggtggaggccgagctgcctgacagcaggaccaaggagattgaggccatccacgccatcctgcggagtgaaaatgaaaggctgaagaagctgtgcacagacctggaggagaagcatgaggccagcgagatccagatcaagcagcagagcaccagctacagaaaccagctgcagcagaaggaggtggagatcagccacctgaaggcccggcagatcgccctgcaggaccagctgctgaagctgcagagcgctgcccagagcgtgcccagcggggccggcgtgcctgccaccacagccagcagcagctttgcctacggcatcagccaccaccccagcgccttccatgatgatgacatggactttggagacatcatcagcagccagcaggagatcaaccggctgagcaatgaggtgtcccggctggagagcgaggtgggccactggaggcacatcgcccagaccagcaaggcccagggcacagacaacagcgaccagagcgagatctgcaagctgcagaacatcatcaaggagctgaagcagaacagaagccaggagattgatgaccaccagcacgagatgtctgtgctgcagaatgcccaccagcagaagctgacagagatcagccgccgccaccgggaggagctgagtgactatgaggagagaattgaggagctggagaacctgctgcagcagggcggcagcggggtcatcgagacagacctgagcaagatctatgagatgcagaagaccatccaggtgctgcagatcgagaaggtggagagcaccaagaagatggagcagctggaggacaagatcaaggacatcaacaagaagctgagcagcgcagaaaatgaccgggacatcctgcggcgggagcaggagcagctgaatgtggagaagaggcagatcatggaggagtgtgagaacctgaagctggagtgcagcaagctgcagcccagcgctgtgaagcagagcgacaccatgacagagaaggagcgcatcctggcccagagcgcctctgtggaggaggtgttccggctgcagcaggccctgagtgatgctgaaaatgagatcatgaggctgagcagcctgaaccaggacaacagcctggccgaggacaacctgaagctgaagatgagaattgaggtgctggagaaggagaagagcctgctgagccaggagaaggaggagctgcagatgagcctgctgaagctgaacaatgaatatgaggtgatcaagagcacagccacccgggacatcagcctggacagcgagctgcatgacctgcggctgaacctggaggccaaggagcaggagctgaaccagagcatcagcgagaaggagaccctgattgctgagattgaggagctggaccggcagaaccaggaggccaccaagcacatgatcctgatcaaggaccagctgagcaagcagcagaatgaaggagacagcatcatcagcaagctgaagcaggacctgaatgatgagaagaagagggtgcaccagctggaggatgacaagatggacatcaccaaggagctggatgtgcagaaggagaagctgatccagagcgaggtggccctgaatgacctgcacctgaccaagcagaagctggaggacaaggtggagaacctggtggaccagctgaacaagagccaggagagcaatgtgtccatccagaaggagaacctggagctgaaggagcacatccggcagaatgaggaggagctgagccgcatcagaaatgagctgatgcagagcctgaaccaggacagcaacagcaacttcaaggacaccctgctgaaggagcgggaggccgaggtgaggaacctgaagcagaacctgtctgagctggagcagctgaatgaaaacctgaagaaggtggcctttgatgtgaagatggagaatgagaagctggtgctggcctgtgaagatgtgcgccaccagctggaggagtgcctggccggcaacaaccagctgagcctggagaagaacaccatcgtggagaccctgaagatggagaagggggagattgaagctgagctgtgctgggccaagaagaggctgctggaggaggccaacaagtatgagaagaccatcgaggagctgagcaatgccaggaacctgaacaccagcgccctgcagctggagcacgagcacctgatcaagctgaaccagaagaaggacatggagattgctgagctgaagaagaacatcgagcagatggacacagaccacaaggagaccaaggatgtgctgagcagcagcctggaggagcagaagcagctgacccagctgatcaacaagaaggagatcttcatcgagaagctgaaggagaggagcagcaagctgcaggaggagctggacaagtacagccaggccctgaggaagaatgagatcctgcggcagaccatcgaggagaaggacaggagcctgggctccatgaaggaggagaacaaccacctgcaggaggagctggagcggctgcgggaggagcagagcaggacagcccctgtggccgaccccaagaccctggacagcgtgacagagctggccagcgaggtgtcccagctgaacaccatcaaggagcacctggaggaggagatcaagcaccaccagaagatcatcgaggaccagaaccagagcaagatgcagctgctgcagagcctgcaggagcagaagaaggagatggatgagttccgctaccagcacgagcagatgaatgccacccacacccagctgttcctggagaaggatgaggagatcaagagcctgcagaagaccatcgagcagatcaagacccagctgcacgaggagcggcaggacatccagacagacaacagcgacatcttccaggagaccaaggtgcagagcctgaacattgaaaatggcagcgagaagcatgacctgagcaaggccgagacagagcggctggtgaagggcatcaaggagcgggagctggagatcaagctgctgaatgagaagaacatcagcctgaccaagcagattgaccagctgagcaaggatgaggtgggcaagctgacccagatcatccagcagaaggacctggagatccaggccctgcacgcccgcatcagcagcaccagccacacccaggatgtggtgtacctgcagcagcagctgcaggcctatgccatggagcgggagaaggtgtttgctgtgctgaatgagaagacccgggagaacagccacctgaagacagagtaccacaagatgatggacatcgtggccgccaaggaggccgccctgatcaagctgcaggatgagaacaagaagctgagcaccaggtttgagagcagcggccaggacatgttccgggagaccatccagaacctgagccgcatcatccgggagaaggacattgaaattgatgccctgagccagaagtgccagaccctgctggccgtgctgcagaccagcagcactggaaatgaggccggcggcgtgaacagcaaccagtttgaggagctgctgcaggagcgggacaagctgaagcagcaggtgaagaagatggaggagtggaagcagcaggtgatgaccaccgtgcagaacatgcagcatgaaagtgcccagctgcaggaggagctgcaccagctgcaggcccaggtgctggtggacagcgacaacaacagcaagctgcaggtggactacacaggcctcatccagagctatgagcagaatgagaccaagctgaagaactttggccaggagctggcccaggtgcagcacagcatcggccagctgtgcaacaccaaggacctgctgctgggcaagctggacatcatcagcccccagctgagcagcgccagcctgctgaccccccagagcgctgagtgcctgcgggccagcaagtctgaggtgctgtctgagagcagcgagctgctgcagcaggagctggaggagctgaggaagagcctgcaggagaaggatgccaccatccgcaccctgcaggagaacaaccaccggctgagtgacagcattgctgccaccagcgagctggagaggaaggagcacgagcagacagattctgagatcaagcagctgaaggagaagcaggatgtgctgcagaagctgctgaaggagaaggacctgctgatcaaggccaagagtgaccagctgctgagcagcaatgaaaacttcaccaacaaggtgaatgaaaatgagctgctgcggcaggccgtgaccaacctgaaggagcgcatcctgatcctggagatggacatcggcaagctgaagggggagaatgagaagatcgtggagacctaccggggcaaggagacagagtaccaggccctgcaggagaccaacatgaagttctccatgatgctgcgggagaaggagtttgagtgccacagcatgaaggagaaggccctggcctttgagcagctgctgaaggagaaggagcagggcaagacaggagagctgaaccagctgctgaatgctgtgaagtccatgcaggagaagacagtggtgttccagcaggagcgggaccaggtgatgctggccctgaagcagaagcagatggagaacacagccctgcagaatgaggtgcagaggctgcgggacaaggagttccgcagcaaccaggagctggagcggctgaggaaccacctgctggagagcgaggacagctacacccgggaggccctggccgcagaagatcgggaggccaagctgaggaagaaggtgacagtgctggaggagaagctggtgagcagcagcaatgccatggagaatgccagccaccaggcctctgtgcaggtggagagcctgcaggagcagctgaatgtggtgtccaagcagagagatgaaacagccctgcagctgtctgtgtcccaggagcaggtgaagcagtatgccctgagcctggccaacctgcagatggtgctggagcacttccagcaggaggagaaggccatgtacagcgctgagctggagaagcagaagcagctgattgctgagtggaagaagaatgctgagaacctggagggcaaggtgatcagcctgcaggagtgcctggatgaggccaatgctgccctggacagcgccagccggctgacagagcagctggatgtgaaggaggagcagatcgaggagctgaagaggcagaatgagctgcggcaggagatgctggatgatgtgcagaagaagctgatgagcctggccaacagcagcgagggcaaggtggacaaggtgctgatgaggaacctcttcatcggccacttccacacccccaagaaccagagacatgaggtgctgcggctgatgggcagcatcctgggcgtgagaagagaggagatggagcagctgttccatgatgaccagggcggcgtgacccgctggatgacaggctggctgggcggcggcagcaagtctgtgcccaacacccccctgcggcccaaccagcagagcgtggtgaacagcagcttcagcgagctgtttgtgaagttcctggagacagagagccaccccagcatccccccacccaagctgtctgtgcatgacatgaagcccctggacagccctggccgcaggaagagggacaccaatgcccctgagagcttcaaggacacagctgagagccgctctggaagaagaacagatgtgaaccccttcctggcccccaggtctgctgctgtgcccctcatcaacccagctggcctgggccctgggggccctggccacctgctgctgaagcccatcagtgatgtgctgcccaccttcacccccctgcctgccctgcctgacaacagcgctggggtggtgctgaaggacctgctgaagcagtag

SEQ ID NO: 173262 - DNA, 5148 bp, synthetic construct
  misc_feature 1..5148: note = Description of Artificial Sequence: Synthetic coding sequence
  source 1..5148: mol_type = other DNA
atgtctgtgctgcagaatgcccaccagcagaagctgacagagatcagcagaagacaccgggaggagctgagtgactatgaggagcgcatcgaggagctggagaacctgctgcagcagggcggcagcggcgtgattgaaacagacctgagcaagatctatgagatgcagaagaccatccaggtgctgcagatcgagaaggtggagagcaccaagaagatggagcagctggaggacaagatcaaggacatcaacaagaagctgagcagcgcagaaaatgaccgggacatcctgcggcgggagcaggagcagctgaatgtggagaagaggcagatcatggaggagtgtgagaacctgaagctggagtgcagcaagctgcagcccagcgctgtgaagcagagcgacaccatgacagagaaggagcgcatcctggcccagagcgcctctgtggaggaggtgttccggctgcagcaggccctgagtgatgctgaaaatgagatcatgaggctgagcagcctgaaccaggaggagctgcagatgagcctgctgaagctgaacaatgaatatgaggtgatcaagagcacagccacccgggacatcagcctggacagcgagctgcatgacctgcggctgaacctggaggccaaggagcaggagctgaaccagagcatcagcgagaaggagaccctgattgctgagattgaggagctggaccggcagaaccaggaggccaccaagcacatgatcctgatcaaggaccagctgagcaagcagcagaatgaaggagacagcatcatcagcaagctgaagcaggacctgaatgatgagaagaagagggtgcaccagctggaggatgacaagatggacatcaccaaggagctggatgtgcagaaggagaagctgatccagagcgaggtggccctgaatgacctgcacctgaccaagcagaagctggaggacaaggtggagaacctggtggaccagctgaacaagagccaggagagcaatgtgtccatccagaaggagaacctggagctgaaggagcacatccggcagaatgaggaggagctgagccgcatcagaaatgagctgatgcagagcctgaaccaggacagcaacagcaacttcaaggacaccctgctgaaggagcgggaggccgaggtgaggaacctgaagcagaacctgtctgagctggagcagctgaatgaaaacctgaagaaggtggcctttgatgtgaagatggagaatgagaagctggtgctggcctgtgaagatgtgcgccaccagctggaggagtgcctggccggcaacaaccagctgagcctggagaagaacaccatcgtggagaccctgaagatggagaagggggagattgaagctgagctgtgctgggccaagaagaggctgctggaggaggccaacaagtatgagaagaccatcgaggagctgagcaatgccaggaacctgaacaccagcgccctgcagctggagcacgagcacctgatcaagctgaaccagaagaaggacatggagattgctgagctgaagaagaacatcgagcagatggacacagaccacaaggagaccaaggatgtgctgagcagcagcctggaggagcagaagcagctgacccagctgatcaacaagaaggagatcttcatcgagaagctgaaggagaggagcagcaagctgcaggaggagctggacaagtacagccaggccctgaggaagaatgagatcctgcggcagaccatcgaggagaaggacaggagcctgggctccatgaaggaggagaacaaccacctgcaggaggagctggagcggctgcgggaggagcagagcaggacagcccctgtggccgaccccaagaccctggacagcgtgacagagctggccagcgaggtgtcccagctgaacaccatcaaggagcacctggaggaggagatcaagcaccaccagaagatcatcgaggaccagaaccagagcaagatgcagctgctgcagagcctgcaggagcagaagaaggagatggatgagttccgctaccagcacgagcagatgaatgccacccacacccagctgttcctggagaaggatgaggagatcaagagcctgcagaagaccatcgagcagatcaagacccagctgcacgaggagcggcaggacatccagacagacaacagcgacatcttccaggagaccaaggtgcagagcctgaacattgaaaatggcagcgagaagcatgacctgagcaaggccgagacagagcggctggtgaagggcatcaaggagcgggagctggagatcaagctgctgaatgagaagaacatcagcctgaccaagcagattgaccagctgagcaaggatgaggtgggcaagctgacccagatcatccagcagaaggacctggagatccaggccctgcacgcccgcatcagcagcaccagccacacccaggatgtggtgtacctgcagcagcagctgcaggcctatgccatggagcgggagaaggtgtttgctgtgctgaatgagaagacccgggagaacagccacctgaagacagagtaccacaagatgatggacatcgtggccgccaaggaggccgccctgatcaagctgcaggatgagaacaagaagctgagcaccaggtttgagagcagcggccaggacatgttccgggagaccatccagaacctgagccgcatcatccgggagaaggacattgaaattgatgccctgagccagaagtgccagaccctgctggccgtgctgcagaccagcagcactggaaatgaggccggcggcgtgaacagcaaccagtttgaggagctgctgcaggagcgggacaagctgaagcagcaggtgaagaagatggaggagtggaagcagcaggtgatgaccaccgtgcagaacatgcagcatgaaagtgcccagctgcaggaggagctgcaccagctgcaggcccaggtgctggtggacagcgacaacaacagcaagctgcaggtggactacacaggcctcatccagagctatgagcagaatgagaccaagctgaagaactttggccaggagctggcccaggtgcagcacagcatcggccagctgtgcaacaccaaggacctgctgctgggcaagctggacatcatcagcccccagctgagcagcgccagcctgctgaccccccagagcgctgagtgcctgcgggccagcaagtctgaggtgctgtctgagagcagcgagctgctgcagcaggagctggaggagctgaggaagagcctgcaggagaaggatgccaccatccgcaccctgcaggagaacaaccaccggctgagtgacagcattgctgccaccagcgagctggagaggaaggagcacgagcagacagattctgagatcaagcagctgaaggagaagcaggatgtgctgcagaagctgctgaaggagaaggacctgctgatcaaggccaagagtgaccagctgctgagcagcaatgaaaacttcaccaacaaggtgaatgaaaatgagctgctgcggcaggccgtgaccaacctgaaggagcgcatcctgatcctggagatggacatcggcaagctgaagggggagaatgagaagatcgtggagacctaccggggcaaggagacagagtaccaggccctgcaggagaccaacatgaagttctccatgatgctgcgggagaaggagtttgagtgccacagcatgaaggagaaggccctggcctttgagcagctgctgaaggagaaggagcagggcaagacaggagagctgaaccagctgctgaatgctgtgaagtccatgcaggagaagacagtggtgttccagcaggagcgggaccaggtgatgctggccctgaagcagaagcagatggagaacacagccctgcagaatgaggtgcagaggctgcgggacaaggagttccgcagcaaccaggagctggagcggctgaggaaccacctgctggagagcgaggacagctacacccgggaggccctggccgcagaagatcgggaggccaagctgaggaagaaggtgacagtgctggaggagaagctggtgagcagcagcaatgccatggagaatgccagccaccaggcctctgtgcaggtggagagcctgcaggagcagctgaatgtggtgtccaagcagagagatgaaacagccctgcagctgtctgtgtcccaggagcaggtgaagcagtatgccctgagcctggccaacctgcagatggtgctggagcacttccagcaggaggagaaggccatgtacagcgctgagctggagaagcagaagcagctgattgctgagtggaagaagaatgctgagaacctggagggcaaggtgatcagcctgcaggagtgcctggatgaggccaatgctgccctggacagcgccagccggctgacagagcagctggatgtgaaggaggagcagatcgaggagctgaagaggcagaatgagctgcggcaggagatgctggatgatgtgcagaagaagctgatgagcctggccaacagcagcgagggcaaggtggacaaggtgctgatgaggaacctcttcatcggccacttccacacccccaagaaccagagacatgaggtgctgcggctgatgggcagcatcctgggcgtgagaagagaggagatggagcagctgttccatgatgaccagggcggcgtgacccgctggatgacaggctggctgggcggcggcagcaagtctgtgcccaacacccccctgcggcccaaccagcagagcgtggtgaacagcagcttcagcgagctgtttgtgaagttcctggagacagagagccaccccagcatccccccacccaagctgtctgtgcatgacatgaagcccctggacagccctggccgcaggaagagggacaccaatgcccctgagagcttcaaggacacagctgagagccgctctggaagaagaacagatgtgaaccccttcctggcccccaggtctgctgctgtgcccctcatcaacccagctggcctgggccctgggggccctggccacctgctgctgaagcccatcagtgatgtgctgcccaccttcacccccctgcctgccctgcctgacaacagcgctggggtggtgctgaaggacctgctgaagcagtag

SEQ ID NO: 173263 - DNA, 5979 bp, synthetic construct
  misc_feature 1..5979: note = Description of Artificial Sequence: Synthetic coding sequence
  source 1..5979: mol_type = other DNA
atgagcaaccggcccaacaacaaccctgggggcagcctgcggcgcagccagaggaacacagctggggcccagccccaggatgacagcatcggcggccgcagctgcagcagcagcagcgctgtgattgtgccccagccagaagatcctgaccgggccaacaccagcgagcggcagaagacaggccaggtgcccaagaaggacaacagcagaggagtgaagaggtctgccagcccagactacaacagaaccaacagccccagcagcgccaagaagcccaaggccctgcagcacacagagagccccagcgagaccaacaagccccacagcaagagcaagaagaggcacctggaccaggagcagcagctgaagagcgcccagagccccagcaccagcaaggcccacaccaggaagagcggggccactggaggcagccgcagccagaagaggaagaggacagagagcagctgtgtgaagagcggcagcggcagcgagagcactggagctgaggagaggtctgccaagcccaccaagctggccagcaagagcgccaccagcgccaaggccggctgcagcaccatcacagacagcagcagcgctgccagcaccagcagcagcagcagcgctgtggccagcgccagcagcacagtgcccccaggggcccgggtgaagcagggcaaggaccagaacaaggcccggcgcagccgcagcgccagcagccccagccccaggaggagcagccgggagaaggagcagagcaagacaggaggcagcagcaagtttgactgggccgcccgcttcagccccaaggtgtccctgcccaagaccaagctgagcctgcccggcagcagcaagtctgagaccagcaagccaggccccagcggcctgcaggccaagctggccagcctgaggaagagcaccaagaagaggtctgagagccccccagctgagctgcccagcctgcggcgcagcacccggcagaagaccaccggcagctgtgccagcaccagcagaagaggcagcggcctgggcaagagaggagctgctgaggcccggcggcaggagaagatggctgaccctgagagcaaccaggaggccgtgaacagcagcgctgccaggacagatgaggccccccagggcgctgctggagctgtgggcatgaccaccagcggggagagcgagagtgatgattctgagatgggccgcctgcaggccctgctggaggcccggggcctgcccccccacctgtttggccccctgggccccaggatgagccagctgttccacaggaccatcggcagcggggccagcagcaaggcccagcagctgctgcagggcctgcaggccagtgatgagagccagcagctgcaggccgtgattgagatgtgccagctgctggtgatgggaaatgaggagaccctgggcggcttccctgtgaagtctgtggtgcctgccctgatcaccctgctgcagatggagcacaactttgacatcatgaaccacgcctgccgggccctgacctacatgatggaggccctgcccaggagcagcgctgtggtggtggatgccatccctgtgttcctggagaagctgcaggtgatccagtgcattgatgtggccgagcaggccctgacagccctggagatgctgagcagaagacacagcaaggccatcctgcaggccggcggcctggccgactgcctgctgtacctggagttcttcagcatcaatgcccagagaaatgccctggccatcgccgccaactgctgccagagcatcaccccagatgagttccactttgtggccgacagcctgcccctgctgacccagaggctgacccaccaggacaagaagtctgtggagagcacctgcctgtgctttgcccggctggtggacaacttccagcacgaggagaacctgctgcagcaggtggccagcaaggacctgctgaccaacgtgcagcagctgctggtggtgaccccacccatcctgagcagcggcatgttcatcatggtggtgaggatgttcagcctgatgtgcagcaactgccccaccctggccgtgcagctgatgaagcagaacattgctgagaccctgcacttcctgctgtgtggggccagcaatggcagctgccaggagcagattgacctggtgcccaggagcccccaggagctgtatgagctgaccagcctcatctgtgagctgatgccctgcctgcccaaggagggcatctttgctgtggacaccatgctgaagaagggaaatgcccagaacacagatggagccatctggcagtggagagatgaccggggcctgtggcacccctacaacagaattgacagccgcatcatcgagcagatcaatgaagacaccggcacagcccgggccatccagaggaagcccaaccccctggccaacagcaacaccagcggctacagcgagagcaagaaggatgatgcccgggcccagctgatgaaggaggaccctgagctggccaagagcttcatcaagaccctgtttggagtgctgtatgaggtgtacagcagcagcgctggccctgctgtgcgccacaagtgcctgcgggccatcctgcgcatcatctactttgctgatgctgagctgctgaaggatgtgctgaagaaccacgctgtgagcagccacatcgcctccatgctgagcagccaggacctgaagatcgtggtgggcgccctgcagatggccgagatcctgatgcagaagctgcctgacatcttctctgtgtacttccggcgggagggcgtgatgcaccaggtgaagcacctggccgagagcgagagcctgctgaccagcccccccaaggcctgcaccaatggaagtggctccatgggcagcaccacctctgtgagcagcggcacagccacagctgccacccatgctgctgctgacctgggcagccccagcctgcagcacagcagagatgacagcctggacctgagcccccagggccgcctgagtgatgtgctgaagaggaagaggctgcccaagaggggcccccggcggcccaagtacagccccccaagagatgatgacaaggtggacaaccaggccaagagccccaccaccacccagagccccaagagcagcttcctggccagcctgaaccccaagacctggggccgcctgagcacccagagcaacagcaacaacatcgagcccgccaggacagctgggggcagcggcctggcccgggccgccagcaaggacaccatcagcaacaaccgggagaagatcaagggctggatcaaggagcaggcccacaagtttgtggagcgctacttcagcagcgagaacatggatggcagcaacccagccctgaatgtgctgcagaggctgtgtgccgccacagagcagctgaacctgcaggtggatggaggagcagaatgtctggtggagatccgcagcatcgtgtctgagagtgatgtgtcctcctttgagatccagcacagcggctttgtgaagcagctgctgctgtacctgaccagcaagtctgagaaggatgctgtgtcccgggagatccggctgaagcgcttcctgcacgtgttcttcagcagccccctgcctggagaggagcccatcggccgggtggagcctgtgggcaatgcccccctgctggccctggtgcacaagatgaacaactgcctgagccagatggagcagtttcctgtgaaggtgcatgacttccccagcggaaatggaactggaggcagcttcagcctgaacagaggcagccaggccctgaagttcttcaacacccaccagctgaagtgccagctgcagaggcacccagactgtgccaacgtgaagcagtggaagggcggccctgtgaagattgaccccctggccctggtgcaggccatcgagcgctacctggtggtgcggggctacggccgggtgcgggaggatgatgaagattctgatgatgatggcagtgatgaggagattgatgagagcctggccgcccagttcctgaacagcggaaatgtgcgccaccggctgcagttctacatcggggagcacctgctgccctacaacatgacagtgtaccaggccgtgcggcagttcagcatccaggctgaagatgagcgggagagcacagatgatgagagcaaccccctgggccgggccggcatctggaccaagacccacaccatctggtacaagcctgtgagagaagatgaggagagcaacaaggactgtgtgggcggcaagaggggccgggcccagacagcccccaccaagaccagccccagaaatgccaagaagcatgatgagctgtggcatgatggagtgtgccccagcgtgagcaaccccctggaggtgtacctgatccccaccccacctgagaacatcacctttgaggaccccagcctggatgtgatcctgctgctgcgggtgctgcacgccatcagccgctactggtactacctgtatgacaatgccatgtgcaaggagatcatccccaccagcgagttcatcaacagcaagctgacagccaaggccaaccggcagctgcaggaccccctggtgatcatgacaggcaacatccccacctggctgacagagctgggcaagacctgccccttcttcttcccctttgacacccggcagatgctgttctacgtgacagcctttgaccgggaccgggccatgcagaggctgctggacaccaaccctgagatcaaccagagcgacagccaggacagccgggtggccccccggctggacaggaagaagaggacagtgaaccgggaggagctgctgaagcaggccgagagcgtgatgcaggacctgggcagcagccgggccatgctggagatccagtatgaaaatgaggtgggcaccggcctgggccccaccctggagttctacgccctggtgtcccaggagctgcagagagctgacctgggcctgtggagaggagaggaggtgaccctgagcaaccccaagggcagccaggagggcaccaagtacatccagaacctgcagggcctgtttgccctgccctttggaagaacagccaagccagcccacatcgccaaggtgaagatgaagttccgcttcctgggcaagctgatggccaaggccatcatggacttccggctggtggacctgcccctgggcctgcccttctacaagtggatgctgcggcaggagaccagcctgaccagccatgacctgtttgatattgatcctgtggtggcccggtctgtgtaccacctggaggacatcgtgcggcagaagaagaggctggagcaggacaagagccagaccaaggagagcctgcagtatgccctggagaccctgaccatgaatggctgcagcgtggaggacctgggcctggacttcaccctgcccggcttccccaacatcgagctgaagaagggcggcaaggacatccctgtgaccatccacaacctggaggagtacctgcggctggtgatcttctgggccctgaatgaaggagtgtcccggcagtttgacagcttcagagatggctttgaatctgtgttccccctgagccacctgcagtacttctacccagaggagctggaccagctgctgtgtggcagcaaggctgacacctgggatgccaagaccctgatggagtgctgcaggccagaccacggctacacccatgacagcagagctgtgaagttcctgtttgagatcctgagcagctttgacaatgagcagcagaggctcttcctgcagtttgtgacaggcagcccccggctgcctgtgggcggcttccgcagcctgaacccccccctgaccatcgtgaggaagacctttgagagcacagaaaatccagatgacttcctgcccagcgtgatgacctgtgtgaactacctgaagctgcctgactacagcagcattgagatcatgagggagaagctgctgattgctgcccgggagggccagcagagcttccacctgtcctag

SEQ ID NO: 173264 - DNA, 300 bp, synthetic construct
  misc_feature 1..300: note = Description of Artificial Sequence: Synthetic coding sequence
  source 1..300: mol_type = other DNA
atgagcaaccggcccaacaacaaccctgggggcagcctgcggcgcagccagaggaacacagctggggcccagccccaggatgacagcatcggcggccgcagctgcagcagcagcagcgctgtgattgtgccccagccagaagatcctgaccgggccaacaccagcgagcggcagaagacaggccaggtgcccaagaaggacaacagcagaggagtgaagaggtctgccagcccagactacaacagaaccaacagccccagcagcgccaagaagcccaaggccctgcagcacacagaatag

SEQ ID NO: 173265 - DNA, 6123 bp, synthetic construct
  misc_feature 1..6123: note = Description of Artificial Sequence: Synthetic coding sequence
  source 1..6123: mol_type = other DNA
atgagcaaccggcccaacaacaaccctgggggcagcctgcggcgcagccagaggaacacagctggggcccagccccaggatgacagcatcggcggccgcagccacctgggccaggccaagcacaagggctacagccccccagagagcaggaagagcaacagcaaggcccccaaggtgcagagcaacaccaccagcgagctgagccggggccacctgagcaagaggagctgcagcagcagcagcgctgtgattgtgccccagccagaagatcctgaccgggccaacaccagcgagcggcagaagacaggccaggtgcccaagaaggacaacagcagaggagtgaagaggtctgccagcccagactacaacagaaccaacagccccagcagcgccaagaagcccaaggccctgcagcacacagagagccccagcgagaccaacaagccccacagcaagagcaagaagaggcacctggaccaggagcagcagctgaagagcgcccagagccccagcaccagcaaggcccacaccaggaagagcggggccactggaggcagccgcagccagaagaggaagaggacagagagcagctgtgtgaagagcggcagcggcagcgagagcactggagctgaggagaggtctgccaagcccaccaagctggccagcaagagcgccaccagcgccaaggccggctgcagcaccatcacagacagcagcagcgctgccagcaccagcagcagcagcagcgctgtggccagcgccagcagcacagtgcccccaggggcccgggtgaagcagggcaaggaccagaacaaggcccggcgcagccgcagcgccagcagccccagccccaggaggagcagccgggagaaggagcagagcaagacaggaggcagcagcaagtttgactgggccgcccgcttcagccccaaggtgtccctgcccaagaccaagctgagcctgcccggcagcagcaagtctgagaccagcaagccaggccccagcggcctgcaggccaagctggccagcctgaggaagagcaccaagaagaggtctgagagccccccagctgagctgcccagcctgcggcgcagcacccggcagaagaccaccggcagctgtgccagcaccagcagaagaggcagcggcctgggcaagagaggagctgctgaggcccggcggcaggagaagatggctgaccctgagagcaaccaggaggccgtgaacagcagcgctgccaggacagatgaggccccccagggcgctgctgccagcagctctgtggccggggctgtgggcatgaccaccagcggggagagcgagagtgatgattctgagatgggccgcctgcaggccctgctggaggcccggggcctgcccccccacctgtttggccccctgggccccaggatgagccagctgttccacaggaccatcggcagcggggccagcagcaaggcccagcagctgctgcagggcctgcaggccagtgatgagagccagcagctgcaggccgtgattgagatgtgccagctgctggtgatgggaaatgaggagaccctgggcggcttccctgtgaagtctgtggtgcctgccctgatcaccctgctgcagatggagcacaactttgacatcatgaaccacgcctgccgggccctgacctacatgatggaggccctgcccaggagcagcgctgtggtggtggatgccatccctgtgttcctggagaagctgcaggtgatccagtgcattgatgtggccgagcaggccctgacagccctggagatgctgagcagaagacacagcaaggccatcctgcaggccggcggcctggccgactgcctgctgtacctggagttcttcagcatcaatgcccagagaaatgccctggccatcgccgccaactgctgccagagcatcaccccagatgagttccactttgtggccgacagcctgcccctgctgacccagaggctgacccaccaggacaagaagtctgtggagagcacctgcctgtgctttgcccggctggtggacaacttccagcacgaggagaacctgctgcagcaggtggccagcaaggacctgctgaccaacgtgcagcagctgctggtggtgaccccacccatcctgagcagcggcatgttcatcatggtggtgaggatgttcagcctgatgtgcagcaactgccccaccctggccgtgcagctgatgaagcagaacattgctgagaccctgcacttcctgctgtgtggggccagcaatggcagctgccaggagcagattgacctggtgcccaggagcccccaggagctgtatgagctgaccagcctcatctgtgagctgatgccctgcctgcccaaggagggcatctttgctgtggacaccatgctgaagaagggaaatgcccagaacacagatggagccatctggcagtggagagatgaccggggcctgtggcacccctacaacagaattgacagccgcatcatcgagcagatcaatgaagacaccggcacagcccgggccatccagaggaagcccaaccccctggccaacagcaacaccagcggctacagcgagagcaagaaggatgatgcccgggcccagctgatgaaggaggaccctgagctggccaagagcttcatcaagaccctgtttggagtgctgtatgaggtgtacagcagcagcgctggccctgctgtgcgccacaagtgcctgcgggccatcctgcgcatcatctactttgctgatgctgagctgctgaaggatgtgctgaagaaccacgctgtgagcagccacatcgcctccatgctgagcagccaggacctgaagatcgtggtgggcgccctgcagatggccgagatcctgatgcagaagctgcctgacatcttctctgtgtacttccggcgggagggcgtgatgcaccaggtgaagcacctggccgagagcgagagcctgctgaccagcccccccaaggcctgcaccaatggaagtggctccatgggcagcaccacctctgtgagcagcggcacagccacagctgccacccatgctgctgctgacctgggcagccccagcctgcagcacagcagagatgacagcctggacctgagcccccagggccgcctgagtgatgtgctgaagaggaagaggctgcccaagaggggcccccggcggcccaagtacagccccccaagagatgatgacaaggtggacaaccaggccaagagccccaccaccacccagagccccaagagcagcttcctggccagcctgaaccccaagacctggggccgcctgagcacccagagcaacagcaacaacatcgagcccgccaggacagctgggggcagcggcctggcccgggccgccagcaaggacaccatcagcaacaaccgggagaagatcaagggctggatcaaggagcaggcccacaagtttgtggagcgctacttcagcagcgagaacatggatggcagcaacccagccctgaatgtgctgcagaggctgtgtgccgccacagagcagctgaacctgcaggtggatggaggagcagaatgtctggtggagatccgcagcatcgtgtctgagagtgatgtgtcctcctttgagatccagcacagcggctttgtgaagcagctgctgctgtacctgaccagcaagtctgagaaggatgctgtgtcccgggagatccggctgaagcgcttcctgcacgtgttcttcagcagccccctgcctggagaggagcccatcggccgggtggagcctgtgggcaatgcccccctgctggccctggtgcacaagatgaacaactgcctgagccagatggagcagtttcctgtgaaggtgcatgacttccccagcggaaatggaactggaggcagcttcagcctgaacagaggcagccaggccctgaagttcttcaacacccaccagctgaagtgccagctgcagaggcacccagactgtgccaacgtgaagcagtggaagggcggccctgtgaagattgaccccctggccctggtgcaggccatcgagcgctacctggtggtgcggggctacggccgggtgcgggaggatgatgaagattctgatgatgatggcagtgatgaggagattgatgagagcctggccgcccagttcctgaacagcggaaatgtgcgccaccggctgcagttctacatcggggagcacctgctgccctacaacatgacagtgtaccaggccgtgcggcagttcagcatccaggctgaagatgagcgggagagcacagatgatgagagcaaccccctgggccgggccggcatctggaccaagacccacaccatctggtacaagcctgtgagagaagatgaggagagcaacaaggactgtgtgggcggcaagaggggccgggcccagacagcccccaccaagaccagccccagaaatgccaagaagcatgatgagctgtggcatgatggagtgtgccccagcgtgagcaaccccctggaggtgtacctgatccccaccccacctgagaacatcacctttgaggaccccagcctggatgtgatcctgctgctgcgggtgctgcacgccatcagccgctactggtactacctgtatgacaatgccatgtgcaaggagatcatccccaccagcgagttcatcaacagcaagctgacagccaaggccaaccggcagctgcaggaccccctggtgatcatgacaggcaacatccccacctggctgacagagctgggcaagacctgccccttcttcttcccctttgacacccggcagatgctgttctacgtgacagcctttgaccgggaccgggccatgcagaggctgctggacaccaaccctgagatcaaccagagcgacagccaggacagccgggtggccccccggctggacaggaagaagaggacagtgaaccgggaggagctgctgaagcaggccgagagcgtgatgcaggacctgggcagcagccgggccatgctggagatccagtatgaaaatgaggtgggcaccggcctgggccccaccctggagttctacgccctggtgtcccaggagctgcagagagctgacctgggcctgtggagaggagaggaggtgaccctgagcaaccccaagggcagccaggagggcaccaagtacatccagaacctgcagggcctgtttgccctgccctttggaagaacagccaagccagcccacatcgccaaggtgaagatgaagttccgcttcctgggcaagctgatggccaaggccatcatggacttccggctggtggacctgcccctgggcctgcccttctacaagtggatgctgcggcaggagaccagcctgaccagccatgacctgtttgatattgatcctgtggtggcccggtctgtgtaccacctggaggacatcgtgcggcagaagaagaggctggagcaggacaagagccagaccaaggagagcctgcagtatgccctggagaccctgaccatgaatggctgcagcgtggaggacctgggcctggacttcaccctgcccggcttccccaacatcgagctgaagaagggcggcaaggacatccctgtgaccatccacaacctggaggagtacctgcggctggtgatcttctgggccctgaatgaaggagtgtcccggcagtttgacagcttcagagatggctttgaatctgtgttccccctgagccacctgcagtacttctacccagaggagctggaccagctgctgtgtggcagcaaggctgacacctgggatgccaagaccctgatggagtgctgcaggccagaccacggctacacccatgacagcagagctgtgaagttcctgtttgagatcctgagcagctttgacaatgagcagcagaggctcttcctgcagtttgtgacaggcagcccccggctgcctgtgggcggcttccgcagcctgaacccccccctgaccatcgtgaggaagacctttgagagcacagaaaatccagatgacttcctgcccagcgtgatgacctgtgtgaactacctgaagctgcctgactacagcagcattgagatcatgagggagaagctgctgattgctgcccgggagggccagcagagcttccacctgtcctag

SEQ ID NO: 173266 - DNA, 5169 bp, synthetic construct
  misc_feature 1..5169: note = Description of Artificial Sequence: Synthetic coding sequence
  source 1..5169: mol_type = other DNA
atgagcaaccggcccaacaacaaccctgggggcagcctgcggcgcagccagaggaacacagctggggcccagccccaggatgacagcatcggcggcagccggcggggcagcggcctgggcaagagaggagctgctgaggcccggcggcaggagaagatggctgaccctgagagcaaccaggaggccgtgaacagcagcgctgccaggacagatgaggccccccagggcgccgccgccagcagctctgtggccggggctgtgggcatgaccaccagcggggagagcgagagtgatgacagcgagatgggccgcctgcaggccctgctggaggcccggggcctgcccccccacctgtttggccccctgggccccaggatgagccagctgttccacaggaccatcggcagcggggccagcagcaaggcccagcagctgctgcagggcctgcaggccagtgatgagagccagcagctgcaggccgtcatcgagatgtgccagctgctggtgatgggaaatgaggagaccctgggcggcttccctgtgaagtctgtggtgcctgccctgatcaccctgctgcagatggagcacaactttgacatcatgaaccacgcctgccgggccctgacctacatgatggaggccctgcccaggagcagcgctgtggtggtggatgccatccctgtgttcctggagaagctgcaggtgatccagtgcattgatgtggccgagcaggccctgacagccctggagatgctgagccgccgccacagcaaggccatcctgcaggccggcggcctggccgactgcctgctgtacctggagttcttcagcatcaatgcccagagaaatgccctggccatcgccgccaactgctgccagagcatcaccccagatgagttccactttgtggccgacagcctgcccctgctgacccagaggctgacccaccaggacaagaagtctgtggagagcacctgcctgtgctttgcccggctggtggacaacttccagcacgaggagaacctgctgcagcaggtggccagcaaggacctgctgaccaacgtgcagcagctgctggtggtgaccccacccatcctgagcagcggcatgttcatcatggtggtgaggatgttcagcctgatgtgcagcaactgccccaccctggccgtgcagctgatgaagcagaacattgctgagaccctgcacttcctgctgtgtggggccagcaatggcagctgccaggagcagattgacctggtgcccaggagcccccaggagctgtatgagctgaccagcctcatctgtgagctgatgccctgcctgcccaaggagggcatctttgctgtggacaccatgctgaagaagggaaatgcccagaacacagatggagccatctggcagtggagagatgaccggggcctgtggcacccctacaacagaattgacagccgcatcatcgaggccgcccaccaggtgggggaggatgagatcagcctgagcaccctgggccgggtgtacaccatcgacttcaacagcatgcagcagatcaatgaagacaccggcacagcccgggccatccagaggaagcccaaccccctggccaacagcaacaccagcggctacagcgagagcaagaaggatgatgcccgggcccagctgatgaaggaggaccctgagctggccaagagcttcatcaagaccctgtttggagtgctgtatgaggtgtacagcagcagcgctggccctgctgtgcgccacaagtgcctgcgggccatcctgcgcatcatctactttgctgatgctgagctgctgaaggatgtgctgaagaaccacgctgtgagcagccacatcgcctccatgctgagcagccaggacctgaagatcgtggtgggcgccctgcagatggccgagatcctgatgcagaagctgcctgacatcttctctgtgtacttccggcgggagggcgtgatgcaccaggtgaagcacctggccgagagcgagagcctgctgaccagcccccccaaggcctgcaccaatggaagtggctccatgggcagcaccacctctgtgagcagcggcacagccacagctgccacccatgctgctgctgacctgggcagccccagcctgcagcacagcagagatgacagcctggacctgagcccccagggccgcctgagtgatgtgctgaagaggaagaggctgcccaagaggggcccccggcggcccaagtacagccccccaagagatgatgacaaggtggacaaccaggccaagagccccaccaccacccagagccccaagagcagcttcctggccagcctgaaccccaagacctggggccgcctgagcacccagagcaacagcaacaacatcgagcccgccaggacagctgggggcagcggcctggcccgggccgccagcaaggacaccatcagcaacaaccgggagaagatcaagggctggatcaaggagcaggcccacaagtttgtggagcgctacttcagcagcgagaacatggatggcagcaacccagccctgaatgtgctgcagaggctgtgtgccgccacagagcagctgaacctgcaggtggatggaggagcagaatgtctggtggagatccgcagcatcgtgtctgagagtgatgtgtcctcctttgagatccagcacagcggctttgtgaagcagctgctgctgtacctgaccagcaagtctgagaaggatgctgtgtcccgggagatccggctgaagcgcttcctgcacgtgttcttcagcagccccctgcctggagaggagcccatcggccgggtggagcctgtgggcaatgcccccctgctggccctggtgcacaagatgaacaactgcctgagccagatggagcagtttcctgtgaaggtgcatgacttccccagcggaaatggaactggaggcagcttcagcctgaacagaggcagccaggccctgaagttcttcaacacccaccagctgaagtgccagctgcagaggcacccagactgtgccaacgtgaagcagtggaagggcggccctgtgaagattgaccccctggccctggtgcaggccatcgagcgctacctggtggtgcggggctacggccgggtgcgggaggatgatgaagattctgatgatgatggcagtgatgaggagattgatgagagcctggccgcccagttcctgaacagcggaaatgtgcgccaccggctgcagttctacatcggggagcacctgctgccctacaacatgacagtgtaccaggccgtgcggcagttcagcatccaggctgaagatgagcgggagagcacagatgatgagagcaaccccctgggccgggccggcatctggaccaagacccacaccatctggtacaagcctgtgagagaagatgaggagagcaacaaggactgtgtgggcggcaagaggggccgggcccagacagcccccaccaagaccagccccagaaatgccaagaagcatgatgagctgtggcatgatggagtgtgccccagcgtgagcaaccccctggaggtgtacctgatccccaccccacctgagaacatcacctttgaggaccccagcctggatgtgatcctgctgctgcgggtgctgcacgccatcagccgctactggtactacctgtatgacaatgccatgtgcaaggagatcatccccaccagcgagttcatcaacagcaagctgacagccaaggccaaccggcagctgcaggaccccctggtgatcatgacaggcaacatccccacctggctgacagagctgggcaagacctgccccttcttcttcccctttgacacccggcagatgctgttctacgtgacagcctttgaccgggaccgggccatgcagaggctgctggacaccaaccctgagatcaaccagagcgacagccaggacagccgggtggccccccggctggacaggaagaagaggacagtgaaccgggaggagctgctgaagcaggccgagagcgtgatgcaggacctgggcagcagccgggccatgctggagatccagtatgaaaatgaggtgggcaccggcctgggccccaccctggagttctacgccctggtgtcccaggagctgcagagagctgacctgggcctgtggagaggagaggaggtgaccctgagcaaccccaagggcagccaggagggcaccaagtacatccagaacctgcagggcctgtttgccctgccctttggaagaacagccaagccagcccacatcgccaaggtgaagatgaagttccgcttcctgggcaagctgatggccaaggccatcatggacttccggctggtggacctgcccctgggcctgcccttctacaagtggatgctgcggcaggagaccagcctgaccagccatgacctgtttgatattgatcctgtggtggcccggtctgtgtaccacctggaggacatcgtgcggcagaagaagaggctggagcaggacaagagccagaccaaggagagcctgcagtatgccctggagaccctgaccatgaatggctgcagcgtggaggacctgggcctggacttcaccctgcccggcttccccaacatcgagctgaagaagggcggcaaggacatccctgtgaccatccacaacctggaggagtacctgcggctggtgatcttctgggccctgaatgaaggagtgtcccggcagtttgacagcttcagagatggctttgaatctgtgttccccctgagccacctgcagtacttctacccagaggagctggaccagctgctgtgtggcagcaaggctgacacctgggatgccaagaccctgatggagtgctgcaggccagaccacggctacacccatgacagcagagctgtgaagttcctgtttgagatcctgagcagctttgacaatgagcagcagaggctcttcctgcagtttgtgacaggcagcccccggctgcctgtgggcggcttccgcagcctgaacccccccctgaccatcgtgaggaagacctttgagagcacagaaaatccagatgacttcctgcccagcgtgatgacctgtgtgaactacctgaagctgcctgactacagcagcattgagatcatgagggagaagctgctgattgctgcccgggagggccagcagagcttccacctgtcctag

SEQ ID NO: 173267 - DNA, 450 bp, synthetic construct
  misc_feature 1..450: note = Description of Artificial Sequence: Synthetic coding sequence
  source 1..450: mol_type = other DNA
atgagcaaccggcccaacaacaaccctgggggcagcctgcggcgcagccagaggaacacagctggggcccagccccaggatgacagcatcggcggccgcagctgcagcagcagcagcgctgtgattgtgccccagccagaagatcctgaccgggccaacaccagcgagcggcagaagacaggccaggtgcccaagaaggacaacagcagaggagtgaagaggtctgccagcccagactacaacagaaccaacagccccagcagcgccaagaagcccaaggccctgcagcacacagagagccccagcgagaccaacaagccccacagcaagagcaagaagaggcacctggaccaggagcagcagctgaagagcgcccagagccccagcaccagcaaggcccacaccaggaagagcggggccactggaggcagccgcagccagaagaggtag

SEQ ID NO: 173268 - DNA, 465 bp, synthetic construct
  misc_feature 1..465: note = Description of Artificial Sequence: Synthetic coding sequence
  source 1..465: mol_type = other DNA
atgagcaaccggcccaacaacaaccctgggggcagcctgcggcgcagccagaggaacacagctggggcccagccccaggatgacagcatcggcggccgcagctgcagcagcagcagcgctgtgattgtgccccagccagaagatcctgaccgggccaacaccagcgagcggcagaagacaggccaggtgcccaagaaggacaacagcagaggagtgaagaggtctgccagcccagactacaacagaaccaacagccccagcagcgccaagaagcccaaggccctgcagcacacagagagccccagcgagaccaacaagccccacagcaagagcaagaagaggcacctggaccaggagcagcagctgaagagcgcccagagccccagcaccagcaaggcccacaccaggaagagcggggccactggaggcagccgcagccagaagaggaagaggacagagagctag

SEQ ID NO: 173269 - DNA, 1041 bp, synthetic construct
  misc_feature 1..1041: note = Description of Artificial Sequence: Synthetic coding sequence
  source 1..1041: mol_type = other DNA
atgagcaaccggcccaacaacaaccctgggggcagcctgcggcgcagccagaggaacacagctggggcccagccccaggatgacagcatcggcggccgcagccacctgggccaggccaagcacaagggctacagccccccagagagcaggaagagcaacagcaaggcccccaaggtgcagagcaacaccaccagcgagctgagccggggccacctgagcaagaggagctgcagcagcagcagcgctgtgattgtgccccagccagaagatcctgaccgggccaacaccagcgagcggcagaagacaggccaggtgcccaagaaggacaacagcagaggagtgaagaggtctgccagcccagactacaacagaaccaacagccccagcagcgccaagaagcccaaggccctgcagcacacagagagccccagcgagaccaacaagccccacagcaagagcaagaagaggcacctggaccaggagcagcagctgaagagcgcccagagccccagcaccagcaaggcccacaccaggaagagcggggccactggaggcagccgcagccagaagaggaagaggacagagagcagctgtgtgaagagcggcagcggcagcgagagcactggagctgaggagaggtctgccaagcccaccaagctggccagcaagagcgccaccagcgccaaggccggctgcagcaccatcacagacagcagcagcgctgccagcaccagcagcagcagcagcgctgtggccagcgccagcagcacagtgcccccaggggcccgggtgaagcagggcaaggaccagaacaaggcccggcgcagccgcagcgccagcagccccagccccaggaggagcagccgggagaaggagcagagcaagacaggaggcagcagcaagtttgactgggccgcccgcttcagccccaaggtgtccctgcccaagaccaagctgagcctgcccggcagcagcaagtctgagaccagcaagccaggccccagcggcctgcaggccaaggtgctgaccagcaagaggtag

SEQ ID NO: 173270 - DNA, 1746 bp, synthetic construct
  misc_feature 1..1746: note = Description of Artificial Sequence: Synthetic coding sequence
  source 1..1746: mol_type = other DNA
atggctgtggccggggctgtgtctggagagcccctggtgcactggtgcacccagcagctgaggaagaccttcggcctggatgtgtctgaggagatcatccagtatgtgctgagcattgaatctgctgaggagatccgggagtatgtgacagacctgctgcagggcaatgaaggcaagaagggccagttcatcgaggagctgatcaccaagtggcagaagaatgaccaggagctgatcagtgaccccctgcagcagtgcttcaagaaggatgagatcctggatggccagaagagcggggaccacctgaagaggggcaggaagaagggcaggaaccggcaggaggtgcctgccttcacagagccagacaccacagctgaggtgaagaccccatttgacctggccaaggcccaggagaacagcaacagcgtgaagaagaagaccaagtttgtgaacctgtacacccgggagggccaggaccggctggccgtgctgctgcccggccgccacccctgtgactgcctgggccagaagcacaagctgatcaacaactgcctgatctgtggccgcatcgtgtgtgagcaggagggcagcggcccctgcctcttctgtggcaccctggtgtgcacccatgaggagcaggacatcctgcagagggacagcaacaagagccagaagctgctgaagaagctgatgtctggagtggagaacagcggcaaggtggacatcagcaccaaggacctgctgccccaccaggagctgcgcatcaagagcggcctggagaaggccatcaagcacaaggacaagctgctggagtttgacaggaccagcatccggaggacccaggtgattgatgatgaaagtgactactttgccagtgacagcaaccagtggctgagcaagctggagcgggagaccctgcagaagcgggaggaggagctgcgggagctgcggcatgccagccggctgagcaagaaggtgaccatcgactttgctggcaggaagatcctggaggaggagaacagcctggccgagtaccacagccggctggatgagaccatccaggccatcgccaacggcaccctgaaccagcccctgaccaagctggacaggagcagcgaggagcccctgggcgtgctggtgaaccccaacatgtaccagagccccccccagtgggtggaccacactggagctgccagccagaagaaggccttccgcagcagcggcttcggcctggagttcaacagcttccagcaccagctgcgcatccaggaccaggagttccaggagggctttgatggcggctggtgcctgtctgtgcaccagccctgggccagcctgctggtgcggggcatcaagagggtggagggccgctcctggtacaccccccaccggggccgcctgtggattgctgccacagccaagaagcccagcccccaggaggtgtctgagctgcaggccacctaccgcctgctgcggggcaaggatgtggagttccccaatgactaccccagcggctgcctgctgggctgtgtggacctgattgactgcctgagccagaagcagttcaaggagcagttcccagacatcagccaggagagtgacagcccctttgtgttcatctgcaagaacccccaggagatggtggtgaagttccccatcaagggcaaccccaagatctggaagctggacagcaagatccaccagggcgccaagaagggcctgatgaagcagaacaaggctgtgtag

SEQ ID NO: 173271 - DNA, 1431 bp, synthetic construct
  misc_feature 1..1431: note = Description of Artificial Sequence: Synthetic coding sequence
  source 1..1431: mol_type = other DNA
atgagcggccccacctggctgccccccaagcagcctgagcccgcccgggccccccagggccgggccatcccccggggcaccccaggccccccaccagcccacggggccgccctgcagccccacccccgggtgaacttctgccccctgcccagcgagcagtgctaccaggcccctgggggccctgaggaccggggccctgcctgggtgggcagccacggcgtgctgcagcacacccagggcctgcctgctgaccggggcggcctgcggcccggcagcctggatgctgagattgacctgctgagcagcaccctggccgagctgaatggaggccggggccacgccagccggcggccagaccggcaggcctatgagcccccacctcctccagcctacagaacaggcagcctgaagcccaacccagccagccccctgcctgccagcccctatggaggccccaccccagccagctacaccacagccagcaccccagctggccctgccttccctgtgcaggtgaaggtggcccagcctgtgcggggctgcggccccccaagaagaggagccagccaggccagcggccccctgcccggcccccacttccccctgcccggccgcggggaggtgtggggccctggctaccgcagccagcgggagcccggccctggggccaaggaggaggccgccggcgtgtctggccctgctggccggggccggggcggggagcacggcccccaggtgcccctgagccagcccccagaagatgagctggaccggctgaccaagaagctggtgcatgacatgaaccacccccccagcggggagtacttcggccagtgtggcggctgtggggaggatgtggtgggagatggagctggggtggtggccctggacagagtcttccacgtgggctgctttgtgtgcagcacctgccgggcccagctgcggggccagcacttctatgctgtggagcggcgggcctactgtgagggctgctacgtggccaccctggagaagtgtgccacctgcagccagcccatcctggaccgcatcctgcgggccatgggcaaggcctaccaccctggctgcttcacctgtgtggtgtgccaccggggcctggatggcatccccttcaccgtggatgccaccagccagatccactgcatcgaggacttccacaggaagtttgccccccgctgcagcgtgtgtggcggggccatcatgcctgagcccggccaggaggagaccgtgcgcatcgtggccctggacaggagcttccacatcggctgctacaagtgtgaggagtgtggcctgctgctgagcagcgagggggagtgccagggctgctaccccctggatggccacatcctgtgcaaggcctgcagcgcctggaggatccaggagctgagcgccaccgtgaccacagactgctag

SEQ ID NO: 173272 - DNA, 1473 bp, synthetic construct
  misc_feature 1..1473: note = Description of Artificial Sequence: Synthetic coding sequence
  source 1..1473: mol_type = other DNA
atggagcagaagcccagcaaggtggagtgtggcagtgaccctgaggagaacagcgcccggagcccagatggcaagaggaagaggaagaatggccagtgcagcctgaagacctccatgagcggctacatccccagctacctggacaaggatgagcagtgtgtggtgtgtggggacaaggccaccggctaccactaccgctgcatcacctgtgagggctgcaagggcttcttccggaggaccatccagaagaacctgcaccccacctacagctgcaagtatgacagctgctgcgtgattgacaagatcaccaggaaccagtgccagctgtgccgcttcaagaagtgcatcgctgtgggcatggccatggacctggtgctggatgacagcaagagggtggccaagaggaagctgattgagcagaaccgggagaggaggaggaaggaggagatgatccgcagcctgcagcagaggcctgagcccaccccagaggagtgggacctgatccacatcgccacagaggcccacaggagcaccaatgcccagggcagccactggaagcagaggaggaagttcctgcctgatgacatcggccagagccccatcgtgtccatgccagatggagacaaggtggacctggaggccttcagcgagttcaccaagatcatcaccccagccatcaccagggtggtggactttgccaagaagctgcccatgttcagcgagctgccctgtgaggaccagatcatcctgctgaagggctgctgcatggagatcatgagcctgcgggctgctgtgcgctatgaccctgagagtgacaccctgaccctgtctggagagatggctgtgaagcgggagcagctgaagaatggaggcctgggcgtggtgtctgatgccatctttgagctgggcaagagcctgagcgccttcaacctggatgacacagaggtggccctgctgcaggccgtgctgctgatgagcacagacaggagcggcctgctgtgtgtggacaagattgagaagagccaggaggcctacctgctggcctttgagcactacgtgaaccacaggaagcacaacatcccccacttctggcccaagctgctgatgaaggagcgggaggtgcagagcagcatcctgtacaagggagctgctgctgagggccggcctgggggcagcctgggcgtgcaccctgagggccagcagctgctgggcatgcacgtggtgcagggcccccaggtgcggcagctggagcagcagctgggggaggccggcagcctgcagggccctgtgctgcagcaccagagccccaagagcccccagcagaggctgctggagctgctgcacaggagcggcatcctgcacgcccgggctgtgtgtggagaagatgacagcagcgaggccgacagccccagcagcagcgaggaggagcctgaggtgtgtgaggacctggccggaaatgctgccagcccctag

SEQ ID NO: 173273 - DNA, 1473 bp, synthetic construct; identical to SEQ ID NO: 173272
  misc_feature 1..1473: note = Description of Artificial Sequence: Synthetic coding sequence
  source 1..1473: mol_type = other DNA

SEQ ID NO: 173274 - DNA, 1233 bp, synthetic construct
  misc_feature 1..1233: note = Description of Artificial Sequence: Synthetic coding sequence
  source 1..1233: mol_type = other DNA
atggagcagaagcccagcaaggtggagtgtggcagtgaccctgaggagaacagcgcccggagcccagatggcaagaggaagaggaagaatggccagtgcagcctgaagacctccatgagcggctacatccccagctacctggacaaggatgagcagtgtgtggtgtgtggggacaaggccaccggctaccactaccgctgcatcacctgtgagggctgcaagggcttcttccggaggaccatccagaagaacctgcaccccacctacagctgcaagtatgacagctgctgcgtgattgacaagatcaccaggaaccagtgccagctgtgccgcttcaagaagtgcatcgctgtgggcatggccatggacctggtgctggatgacagcaagagggtggccaagaggaagctgattgagcagaaccgggagaggaggaggaaggaggagatgatccgcagcctgcagcagaggcctgagcccaccccagaggagtgggacctgatccacatcgccacagaggcccacaggagcaccaatgcccagggcagccactggaagcagaggaggaagttcctgcctgatgacatcggccagagccccatcgtgtccatgccagatggagacaaggtggacctggaggccttcagcgagttcaccaagatcatcaccccagccatcaccagggtggtggactttgccaagaagctgcccatgttcagcgagctgccctgtgaggaccagatcatcctgctgaagggctgctgcatggagatcatgagcctgcgggctgctgtgcgctatgaccctgagagtgacaccctgaccctgtctggagagatggctgtgaagcgggagcagctgaagaatggaggcctgggcgtggtgtctgatgccatctttgagctgggcaagagcctgagcgccttcaacctggatgacacagaggtggccctgctgcaggccgtgctgctgatgagcacagacaggagcggcctgctgtgtgtggacaagattgagaagagccaggaggcctacctgctggcctttgagcactacgtgaaccacaggaagcacaacatcccccacttctggcccaagctgctgatgaaggtgacagacctgaggatgattggagcctgccacgccagccgcttcctgcacatgaaggtggagtgccccacagagctgttccccccactcttcctggaggtgtttgaggaccaggaggtgtag

SEQ ID NO: 173275 - DNA, 1233 bp, synthetic construct; identical to SEQ ID NO: 173274
  misc_feature 1..1233: note = Description of Artificial Sequence: Synthetic coding sequence
  source 1..1233: mol_type = other DNA

SEQ ID NO: 173276 - DNA, 1386 bp, synthetic construct
  misc_feature 1..1386: note = Description of Artificial Sequence: Synthetic coding sequence
  source 1..1386: mol_type = other DNA
atgacccccaacagcatgacagaaaatggcctgacagcctgggacaagcccaagcactgcccagaccgggagcatgactggaagctggtgggcatgtctgaggcctgcctgcacaggaagagccacagcgagaggaggagcaccctgaagaatgagcagagcagcccccacctgatccagaccacctggaccagcagcatcttccacctggaccatgatgatgtgaatgaccagagcgtgagcagcgcccagaccttccagacagaggagaagaagtgcaagggctacatccccagctacctggacaaggatgagctgtgtgtggtgtgtggggacaaggccaccggctaccactaccgctgcatcacctgtgagggctgcaagggcttcttccggaggaccatccagaagaacctgcaccccagctacagctgcaagtatgagggcaaatgtgtgattgacaaggtgaccaggaaccagtgccaggagtgccgcttcaagaagtgcatctacgtgggcatggccacagacctggtgctggatgacagcaagaggctggccaagaggaagctgattgaggagaaccgggagaagagaagaagagaggagctgcagaagagcatcggccacaagccagagcccacagatgaggagtgggagctgatcaagacagtgacagaggcccacgtggccaccaatgcccagggcagccactggaagcagaagaggaagttcctgcctgaggacatcggccaggcccccatcgtgaatgcccctgagggcggcaaggtggacctggaggccttcagccacttcaccaagatcatcaccccagccatcaccagggtggtggactttgccaagaagctgcccatgttctgtgagctgccctgtgaggaccagatcatcctgctgaagggctgctgcatggagatcatgagcctgcgggctgctgtgcgctatgaccctgagagcgagaccctgaccctgaatggagagatggctgtgacccggggccagctgaagaatggaggcctgggcgtggtgtctgatgccatctttgacctgggcatgagcctgagcagcttcaacctggatgacacagaggtggccctgctgcaggccgtgctgctgatgagcagtgaccggcccggcctggcctgtgtggagcgcatcgagaagtaccaggacagcttcctgctggcctttgagcactacatcaactacaggaagcaccacgtgacccacttctggcccaagctgctgatgaaggtgacagacctgaggatgattggagcctgccacgccagccgcttcctgcacatgaaggtggagtgccccacagagctgttccccccactcttcctggaggtgtttgaggactag

SEQ ID NO: 173277 - DNA, 1386 bp, synthetic construct; identical to SEQ ID NO: 173276
  misc_feature 1..1386: note = Description of Artificial Sequence: Synthetic coding sequence
  source 1..1386: mol_type = other DNA

SEQ ID NO: 173278 - DNA, 1386 bp, synthetic construct; identical to SEQ ID NO: 173276
  misc_feature 1..1386: note = Description of Artificial Sequence: Synthetic coding sequence
  source 1..1386: mol_type = other DNA

SEQ ID NO: 173279 - DNA, 87 bp, synthetic construct
  misc_feature 1..87: note = Description of Artificial Sequence: Synthetic coding sequence
  source 1..87: mol_type = other DNA
atgacccccaacagcatgacagagatggccctgcagcccggcaccaacagaagcacagtgcagacagagaacaccaccggcagctag

SEQ ID NO: 173280 - DNA, 366 bp, synthetic construct
  misc_feature 1..366: note = Description of Artificial Sequence: Synthetic coding sequence
  source 1..366: mol_type = other DNA
atgacccccaacagcatgacagaaaatggcctgacagcctgggacaagcccaagcactgcccagaccgggagcatgactggaagctggtgggcatgtctgaggcctgcctgcacaggaagagccacagcgagaggaggagcaccctgaagaatgagcagagcagcccccacctgatccagaccacctggaccagcagcatcttccacctggaccatgatgatgtgaatgaccagagcgtgagcagcgcccagaccttccagacagaggagaagaagtgcaagggctacatccccagctacctggacaaggatgagctgtgtgtggtgtgtggggacaaggccaccggctaccactaccgctgctag

SEQ ID NO: 173281 - DNA, 441 bp, synthetic construct
  misc_feature 1..441: note = Description of Artificial Sequence: Synthetic coding sequence
  source 1..441: mol_type = other DNA
atgcaggtgctgaccaagcgctaccccaagaactgcctgctgactgtgatggacagatatgctgctgaggtgcacaacatggagcaggtggtgatgatccccagcctgctgagagatgtgcagctgagcggccctgggggccaggcccaggccgaggccccagacctgtacacctacttcaccatgctgaaggccatctgtgtggatgtggaccacggcctgctgccccgggaggagtggcaggccaaggtggccggctctgaagaaaatggaacagctgagacagaggaggtggaggatgagagcgccagcggggagctggacctggaggcccagttccacctgcacttcagcagcctgcaccacatcctgatgcacctgacagagaaggcccaggaggtgaccaggaagtaccaggagatgacaggccaggtgtggtag

SEQ ID NO: 173282 - DNA, 2802 bp, synthetic construct
  misc_feature 1..2802: note = Description of Artificial Sequence: Synthetic coding sequence
  source 1..2802: mol_type = other DNA
atgagggccctggccgtgctgtctgtgaccctggtgatggcctgcacagaggccttcttccccttcatcagccggggcaaggagctgctgtggggcaagccagaggagagccgggtgtcctctgtgctggaggagagcaagaggctggtggacacagccatgtatgccaccatgcagaggaacctgaagaagaggggcatcctgagccctgcccagctgctgtccttcagcaagctgcctgagcccaccagcggcgtgattgcccgggctgctgagatcatggagaccagcatccaggccatgaagaggaaggtgaacctgaagacccagcagagccagcaccccacagatgccctgtctgaggacctgctgagcatcatcgccaacatgagcggctgcctgccctacatgctgccccccaagtgccccaacacctgcctggccaacaagtaccggcccatcactggagcctgcaacaacagagaccacccccgctggggcgccagcaacacagccctggcccgctggctgccccctgtgtatgaagatggcttcagccagccccggggctggaaccctggcttcctgtacaacggcttccccctgccccctgtgcgggaggtgaccaggcatgtgatccaggtgtccaatgaggtggtgacagatgatgaccgctacagcgacctgctgatggcctggggccagtacatcgaccatgacatcgccttcaccccccagagcaccagcaaggccgcctttggaggcggcgctgactgccagatgacctgtgagaaccagaacccctgcttccccatccagctgcctgaggaggcccggcctgctgctggaacagcctgcctgcccttctaccgcagcagcgctgcctgtggcaccggggaccagggcgccctgtttggaaacctgagcacagccaacccccggcagcagatgaatggcctgaccagcttcctggatgccagcacagtgtatggcagcagccctgccctggagcggcagctgaggaactggaccagcgctgagggcctgctgcgggtgcacgcccggctgcgggacagcggccgggcctacctgccctttgtgcccccccgggccccagctgcctgtgcccctgagcccggcatccctggagagacccggggcccctgcttcctggccggagatggccgggccagcgaggtgcccagcctgacagccctgcacaccctgtggctgcgggagcacaaccggctggccgccgccctgaaggccctgaatgcccactggagcgcagatgctgtgtaccaggaggccaggaaggtggtgggcgccctgcaccagatcatcaccctgcgggactacatcccccgcatcctgggccctgaggccttccagcagtatgtgggcccctatgagggctatgacagcacagccaaccccaccgtgtccaatgtgttcagcacagctgccttccgcttcggccacgccaccatccaccccctggtgcggcggctggatgccagcttccaggagcacccagacctgcccggcctgtggctgcaccaggccttcttcagcccctggaccctgctgcggggcggcggcctggaccccctcatccggggcctgctggcccggcctgccaagctgcaggtgcaggaccagctgatgaatgaggagctgacagagcggctgtttgtgctgagcaacagcagcaccctggacctggccagcatcaacctgcagaggggccgggaccacggcctgcccggctacaatgagtggagggagttctgtggcctgccccggctggagaccccagctgacctgagcacagccatcgccagccgctctgtggccgacaagatcctggacctgtacaagcacccagacaacattgatgtgtggctgggcggcctggccgagaacttcctgccccgggccaggacaggccccctgtttgcctgcctgattggcaagcagatgaaggccctgagagatggagactggttctggtgggagaacagccacgtgttcacagatgcccagaggcgggagctggagaagcacagcctgagcagggtcatctgtgacaacacaggcctgaccagggtgcccatggatgccttccaggtgggcaagtttcctgaggactttgagagctgtgacagcatcaccggcatgaacctggaggcctggagggagaccttcccccaggatgacaagtgtggcttccctgagagcgtggagaatggagactttgtgcactgtgaggagagcggcagaagagtgctggtgtacagctgccgccacggctatgagctgcagggccgggagcagctgacctgcacccaggagggctgggacttccagccccccctgtgcaaggatgtgaatgaatgtgctgatggagcccaccccccctgccacgccagcgcccgctgcaggaacaccaagggcggcttccagtgcctgtgtgccgacccctatgagctgggagatgatggccgcacctgtgtggacagcggccgcctgccccgggtgacctggatctccatgagcctggccgccctgctgattggaggctttgctggcctgaccagcaccgtcatctgccgctggaccaggacaggcaccaagagcaccctgcccatcagcgagactggaggcggcaccccagagctgcgctgtgggaagcaccaggccgtgggcaccagcccccagagagctgctgcccaggacagcgagcaggagagcgctggcatggagggccgggacacccaccggctgccccgggccctgtag

SEQ ID NO: 173283 - DNA, 2790 bp, synthetic construct
  misc_feature 1..2790: note = Description of Artificial Sequence: Synthetic coding sequence
  source 1..2790: mol_type = other DNA
atgagggccctggccgtgctgtctgtgaccctggtgatggcctgcacagaggccttcttccccttcatcagccggggcaaggagctgctgtggggcaagccagaggagagccgggtgtcctctgtgctggaggagagcaagaggctggtggacacagccatgtatgccaccatgcagaggaacctgaagaagaggggcatcctgagccctgcccagctgctgtccttcagcaagctgcctgagcccaccagcggcgtgattgcccgggctgctgagatcatggagaccagcatccaggccatgaagaggaaggtgaacctgaagacccagcagagccagcaccccacagatgccctgtctgaggacctgctgagcatcatcgccaacatgagcggctgcctgccctacatgctgccccccaagtgccccaacacctgcctggccaacaagtaccggcccatcactggagcctgcaacaacagagaccacccccgctggggcgccagcaacacagccctggcccgctggctgccccctgtgtatgaagatggcttcagccagccccggggctggaaccctggcttcctgtacaacggcttccccctgccccctgtgcgggaggtgaccaggcatgtgatccaggtgtccaatgaggtggtgacagatgatgaccgctacagcgacctgctgatggcctggggccagtacatcgaccatgacatcgccttcaccccccagagcaccagcaaggccgcctttggaggcggcgctgactgccagatgacctgtgagaaccagaacccctgcttccccatccagctgcctgaggaggcccggcctgctgctggaacagcctgcctgcccttctaccgcagcagcgctgcctgtggcaccggggaccagggcgccctgtttggaaacctgagcacagccaacccccggcagcagatgaatggcctgaccagcttcctggatgccagcacagtgtatggcagcagccctgccctggagcggcagctgaggaactggaccagcgctgagggcctgctgcgggtgcacgcccggctgcgggacagcggccgggcctacctgccctttgtgcccccccgggccccagctgcctgtgcccctgagcccggcatccctggagagacccggggcccctgcttcctggccggagatggccgggccagcgaggtgcccagcctgacagccctgcacaccctgtggctgcgggagcacaaccggctggccgccgccctgaaggccctgaatgcccactggagcgcagatgctgtgtaccaggaggccaggaaggtggtgggcgccctgcaccagatcatcaccctgcgggactacatcccccgcatcctgggccctgaggccttccagcagtatgtgggcccctatgagggctatgacagcacagccaaccccaccgtgtccaatgtgttcagcacagctgccttccgcttcggccacgccaccatccaccccctggtgcggcggctggatgccagcttccaggagcacccagacctgcccggcctgtggctgcaccaggccttcttcagcccctggaccctgctgcggggcggcggcctggaccccctcatccggggcctgctggcccggcctgccaagctgcaggtgcaggaccagctgatgaatgaggagctgacagagcggctgtttgtgctgagcaacagcagcaccctggacctggccagcatcaacctgcagaggggccgggaccacggcctgcccggctacaatgagtggagggagttctgtggcctgccccggctggagaccccagctgacctgagcacagccatcgccagccgctctgtggccgacaagatcctggacctgtacaagcacccagacaacattgatgtgtggctgggcggcctggccgagaacttcctgccccgggccaggacaggccccctgtttgcctgcctgattggcaagcagatgaaggccctgagagatggagactggttctggtgggagaacagccacgtgttcacagatgcccagaggcgggagctggagaagcacagcctgagcagggtcatctgtgacaacacaggcctgaccagggtgcccatggatgccttccaggtgggcaagtttcctgaggactttgagagctgtgacagcatcaccggcatgaacctggaggcctggagggagaccttcccccaggatgacaagtgtggcttccctgagagcgtggagaatggagactttgtgcactgtgaggagagcggcagaagagtgctggtgtacagctgccgccacggctatgagctgcagggccgggagcagctgacctgcacccaggagggctgggacttccagccccccctgtgcaaggatgtgaatgaatgtgctgatggagcccaccccccctgccacgccagcgcccgctgcaggaacaccaagggcggcttccagtgcctgtgtgccgacccctatgagctgggagatgatggccgcacctgtgtggacagcggccgcctgccccgggtgacctggatctccatgagcctggccgccctgctgattggaggctttgctggcctgaccagcaccgtcatctgccgctggagggtgctgggctggaaggccggcatcctgaccggctgccgggagcccagcgagggcaaggtggccggccactgcaggacagccagctgcagccagaaccacaggaccaccctcttccagacccaggccaaccccaagtctgctggccgcctcttcagccagcacggctag

SEQ ID NO: 173284 - DNA, 2802 bp, synthetic construct; identical to SEQ ID NO: 173282
  misc_feature 1..2802: note = Description of Artificial Sequence: Synthetic coding sequence
  source 1..2802: mol_type = other DNA

SEQ ID NO: 173285 - DNA, 2670 bp, synthetic construct
  misc_feature 1..2670: note = Description of Artificial Sequence: Synthetic coding sequence
  source 1..2670: mol_type = other DNA
atgagggccctggccgtgctgtctgtgaccctggtgatggcctgcacagaggccttcttccccttcatcagccggggcaaggagctgctgtggggcaagccagaggagagccgggtgtcctctgtgctggaggagagcaagaggctggtggacacagccatgtatgccaccatgcagaggaacctgaagaagaggggcatcctgagccctgcccagctgctgtccttcagcaagctgcctgagcccaccagcggcgtgattgcccgggctgctgagatcatggagaccagcatccaggccatgaagaggaaggtgaacctgaagacccagcagagccagcaccccacagatgccctgtctgaggacctgctgagcatcatcgccaacatgagcggctgcctgccctacatgctgccccccaagtgccccaacacctgcctggccaacaagtaccggcccatcactggagcctgcaacaacagagaccacccccgctggggcgccagcaacacagccctggcccgctggctgccccctgtgtatgaagatggcttcagccagccccggggctggaaccctggcttcctgtacaacggcttccccctgccccctgtgcgggaggtgaccaggcatgtgatccaggtgtccaatgaggtggtgacagatgatgaccgctacagcgacctgctgatggcctggggccagtacatcgaccatgacatcgccttcaccccccagagcaccagcaaggccgcctttggaggcggcgctgactgccagatgacctgtgagaaccagaacccctgcttccccatccagctgcctgaggaggcccggcctgctgctggaacagcctgcctgcccttctaccgcagcagcgctgcctgtggcaccggggaccagggcgccctgtttggaaacctgagcacagccaacccccggcagcagatgaatggcctgaccagcttcctggatgccagcacagtgtatggcagcagccctgccctggagcggcagctgaggaactggaccagcgctgagggcctgctgcgggtgcacgcccggctgcgggacagcggccgggcctacctgccctttgtgcccccccgggccccagctgcctgtgcccctgagcccggcatccctggagagacccggggcccctgcttcctggccggagatggccgggccagcgaggtgcccagcctgacagccctgcacaccctgtggctgcgggagcacaaccggctggccgccgccctgaaggccctgaatgcccactggagcgcagatgctgtgtaccaggaggccaggaaggtggtgggcgccctgcaccagatcatcaccctgcgggactacatcccccgcatcctgggccctgaggccttccagcagtatgtgggcccctatgagggctatgacagcacagccaaccccaccgtgtccaatgtgttcagcacagctgccttccgcttcggccacgccaccatccaccccctggtgcggcggctggatgccagcttccaggagcacccagacctgcccggcctgtggctgcaccaggccttcttcagcccctggaccctgctgcggggcggcggcctggaccccctcatccggggcctgctggcccggcctgccaagctgcaggtgcaggaccagctgatgaatgaggagctgacagagcggctgtttgtgctgagcaacagcagcaccctggacctggccagcatcaacctgcagaggggccgggaccacggcctgcccggctacaatgagtggagggagttctgtggcctgccccggctggagaccccagctgacctgagcacagccatcgccagccgctctgtggccgacaagatcctggacctgtacaagcacccagacaacattgatgtgtggctgggcggcctggccgagaacttcctgccccgggccaggacaggccccctgtttgcctgcctgattggcaagcagatgaaggccctgagagatggagactggttctggtgggagaacagccacgtgttcacagatgcccagaggcgggagctggagaagcacagcctgagcagggtcatctgtgacaacacaggcctgaccagggtgcccatggatgccttccaggtgggcaagtttcctgaggactttgagagctgtgacagcatcaccggcatgaacctggaggcctggagggagaccttcccccaggatgacaagtgtggcttccctgagagcgtggagaatggagactttgtgcactgtgaggagagcggcagaagagtgctggtgtacagctgccgccacggctatgagctgcagggccgggagcagctgacctgcacccaggagggctgggacttccagccccccctgtgcaaggacagcggccgcctgccccgggtgacctggatctccatgagcctggccgccctgctgattggaggctttgctggcctgaccagcaccgtcatctgccgctggaccaggacaggcaccaagagcaccctgcccatcagcgagactggaggcggcaccccagagctgcgctgtgggaagcaccaggccgtgggcaccagcccccagagagctgctgcccaggacagcgagcaggagagcgctggcatggagggccgggacacccaccggctgccccgggccctgtag

SEQ ID NO: 173286 - DNA, 2283 bp, synthetic construct
  misc_feature 1..2283: note = Description of Artificial Sequence: Synthetic coding sequence
  source 1..2283: mol_type = other DNA
atgagggccctggccgtgctgtctgtgaccctggtgatggcctgcacagaggccttcttccccttcatcagccggggcaaggagctgctgtggggcaagccagaggagagccgggtgtcctctgtgctggaggagagcaagaggctggtggacacagccatgtatgccaccatgcagaggaacctgaagaagaggggcatcctgagccctgcccagctgctgtccttcagcaagctgcctgagcccaccagcggcgtgattgcccgggctgctgagatcatggagaccagcatccaggccatgaagaggaaggtgaacctgaagacccagcagagccagcaccccacagatgccctgtctgaggacctgctgagcatcatcgccaacatgagcggctgcctgccctacatgctgccccccaagtgccccaacacctgcctggccaacaagtaccggcccatcactggagcctgcaacaacagagaccacccccgctggggcgccagcaacacagccctggcccgctggctgccccctgtgtatgaagatggcttcagccagccccggggctggaaccctggcttcctgtacaacggcttccccctgccccctgtgcgggaggtgaccaggcatgtgatccaggtgtccaatgaggtggtgacagatgatgaccgctacagcgacctgctgatggcctggggccagtacatcgaccatgacatcgccttcaccccccagagcaccagcaaggccgcctttggaggcggcgctgactgccagatgacctgtgagaaccagaacccctgcttccccatccagatcatcaccctgcgggactacatcccccgcatcctgggccctgaggccttccagcagtatgtgggcccctatgagggctatgacagcacagccaaccccaccgtgtccaatgtgttcagcacagctgccttccgctttggacatgccaccatccaccccctggtgcggcggctggatgccagcttccaggagcacccagacctgcccggcctgtggctgcaccaggccttcttcagcccctggaccctgctgcggggcggcggcctggaccccctcatccggggcctgctggcccggcctgccaagctgcaggtgcaggaccagctgatgaatgaggagctgacagagcggctgtttgtgctgagcaacagcagcaccctggacctggccagcatcaacctgcagaggggccgggaccacggcctgcccggctacaatgagtggagggagttctgtggcctgccccggctggagaccccagctgacctgagcacagccatcgccagccgctctgtggccgacaagatcctggacctgtacaagcacccagacaacattgatgtgtggctgggcggcctggccgagaacttcctgccccgggccaggacaggccccctgtttgcctgcctgattggcaagcagatgaaggccctgagagatggagactggttctggtgggagaacagccacgtgttcacagatgcccagaggcgggagctggagaagcacagcctgagcagggtcatctgtgacaacacaggcctgaccagggtgcccatggatgccttccaggtgggcaagttcccagaagattttgagagctgtgacagcatcaccggcatgaacctggaggcctggagggagaccttcccccaggatgacaagtgtggcttccctgagagcgtggagaatggagactttgtgcactgtgaggagagcggccggcgggtgctggtgtacagctgcagacatggctatgagctgcagggccgggagcagctgacctgcacccaggagggctgggacttccagccccccctgtgcaaggatgtgaatgaatgtgctgatggagcccaccccccctgccacgccagcgcccgctgcaggaacaccaagggcggcttccagtgcctgtgtgccgacccctatgagctgggagatgatggccgcacctgtgtggacagcggccgcctgccccgggtgacctggatctccatgagcctggccgccctgctgattggaggctttgctggcctgaccagcaccgtcatctgccgctggaccaggacaggcaccaagagcaccctgcccatcagcgagaccggcggcggcaccccagagctgcgctgtgggaagcaccaggccgtgggcaccagcccccagagagctgctgcccaggacagcgagcaggagagcgctggcatggagggccgggacacccaccggctgccccgggccctgtag

SEQ ID NO: 173287 - DNA, 2283 bp, synthetic construct; identical to SEQ ID NO: 173286
  misc_feature 1..2283: note = Description of Artificial Sequence: Synthetic coding sequence
  source 1..2283: mol_type = other DNA

SEQ ID NO: 173288 - DNA, 2631 bp, synthetic construct
  misc_feature 1..2631: note = Description of Artificial Sequence: Synthetic coding sequence
  source 1..2631: mol_type = other DNA
atgagggccctggccgtgctgtctgtgaccctggtgatggcctgcacagaggccttcttccccttcatcagccggggcaaggagctgctgtggggcaagccagaggagagccgggtgtcctctgtgctggaggagagcaagaggctggtggacacagccatgtatgccaccatgcagaggaacctgaagaagaggggcatcctgagccctgcccagctgctgtccttcagcaagctgcctgagcccaccagcggcgtgattgcccgggctgctgagatcatggagaccagcatccaggccatgaagaggaaggtgaacctgaagacccagcagagccagcaccccacagatgccctgtctgaggacctgctgagcatcatcgccaacatgagcggctgcctgccctacatgctgccccccaagtgccccaacacctgcctggccaacaagtaccggcccatcactggagcctgcaacaacagagaccacccccgctggggcgccagcaacacagccctggcccgctggctgccccctgtgtatgaagatggcttcagccagccccggggctggaaccctggcttcctgtacaacggcttccccctgccccctgtgcgggaggtgaccaggcatgtgatccaggtgtccaatgaggtggtgacagatgatgaccgctacagcgacctgctgatggcctggggccagtacatcgaccatgacatcgccttcaccccccagagcaccagcaaggccgcctttggaggcggcgctgactgccagatgacctgtgagaaccagaacccctgcttccccatccagctgcctgaggaggcccggcctgctgctggaacagcctgcctgcccttctaccgcagcagcgctgcctgtggcaccggggaccagggcgccctgtttggaaacctgagcacagccaacccccggcagcagatgaatggcctgaccagcttcctggatgccagcacagtgtatggcagcagccctgccctggagcggcagctgaggaactggaccagcgctgagggcctgctgcgggtgcacgcccggctgcgggacagcggccgggcctacctgccctttgtgcccccccgggccccagctgcctgtgcccctgagcccggcatccctggagagacccggggcccctgcttcctggccggagatggccgggccagcgaggtgcccagcctgacagccctgcacaccctgtggctgcgggagcacaaccggctggccgccgccctgaaggccctgaatgcccactggagcgcagatgctgtgtaccaggaggccaggaaggtggtgggcgccctgcaccagatcatcaccctgcgggactacatcccccgcatcctgggccctgaggccttccagcagtatgtgggcccctatgagggctatgacagcacagccaaccccaccgtgtccaatgtgttcagcacagctgccttccgcttcggccacgccaccatccaccccctggtgcggcggctggatgccagcttccaggagcacccagacctgcccggcctgtggctgcaccaggccttcttcagcccctggaccctgctgcggggcggctacaatgagtggagggagttctgtggcctgccccggctggagaccccagctgacctgagcacagccatcgccagccgctctgtggccgacaagatcctggacctgtacaagcacccagacaacattgatgtgtggctgggcggcctggccgagaacttcctgccccgggccaggacaggccccctgtttgcctgcctgattggcaagcagatgaaggccctgagagatggagactggttctggtgggagaacagccacgtgttcacagatgcccagaggcgggagctggagaagcacagcctgagcagggtcatctgtgacaacacaggcctgaccagggtgcccatggatgccttccaggtgggcaagttcccagaagattttgagagctgtgacagcatcaccggcatgaacctggaggcctggagggagaccttcccccaggatgacaagtgtggcttccctgagagcgtggagaatggagactttgtgcactgtgaggagagcggccggcgggtgctggtgtacagctgcagacatggctatgagctgcagggccgggagcagctgacctgcacccaggagggctgggacttccagccccccctgtgcaaggatgtgaatgaatgtgctgatggagcccaccccccctgccacgccagcgcccgctgcaggaacaccaagggcggcttccagtgcctgtgtgccgacccctatgagctgggagatgatggccgcacctgtgtggacagcggccgcctgccccgggtgacctggatctccatgagcctggccgccctgctgattggaggctttgctggcctgaccagcaccgtcatctgccgctggaccaggacaggcaccaagagcaccctgcccatcagcgagaccggcggcggcaccccagagctgcgctgtgggaagcaccaggccgtgggcaccagcccccagagagctgctgcccaggacagcgagcaggagagcgctggcatggagggccgggacacccaccggctgccccgggccctgtag

SEQ ID NO: 173289 - DNA, 519 bp, synthetic construct
  misc_feature 1..519: note = Description of Artificial Sequence: Synthetic coding sequence
  source 1..519: mol_type = other DNA
atgagggccctggccgtgctgtctgtgaccctggtgatggcctgcacagaggccttcttccccttcatcagccggggcaaggagctgctgtggggcaagccagaggagagccgggtgtcctctgtgctggaggagagcaagaggctggtggacacagccatgtatgccaccatgcagaggaacctgaagaagaggggcatcctgagccctgcccagctgctgtccttcagcaagctgcctgagcccaccagcggcgtgattgcccgggctgctgagatcatggagaccagcatccaggccatgaagaggaaggtgaacctgaagacccagcagagccagcaccccacagatgccctgtctgaggacctgctgagcatcatcgccaacatgagcggctgcctgccctacatgctgccccccaagtgccccaacacctgcctggccaacaagtaccggcccatcactggagcctgcaacaacagagaccacccccgctggggcgccagcaacacagcctag

SEQ ID NO: 173290 - DNA, 462 bp, synthetic construct
  misc_feature 1..462: note = Description of Artificial Sequence: Synthetic coding sequence
  source 1..462: mol_type = other DNA
atgaatggcctgaccagcttcctggatgccagcacagtgtatggcagcagccctgccctggagcggcagctgaggaactggaccagcgctgagggcctgctgcgggtgcacgcccggctgcgggacagcggccgggcctacctgccctttgtgcccccccgggccccagctgcctgtgcccctgagcccggcatccctggagagacccggggcccctgcttcctggccggggacccccggcagaggggccccctgcctgatggaacagcccatgctgtggccgcccgggcccagcccccaggccgcggggcccagggcccccagtgtgccctggagcggggcagaagagtgcctgggggcgcccagggccggggccgcagcgccccagaccaccaccctgagggcctgcacccccaggaccccggcacccggggcctgcctgctgtgcggggcagcctgtag

SEQ ID NO: 173291 - DNA, 525 bp, synthetic construct
  misc_feature 1..525: note = Description of Artificial Sequence: Synthetic coding sequence
  source 1..525: mol_type = other DNA
atgagggccctggccgtgctgtctgtgaccctggtgatggcctgcacagaggccttcttccccttcatcagccggggcaaggagctgctgtggggcaagccagaggagagccgggtgtcctctgtgctggaggagagcaagaggctggtggacacagccatgtatgccaccatgcagaggaacctgaagaagaggggcatcctgagccctgcccagctgctgtccttcagcaagctgcctgagcccaccagcggcgtgattgcccgggctgctgagatcatggagaccagcatccaggccatgaagaggaaggtgaacctgaagacccagcagagccagcaccccacagatgccctgtctgaggacctgctgagcatcatcgccaacatgagcggctgcctgccctacatgctgccccccaagtgccccaacacctgcctggccaacaagtaccggcccatcactggagcctgcaacaacaggaagatgaagtacaagccagaccacagcgagacagccaactag

SEQ ID NO: 173292 - DNA, 2295 bp, synthetic construct
  misc_feature 1..2295: note = Description of Artificial Sequence: Synthetic coding sequence
  source 1..2295: mol_type = other DNA
atgaggcctgctgacctgctgcagctggtgctgctgctggacctgccccgggacctgggcggcatgggctgcagcagccccccctgtgagtgccaccaggaggaggacttccgggtgacctgcaaggacatccagaggatccccagcctgccccccagcacccagaccctgaagctgattgagacccacctgcggaccatccccagccacgccttcagcaacctgcccaacatcagccgcatctacgtgtccattgatgtgaccctgcagcagctggagagccacagcttctacaacctgagcaaggtgacccacatcgagatccggaacaccaggaacctgacctacattgatcctgatgccctgaaggagctgcccctgctgaagttcctgggcatcttcaacacaggcctgaagatgtttcctgacctgaccaaggtgtacagcacagacatcttcttcatcctggagatcacagacaacccctacatgaccagcatccctgtgaatgccttccagggcctgtgcaatgagaccctgaccctgaagctgtacaacaacggcttcacctctgtgcagggctacgccttcaacggcaccaagctggatgctgtgtacctgaacaagaacaagtacctgaccgtcatcgacaaggatgcctttggaggagtgtacagcggccccagcctgctggatgtgtcccagacctctgtgacagccctgcccagcaagggcctggagcacctgaaggagctgattgccaggaacacctggaccctgaagaagctgcccctgagcctgtccttcctgcacctgaccagggctgacctgagctaccccagccactgctgtgccttcaagaaccagaagaagatccggggcatcctggagagcctgatgtgcaatgaaagctccatgcagagcctgcggcagaggaagtctgtgaatgccctgaacagccccctgcaccaggagtatgaggagaacctgggggacagcatcgtgggctacaaggagaagagcaagttccaggacacccacaacaatgcccactactacgtgttctttgaggagcaggaggatgagatcatcggcttcggccaggagctgaagaacccccaggaggagaccctgcaggcctttgacagccactatgactacaccatctgtggggacagcgaggacatggtgtgcacccccaagagtgatgagttcaacccctgtgaggacatcatgggctacaagttcctgagaattgtggtgtggtttgtgtccctgctggccctgctgggcaatgtgtttgtgctgctgatcctgctgaccagccactacaagctgaatgtgccccgcttcctgatgtgcaacctggcctttgctgacttctgcatgggcatgtacctgctgctgattgcctctgtggacctgtacacccacagcgagtactacaaccacgccatcgactggcagacaggccctggctgcaacacagctggcttcttcaccgtgtttgccagcgagctgtctgtgtacaccctgaccgtcatcaccctggagcgctggtacgccatcacctttgccatgaggctggacaggaagatccggctgcggcatgcctgtgccatcatggtgggcggctgggtgtgctgcttcctgctggccctgctgcccctggtgggcatcagcagctatgccaaggtgtccatctgcctgcccatggacacagagacccccctggccctggcctacatcgtgtttgtgctgaccctgaacatcgtggccttcgtcatcgtgtgctgctgctacgtgaagatctacatcaccgtgaggaacccccagtacaaccctggggacaaggacaccaagatcgccaagaggatggctgtgctgatcttcacagacttcatctgcatggcccccatctccttctacgccctgagcgccatcctgaacaagcccctcatcaccgtgagcaacagcaagatcctgctggtgctcttctaccccctgaacagctgtgccaaccccttcctgtatgccatcttcaccaaggccttccagagagatgtgttcatcctgctgagcaagtttggcatctgcaagaggcaggcccaggcctaccggggccagagggtgccccccaagaacagcacagacatccaggtgcagaaggtgacccatgagatgaggcagggcctgcacaacatggaggatgtgtatgagctgattgagaacagccacctgacccccaagaagcagggccagatcagcgaggagtacatgcagacagtgctgtag

SEQ ID NO: 173293 - DNA, 762 bp, synthetic construct
  misc_feature 1..762: note = Description of Artificial Sequence: Synthetic coding sequence
  source 1..762: mol_type = other DNA
atgaggcctgctgacctgctgcagctggtgctgctgctggacctgccccgggacctgggcggcatgggctgcagcagccccccctgtgagtgccaccaggaggaggacttccgggtgacctgcaaggacatccagaggatccccagcctgccccccagcacccagaccctgaagctgattgagacccacctgcggaccatccccagccacgccttcagcaacctgcccaacatcagccgcatctacgtgtccattgatgtgaccctgcagcagctggagagccacagcttctacaacctgagcaaggtgacccacatcgagatccggaacaccaggaacctgacctacattgatcctgatgccctgaaggagctgcccctgctgaagttcctgggcatcttcaacacaggcctgaagatgtttcctgacctgaccaaggtgtacagcacagacatcttcttcatcctggagatcacagacaacccctacatgaccagcatccctgtgaatgccttccagggcctgtgcaatgagaccctgaccctgaagctgtacaacaacggcttcacctctgtgcagggctacgccttcaacggcaccaagctggatgctgtgtacctgaacaagaacaagtacctgaccgtcatcgacaaggatgcctttggaggagtgtacagcggccccagcctgctgctgcccctgggcaggaagagcctgagctttgagacccagaaggcccccaggagctccatgcccagctag

SEQ ID NO: 173294 - DNA, 1236 bp, synthetic construct
  misc_feature 1..1236: note = Description of Artificial Sequence: Synthetic coding sequence
  source 1..1236: mol_type = other DNA
atgaggcctgctgacctgctgcagctggtgctgctgctggacctgccccgggacctgggcggcatgggctgcagcagccccccctgtgagtgccaccaggaggaggacttccgggtgacctgcaaggacatccagaggatccccagcctgccccccagcacccagaccctgaagctgattgagacccacctgcgcatcgtggtgtggtttgtgtccctgctggccctgctgggcaatgtgtttgtgctgctgatcctgctgaccagccactacaagctgaatgtgccccgcttcctgatgtgcaacctggcctttgctgacttctgcatgggcatgtacctgctgctgattgcctctgtggacctgtacacccacagcgagtactacaaccacgccatcgactggcagacaggccctggctgcaacacagctggcttcttcaccgtgtttgccagcgagctgtctgtgtacaccctgaccgtcatcaccctggagcgctggtacgccatcacctttgccatgaggctggacaggaagatccggctgcggcatgcctgtgccatcatggtgggcggctgggtgtgctgcttcctgctggccctgctgcccctggtgggcatcagcagctatgccaaggtgtccatctgcctgcccatggacacagagacccccctggccctggcctacatcgtgtttgtgctgaccctgaacatcgtggcctttgtgattgtgtgctgctgctacgtgaagatctacatcaccgtgaggaacccccagtacaaccctggggacaaggacaccaagatcgccaagaggatggctgtgctgatcttcacagacttcatctgcatggcccccatctccttctacgccctgagcgccatcctgaacaagcccctcatcaccgtgagcaacagcaagatcctgctggtgctcttctaccccctgaacagctgtgccaaccccttcctgtatgccatcttcaccaaggccttccagagagatgtgttcatcctgctgagcaagtttggcatctgcaagaggcaggcccaggcctaccggggccagagggtgccccccaagaacagcacagacatccaggtgcagaaggtgacccatgagatgaggcagggcctgcacaacatggaggatgtgtatgagctgattgagaacagccacctgacccccaagaagcagggccagatcagcgaggagtacatgcagacagtgctgtag

SEQ ID NO: 173295 - DNA, 2295 bp, synthetic construct; identical to SEQ ID NO: 173292
  misc_feature 1..2295: note = Description of Artificial Sequence: Synthetic coding sequence
  source 1..2295: mol_type = other DNA

SEQ ID NO: 173296 - DNA, 825 bp, synthetic construct
  misc_feature 1..825: note = Description of Artificial Sequence: Synthetic coding sequence
  source 1..825: mol_type = other DNA
atgaggcctgctgacctgctgcagctggtgctgctgctggacctgccccgggacctgggcggcatgggctgcagcagccccccctgtgagtgccaccaggaggaggacttccgggtgacctgcaaggacatccagaggatccccagcctgccccccagcacccagaccctgaagctgattgagacccacctgcggaccatccccagccacgccttcagcaacctgcccaacatcagccgcatctacgtgtccattgatgtgaccctgcagcagctggagagccacagcttctacaacctgagcaaggtgacccacatcgagatccggaacaccaggaacctgacctacattgatcctgatgccctgaaggagctgcccctgctgaagttcctgggcatcttcaacacaggcctgaagatgtttcctgacctgaccaaggtgtacagcacagacatcttcttcatcctggagatcacagacaacccctacatgaccagcatccctgtgaatgccttccagggcctgtgcaatgagaccctgaccctgaagctgtacaacaacggcttcacctctgtgcagggctacgccttcaacggcaccaagctggatgctgtgtacctgaacaagaacaagtacctgaccgtcatcgacaaggatgcctttggaggagtgtacagcggccccagcctgctggtggagaatgtggccgtgtctgggaagggcttctgcaagagcctcttctcctggctgtaccgcctgcccctgggcaggaagagcctgagctttgagacccagaaggcccccaggagctccatgcccagctag

SEQ ID NO: 173297 - DNA, 912 bp, synthetic construct
  misc_feature 1..912: note = Description of Artificial Sequence: Synthetic coding sequence
  source 1..912: mol_type = other DNA
atgtctgatgctgggggcggcaagaagccccctgtggacccccaggccggccctggccctggccctggccgggccgccggggagcggggcctgagcggcagcttccccctggtgctgaagaagctgatggagaaccccccccgggaggcccggctggacaaggagaagggcaaggagaagctggaggaggatgaggccgccgccgccagcaccatggctgtgtctgccagcctgatgccacccatctgggacaagaccatcccctatgatggagagagcttccacctggagtacatggacctggatgagttcctgctggagaatggcatcccagccagccccacccacctggcccacaacctgctgctgcctgtggccgagctggagggcaaggagagcgccagcagcagcacagccagcccccccagcagcagcacagccatcttccagcccagcgagaccgtgagcagcacagagagcagcctggagaaggagcgggagacccccagccccatcgaccccaactgtgtggaggtggatgtgaacttcaacccagaccctgctgacctggtgctgagctctgtgcctggaggagagctgttcaaccccaggaagcacaagtttgctgaggaggacctgaagccccagcccatgatcaagaaggccaagaaggtgtttgtgcctgatgagcagaaggatgagaagtactggaccaggaggaagaagaacaacgtggccgccaagaggagcagagatgcccggcggctgaaggagaaccagatcaccatccgggccgccttcctggagaaggaaaatacagccctgaggacagaggtggccgagctgaggaaggaggtgggcaagtgcaagaccatcgtgtccaaatatgagaccaagtatggccccctgtag

SEQ ID NO: 173298 - DNA, 555 bp, synthetic construct
  misc_feature 1..555: note = Description of Artificial Sequence: Synthetic coding sequence
  source 1..555: mol_type = other DNA
tgattcatcttcctgccccggcccggcaccagcctgggccgcatcaggaaggctgacaaggagaagggcaaggagaagctggaggaggatgaggccgccgccgccagcaccatggctgtgtctgccagcctgatgccacccatctgggacaagaccatcccctatgatggagagagcttccacctggagtacatggacctggatgagttcctgctggagaatggcatcccagccagccccacccacctggcccacaacctgctgctgcctgtggccgagctggagggcaaggagagcgccagcagcagcacagccagcccccccagcagcagcacagccatcttccagcccagcgagaccgtgagcagcacagagagcagcctggagaaggagcgggagacccccagccccatcgaccccaactgtgtggaggtggatgtgaacttcaacccagaccctgctgacctggtgctgagctctgtgcctggaggagagctgttcaaccccaggaagcacaagtttgctgaggaggacctgaagccccagcccatgtag

SEQ ID NO: 173299 - DNA, 822 bp, synthetic construct
  misc_feature 1..822: note = Description of Artificial Sequence: Synthetic coding sequence
  source 1..822: mol_type = other DNA
atggacatgcctgaggtgctgaagagcctgctggagcacagcctgccctggccagagaagaggacagacaaggagaagggcaaggagaagctggaggaggatgaggccgccgccgccagcaccatggctgtgtctgccagcctgatgccacccatctgggacaagaccatcccctatgatggagagagcttccacctggagtacatggacctggatgagttcctgctggagaatggcatcccagccagccccacccacctggcccacaacctgctgctgcctgtggccgagctggagggcaaggagagcgccagcagcagcacagccagcccccccagcagcagcacagccatcttccagcccagcgagaccgtgagcagcacagagagcagcctggagaaggagcgggagacccccagccccatcgaccccaactgtgtggaggtggatgtgaacttcaacccagaccctgctgacctggtgctgagctctgtgcctggaggagagctgttcaaccccaggaagcacaagtttgctgaggaggacctgaagccccagcccatgatcaagaaggccaagaaggtgtttgtgcctgatgagcagaaggatgagaagtactggaccaggaggaagaagaacaacgtggccgccaagaggagcagagatgcccggcggctgaaggagaaccagatcaccatccgggccgccttcctggagaaggaaaatacagccctgaggacagaggtggccgagctgaggaaggaggtgggcaagtgcaagaccatcgtgtccaaatatgagaccaagtatggccccctgtag

SEQ ID NO: 173300 - DNA, 822 bp, synthetic construct; identical to SEQ ID NO: 173299
  misc_feature 1..822: note = Description of Artificial Sequence: Synthetic coding sequence
  source 1..822: mol_type = other DNA

SEQ ID NO: 173301 - DNA, 729 bp, synthetic construct
  misc_feature 1..729: note = Description of Artificial Sequence: Synthetic coding sequence
  source 1..729: mol_type = other DNA
atgcctggcccctggctgctgctggccctggccctgaccctgaacctgactggagtgcctgggggccgggcccagcctgaggccgcccagcaggaggccgtgacagctgctgagcaccctggcctggatgacttcctgcggcaggtggagcggctgctcttcctgcgggagaacatccagaggctgcagggcgaccagggcgagcacagcgccagccagatcttccagagcgactggctgagcaagaggcagcaccctgggaagcgggaggaggaggaggaggagggcgtggaggaggaggaggaggaggagggcggcgctgtgggcccccacaagaggcagcaccctggccggcgggaggatgaggcctcctggagcgtggatgtgacccagcacaagaggcagcaccctggaagaagaagcccctggctggcctatgctgtgcccaagaggcagcaccctggccggcggctggccgaccccaaggcccagaggtcctgggaggaggaggaggaggaggaggagcgggaggaggacctgatgcctgagaagaggcagcaccctgggaagagggccctgggcggcccctgtggcccccagggcgcctacggccaggccggcctgctgctgggcctgctggatgacctgagccgcagccagggcgctgaggagaagaggcagcaccctggaagaagagctgcctgggtgcgggagcccctggaggagtag

SEQ ID NO: 173302 - DNA, 3075 bp, synthetic construct
  misc_feature 1..3075: note = Description of Artificial Sequence: Synthetic coding sequence
  source 1..3075: mol_type = other DNA
atgggagaagatgatgctgccctgcgggccggcagccggggcctgagtgacccctgggccgacagcgtgggcgtgcggcccaggaccacagagcggcacatcgctgtgcacaagaggctggtgctggcctttgctgtgtccctggtggccctgctggccgtgaccatgctggccgtgctgctgagcctgcgctttgatgaatgtggggccagcgccaccccaggagcagatggcggccccagcggcttccctgagcggggcggcaatggcagcctgcccggcagcgcccggaggaaccaccacgccggcggggacagctggcagcctgaggccggcggcgtggccagccctggcaccaccagcgcccagccccccagcgaggaggagcgggagccctgggagccctggacccagctgcggctgagcggccacctgaagcccctgcactacaacctgatgctgacagccttcatggagaacttcaccttcagcggggaggtgaatgtggagatcgcctgcagaaatgccaccaggtatgtggtgctgcacgccagccgggtggccgtggagaaggtgcagctggccgaggaccgggccttcggggctgtgcctgtggccggcttcttcctgtacccccagacccaggtgctggtggtggtgctgaacagaaccctggatgcccagaggaactacaacctgaagatcatctacaatgccctgattgaaaatgagctgctgggcttcttccgcagcagctatgtgctgcacggggagcggcgcttcctgggcgtgacccagttcagccccacccacgccaggaaggccttcccctgctttgatgagcccatctacaaggccaccttcaagatcagcatcaagcaccaggccacctacctgagcctgagcaacatgcctgtggagacctctgtgtttgaagaagatggctgggtgacagaccacttcagccagacccccctgatgagcacctactacctggcctgggccatctgcaacttcacctaccgggagaccaccaccaagagcggcgtggtggtgcggctgtatgcccggccagatgccatccggcggggcagcggggactatgccctgcacatcaccaagaggctgattgagttctatgaggactacttcaaggtgccctacagcctgcccaagctggacctgctggccgtgcccaagcacccctatgctgccatggagaactggggcctgagcatctttgtggagcagaggatcctgctggaccccagcgtgagcagcatctcctacctgctggatgtgaccatggtgattgtgcatgagatctgccaccagtggtttggagacctggtgacccctgtgtggtgggaggatgtgtggctgaaggagggctttgcccactactttgaatttgtgggcacagactacctgtacccaggctggaacatggagaagcagcgcttcctgacagatgtgctgcacgaggtgatgctgctggatggcctggccagcagccaccctgtgtcccaggaggtgctgcaggccacagacatcgacagagtgtttgactggatcgcctacaagaagggagctgccctgatccgcatgctggccaacttcatgggccacagcgtcttccagaggggcctgcaggactacctgaccatccacaagtatggaaatgctgccagaaatgacctgtggaacaccctgtctgaggccctgaagagaaatggcaagtatgtgaacatccaggaggtgatggaccagtggaccctgcagatgggctaccctgtgatcaccatcctgggcaacaccacagcagaaaatcgcatcatcatcacccagcagcacttcatctatgacatcagcgccaagaccaaggccctgaagctgcagaacaacagctacctgtggcagatccccctgaccatcgtggtgggcaacagaagccacgtgtcctctgaggccatcatctgggtgagcaacaagtctgagcaccaccgcatcacctacctggacaagggctcctggctgctgggcaacatcaaccagacaggctacttccgggtgaactatgacctgaggaactggaggctgctgattgaccagctgatcagaaatcatgaggtgctgtctgtgagcaacagagctggcctgattgatgatgccttcagcctggcccgggccggctacctgccccagaacatccccctggagatcatccgctacctgtctgaggagaaggacttcctgccctggcacgccgccagccgggccctgtaccccctggacaagctgctggacaggatggagaactacaacatcttcaatgagtacatcctgaagcaggtggccaccacctacatcaagctgggctggcccaagaacaacttcaacggcagcctggtgcaggccagctaccagcacgaggagctgcggcgggaggtgatcatgctggcctgcagctttggaaacaagcactgccaccagcaggccagcaccctcatcagtgactggatcagcagcaacagaaaccgcatccccctgaatgtgcgggacatcgtgtactgcacaggagtgtccctgctggatgaagatgtgtgggagttcatctggatgaagttccacagcaccacagctgtgtctgagaagaagatcctgctggaggccctgacctgcagtgatgacaggaacctgctgaaccggctgctgaacctgagcctgaacagcgaggtggtgctggaccaggatgccattgatgtgatcatccacgtggccaggaacccccacggccgggacctggcctggaagttcttccgggacaagtggaagatcctgaacaccaggtatggagaggccctcttcatgaacagcaagctgatctctggagtgacagagttcctgaacacagaaggagagctgaaggagctgaagaacttcatgaagaactatgatggagtggccgccgccagcttcagcagagctgtggagaccgtggaggccaacgtgcgctggaagatgctgtaccaggatgagctgttccagtggctgggcaaggccctgcggcactag

SEQ ID NO: 173303 - DNA, 1197 bp, synthetic construct
  misc_feature 1..1197: note = Description of Artificial Sequence: Synthetic coding sequence
  source 1..1197: mol_type = other DNA
atggagaatgaaacagtgtctgagctgaaccagacccagctgcagcccagggctgtggtggccctggagtaccaggtggtgaccatcctgctggtgctgatcatctgtggcctgggcatcgtgggcaacatcatggtggtgctggtggtgatgaggaccaagcacatgaggacccccaccaactgctacctggtgtccctggccgtggccgacctgatggtgctggtggccgccggcctgcccaacatcacagacagcatctacggctcctgggtgtatggctacgtgggctgcctgtgcatcacctacctgcagtacctgggcatcaatgccagcagctgcagcatcacagccttcaccatcgagcgctacatcgccatctgccaccccatcaaggcccagttcctgtgcaccttcagccgggccaagaagatcatcatctttgtgtgggccttcaccagcctgtactgcatgctgtggttcttcctgctggacctgaacatcagcacctacaaggatgccatcgtcatcagctgtggctacaagatcagcaggaactactacagccccatctacctgatggactttggagtcttctacgtggtgcccatgatcctggccaccgtgctgtatggcttcatcgcccgcatcctcttcctgaaccccatccccagcgaccccaaggagaacagcaagacctggaagaatgacagcacccaccagaacaccaacctgaatgtgaacaccagcaaccgctgcttcaacagcacagtgagcagcaggaagcaggtgaccaagatgctggccgtggtggtgatcctgtttgccctgctgtggatgccctaccgcaccctggtggtggtgaacagcttcctgagcagccccttccaggagaactggttcctgctcttctgccgcatctgcatctacctgaacagcgccatcaaccctgtgatctacaacctgatgagccagaagttccgggccgccttcaggaagctgtgcaactgcaagcagaagcccacagagaagccagccaactacagcgtggccctgaactacagcgtcatcaaggagagtgaccacttcagcacagagctggatgacatcaccgtgacagacacctacctgagcgccaccaaggtgtcctttgatgacacctgcctggccagcgaggtgtccttcagccagagctag

SEQ ID NO: 173304 - DNA, 1197 bp, synthetic construct; identical to SEQ ID NO: 173303
  misc_feature 1..1197: note = Description of Artificial Sequence: Synthetic coding sequence
  source 1..1197: mol_type = other DNA

SEQ ID NO: 173305 - DNA, 1128 bp, synthetic construct
  misc_feature 1..1128: note = Description of Artificial Sequence: Synthetic coding sequence
  source 1..1128: mol_type = other DNA
atggaggatgagatgcccaagaccctgtatgtgggcaacctgagcagagatgtgacagaggccctgatcctgcagctgttcagccagatcggcccctgcaagaactgcaagatgatcatggacacagctggaaatgacccctactgctttgtggagttccacgagcacagacatgctgctgctgccctggccgccatgaatggaaggaagatcatgggcaaggaggtgaaggtgaactgggccaccacccccagcagccagaagaaggacaccagcaaccacttccacgtgtttgtgggggacctgagccctgagatcaccacagaggacatcaaggccgcctttgcccccttcggccgcatcagtgatgcccgggtggtgaaggacatggccaccgggaagagcaagggctacggctttgtgtccttcttcaacaagtgggatgctgaaaatgccatccagcagatgggcggccagtggctgggcggccggcagatccgcaccaactgggccaccaggaagcccccagcccccaagagcacctatgagagcaacaccaagcagctgtcctatgatgaggtggtgaaccagagcagccccagcaactgcaccgtgtactgcggcggcgtgaccagcggcctgacagagcagctgatgaggcagaccttcagccccttcggccagatcatggagatccgggtcttcccagacaagggctacagctttgtgcgcttcaacagccatgagagcgctgcccacgccatcgtgtctgtgaatggcaccaccatcgagggccacgtggtgaagtgctactggggcaaggagaccctggacatgatcaaccctgtgcagcagcagaaccagatcggctacccccagccctacggccagtggggccagtggtatggaaatgcccagcagatcggccagtacatgcccaacggctggcaggtgcctgcctacggcatgtatggccaggcctggaaccagcagggcttcaaccagacccagagcagcgccccctggatgggccccaactatggagtgcagcccccccagggccagaatggctccatgctgcccaaccagcccagcggctacagagtggccggctatgagacccagtag

SEQ ID NO: 173306 - DNA, 1161 bp, synthetic construct
  misc_feature 1..1161: note = Description of Artificial Sequence: Synthetic coding sequence
  source 1..1161: mol_type = other DNA
atggaggatgagatgcccaagaccctgtatgtgggcaacctgagcagagatgtgacagaggccctgatcctgcagctgttcagccagatcggcccctgcaagaactgcaagatgatcatggacacagctggaaatgacccctactgctttgtggagttccacgagcacagacatgctgctgctgccctggccgccatgaatggaaggaagatcatgggcaaggaggtgaaggtgaactgggccaccacccccagcagccagaagaaggacaccagcagcagcacagtggtgtccacccagaggagccaggaccacttccacgtgtttgtgggggacctgagccctgagatcaccacagaggacatcaaggccgcctttgcccccttcggccgcatcagtgatgcccgggtggtgaaggacatggccaccgggaagagcaagggctacggctttgtgtccttcttcaacaagtgggatgctgaaaatgccatccagcagatgggcggccagtggctgggcggccggcagatccgcaccaactgggccaccaggaagcccccagcccccaagagcacctatgagagcaacaccaagcagctgtcctatgatgaggtggtgaaccagagcagccccagcaactgcaccgtgtactgcggcggcgtgaccagcggcctgacagagcagctgatgaggcagaccttcagccccttcggccagatcatggagatccgggtcttcccagacaagggctacagctttgtgcgcttcaacagccatgaatctgctgcccacgccatcgtgtctgtgaatggcaccaccatcgagggccacgtggtgaagtgctactggggcaaggagaccctggacatgatcaaccctgtgcagcagcagaaccagatcggctacccccagccctacggccagtggggccagtggtatggaaatgcccagcagatcggccagtacatgcccaacggctggcaggtgcctgcctacggcatgtatggccaggcctggaaccagcagggcttcaaccagacccagagcagcgccccctggatgggccccaactacggcgtgcagcccccccagggccagaatggctccatgctgcccaaccagcccagcggctacagagtggccggctatgagacccagtag

SEQ ID NO: 173307 - DNA, 1392 bp, synthetic construct
  misc_feature 1..1392: note = Description of Artificial Sequence: Synthetic coding sequence
  source 1..1392: mol_type = other DNA
cccctggtgtcccgggagacccccctgagctgcagccacaaccggctgaatgacctgggcggcagcgagggccagggcgccggccctggaggagctgctgccacagctgctgccatggaggatgagatgcccaagaccctgtatgtgggcaacctgagcagagatgtgacagaggccctgatcctgcagctgttcagccagatcggcccctgcaagaactgcaagatgatcatggacacagctggaaatgacccctactgctttgtggagttccacgagcacagacatgctgctgctgccctggccgccatgaatggaaggaagatcatgggcaaggaggtgaaggtgaactgggccaccacccccagcagccagaagaaggacaccagcagcagcacagtggtgtccacccagaggagccaggaccacttccacgtgtttgtgggggacctgagccctgagatcaccacagaggacatcaaggccgcctttgcccccttcggccgcatcagtgatgcccgggtggtgaaggacatggccaccgggaagagcaagggctacggctttgtgtccttcttcaacaagtgggatgctgaaaatgccatccagcagatgggcggccagtggctgggcggccggcagatccgcaccaactgggccaccaggaagcccccagcccccaagagcacctatgagtgccgctgcatcggggaggagaaggagatgtggaactttggagagaagtatgcccgcttctgcagccggcggctgattgctgagattgatgagaagcagatcaagaccaccatccagaagagcaacaccaagcagctgtcctatgatgaggtggtgaaccagagcagccccagcaactgcaccgtgtactgcggcggcgtgaccagcggcctgacagagcagctgatgaggcagaccttcagccccttcggccagatcatggagatccgggtcttcccagacaagggctacagctttgtgcgcttcaacagccatgaatctgctgcccacgccatcgtgtctgtgaatggcaccaccatcgagggccacgtggtgaagtgctactggggcaaggagaccctggacatgatcaaccctgtgcagcagaaccagatcggctacccccagccctacggccagtggggccagtggtatggaaatgcccagcagatcggccagtacatgcccaacggctggcaggtgcctgcctacggcatgtatggccaggcctggaaccagcagggcttcaaccagacccagagcagcgccccctggatgggccccaactatggagtgcagcccccccagggccagaatggctccatgctgcccaaccagcccagcggctacagagtggccggctatgagacccagtag

SEQ ID NO: 173308 - DNA, 258 bp, synthetic construct
  misc_feature 1..258: note = Description of Artificial Sequence: Synthetic coding sequence
  source 1..258: mol_type = other DNA
atgatcacagagcacaccagcaatgacccctactgctttgtggagttctatgagcacagagatgctgctgctgccctggccgccatgaatggaaggaagatcctgggcaaggaggtgaaggtgaactgggccaccacccccagcagccagaagaaggacaccagcaaccacttccacgtgtttgtgggggacctgagccctgagatcaccacagaggacatcaagagcgcctttgccccctttgggaagatctcctag

SEQ ID NO: 173309 - DNA, 759 bp, synthetic construct
  misc_feature 1..759: note = Description of Artificial Sequence: Synthetic coding sequence
  source 1..759: mol_type = other DNA
atggatgcccgggtggtgaaggacatggccaccgggaagagcaagggctacggctttgtgtccttctacaacaagctggatgctgaaaatgccatcgtgcacatgggcggccagtggctgggcggccggcagatccgcaccaactgggccaccaggaagcccccagcccccaagagcacccaggagaacaacaccaagcagctgcgctttgaagatgtggtgaaccagagcagccccaagaactgcaccgtgtactgcggcggcatcgccagcggcctgacagaccagctgatgaggcagaccttcagccccttcggccagatcatggagatccgggtcttccctgagaagggctacagctttgtgcgcttcagcacccatgaatctgctgcccacgccatcgtgtctgtgaatggcaccaccatcgagggccacgtggtgaagtgctactggggcaaggagagcccagacatgaccaagaacttccagcaggtggactacagccagtggggccagtggagccaggtgtatggcaacccccagcagtatggccagtacatggccaacggctggcaggtgcccccctacggcgtgtatggccagccctggaaccagcagggcttcggcgtggaccagagccccagcgctgcctggatgggcggctttggagcccagcccccccagggccaggcccctcctcctgtgattcctccacccaaccaggccggctacggcatggccagctaccagacccagtag

SEQ ID NO: 173310 - DNA, 1179 bp, synthetic construct
  misc_feature 1..1179: note = Description of Artificial Sequence: Synthetic coding sequence
  source 1..1179: mol_type = other DNA
atgatggaggatgatggccagcccaggaccctgtatgtgggcaacctgagcagagatgtgacagaggtgctgatcctgcagctgttcagccagatcggcccctgcaagagctgcaagatgatcacagagcagcctgacagccggcgggtgaacagctctgtgggcttctctgtgctgcagcacaccagcaatgacccctactgctttgtggagttctatgagcacagagatgctgctgctgccctggccgccatgaatggaaggaagatcctgggcaaggaggtgaaggtgaactgggccaccacccccagcagccagaagaaggacaccagcaaccacttccacgtgtttgtgggggacctgagccctgagatcaccacagaggacatcaagagcgcctttgccccctttgggaagatcagtgatgcccgggtggtgaaggacatggccaccgggaagagcaagggctacggctttgtgtccttctacaacaagctggatgctgaaaatgccatcgtgcacatgggcggccagtggctgggcggccggcagatccgcaccaactgggccaccaggaagcccccagcccccaagagcacccaggagaacaacaccaagcagctgcgctttgaagatgtggtgaaccagagcagccccaagaactgcaccgtgtactgcggcggcatcgccagcggcctgacagaccagctgatgaggcagaccttcagccccttcggccagatcatggagatccgggtcttccctgagaagggctacagctttgtgcgcttcagcacccatgaatctgctgcccacgccatcgtgtctgtgaatggcaccaccatcgagggccacgtggtgaagtgctactggggcaaggagagcccagacatgaccaagaacttccagcaggtggactacagccagtggggccagtggagccaggtgtatggcaacccccagcagtatggccagtacatggccaacggctggcaggtgcccccctacggcgtgtatggccagccctggaaccagcagggcttcggcgtggaccagagccccagcgctgcctggatgggcggctttggagcccagcccccccagggccaggcccctcctcctgtgattcctccacccaaccaggccggctacggcatggccagctaccagacccagtag

SEQ ID NO: 173311 - DNA, 399 bp, synthetic construct
  misc_feature 1..399: note = Description of Artificial Sequence: Synthetic coding sequence
  source 1..399: mol_type = other DNA
atgatcacagagcacaccagcaatgacccctactgctttgtggagttctatgagcacagagatgctgctgctgccctggccgccatgaatggaaggaagatcctgggcaaggaggtgaaggtgaactgggccaccacccccagcagccagaagaaggacaccagcaaccacttccacgtgtttgtgggggacctgagccctgagatcaccacagaggacatcaagagcgcctttgccccctttgggaagatcagtgatgcccgggtggtgaaggacatggccaccgggaagagcaagggctacggctttgtgtccttctacaacaagctggatgctgaaaatgccatcgtgcacatgggcggccagtggctgggcggccggcagatccgcaccaactag

SEQ ID NO: 173312 - DNA, 1128 bp, synthetic construct
  misc_feature 1..1128: note = Description of Artificial Sequence: Synthetic coding sequence
  source 1..1128: mol_type = other DNA
atgatggaggatgatggccagcccaggaccctgtatgtgggcaacctgagcagagatgtgacagaggtgctgatcctgcagctgttcagccagatcggcccctgcaagagctgcaagatgatcacagagcacaccagcaatgacccctactgctttgtggagttctatgagcacagagatgctgctgctgccctggccgccatgaatggaaggaagatcctgggcaaggaggtgaaggtgaactgggccaccacccccagcagccagaagaaggacaccagcaaccacttccacgtgtttgtgggggacctgagccctgagatcaccacagaggacatcaagagcgcctttgccccctttgggaagatcagtgatgcccgggtggtgaaggacatggccaccgggaagagcaagggctacggctttgtgtccttctacaacaagctggatgctgaaaatgccatcgtgcacatgggcggccagtggctgggcggccggcagatccgcaccaactgggccaccaggaagcccccagcccccaagagcacccaggagaacaacaccaagcagctgcgctttgaagatgtggtgaaccagagcagccccaagaactgcaccgtgtactgcggcggcatcgccagcggcctgacagaccagctgatgaggcagaccttcagccccttcggccagatcatggagatccgggtcttccctgagaagggctacagctttgtgcgcttcagcacccatgagagcgctgcccacgccatcgtgtctgtgaatggcaccaccatcgagggccacgtggtgaagtgctactggggcaaggagagcccagacatgaccaagaacttccagcaggtggactacagccagtggggccagtggagccaggtgtatggcaacccccagcagtatggccagtacatggccaacggctggcaggtgcccccctatggagtgtatggccagccctggaaccagcagggctttggagtggaccagagccccagcgctgcctggatgggcggctttggagcccagcccccccagggccaggcccctcctcctgtgatccccccacccaaccaggccggctacggcatggccagctaccagacccagtag

SEQ ID NO: 173313 - DNA, 1776 bp, synthetic construct
  misc_feature 1..1776: note = Description of Artificial Sequence: Synthetic coding sequence
  source 1..1776: mol_type = other DNA
atggccagcaagtgcagcagcgagaggaagagcaggaccagcctgaccctgaaccagaagctggagatgatcaagctgtctgaggagggcatgagcaaggccgagatcggccggcggctgggcctgctgcggcagacagtgtcccaggtggtgaatgccaaggagaagttcctgaaggaggtgaagagcgccacccccatgaacaccaggatgatcaggaagaggaacagcctgattgctgacatggagaaggtgctggtggtgtggattgaggaccagaccagcaggaacatccccctgagccagagcctcatccagaacaaggccctgaccctcttcaacagcatgaaggccgagcggggcgtggaggccgctgaggagaagtttgaggccagccggggctggttcatgaggttcaaggagaggagccacttccacaacatcaaggcccagggcgaggccgccagcgcagatgtggaggccgccgccagctacccagaggccctggccaagatcattgatgagggcggctacaccaagcagcagatcttcaacgtggatgaaacagccttctactggaagaagatgcccagcaggaccttcatcgcccgggaggagaagtctgtgcccggcttcaaggccagcaaggaccggctgaccctgctgctgggcgccaatgctgctggggacttcaagctgaagcccatgctgatctaccacagcgagaacccccgggccctgaagaactacaccaagagcaccctgcctgtgctgtacaagtggaacagcaaggccaggatgacagcccacctgttcaccgcctggttcacagagtacttcaagcccaccgtggagacctactgcagcgagaagaagatccccttcaagatcctgctgctgattgacaatgcccccagccacccccgggccctgatggagatctatgaggagatcaacgtcatcttcatgcctgccaacaccaccagcatcctgcagcccatggaccagggcgtcatcagcaccttcaagagctactacctgaggaacaccttccacaaggccctggccgccatggacagtgatgtgtctgatggcagcggccagagcaagctgaagaccttctggaagggcttcaccatcctggatgccatcaagaacatccgggacagctgggaggaggtgaagctgagcaccctgactggagtgtggaagaagctgatccccaccctgattgatgattatgagggcttcaagacctctgtggaggaggtgtctgcagatgtggtggagatcgccaaggagctggagctggaggtggagccagaagatgtgacagagctgctgcagagccatgacaagaccctgacagatgaggagctgttcctgatggatgcccagaggaagtggttcctggagatggagagcaccccaggagaagatgctgtgaacatcgtggagatgaccaccaaggacctggagtactacatcaacctggtggacaaggctgctgctggctttgaaagaattgacagcaactttgagaggagcagcacagtgggcaagatgctgagcaacagcatcgcctgctaccgggagatcttccacgagaggaagagccagctgatgaggaaggccagccccatgagctacttcaggaagctgccccagcccccccagcccagcgctgccaccaccctgaccagccagcagcccagcaccagccggcaggaccccccaccagccaagagggtgcggctgacagagggcagtgactag

SEQ ID NO: 173314 - DNA, 1578 bp, synthetic construct
  misc_feature 1..1578: note = Description of Artificial Sequence: Synthetic coding sequence
  source 1..1578: mol_type = other DNA
atgctgggcaagaggaagagggtggtgctgaccatcaaggacaagctggacatcatcaagaagctggaggagggcatctccttcaagaagctgtctgtggtgtatggaattggagagagcacagtgcgggacatcaagaagaacaaggagcgcatcatcaactatgccaacagcagtgaccccaccagcggcgtgtccaagaggaagtccatgaagagcagcacctatgaggagctggacagagtgatgattgagtggttcaaccagcagaagacagatggcatccctgtgtctggcaccatctgtgccaagcaggccaagttcttctttgatgccctgggcatggagggggacttcaatgccagcagcggctggctgacccgcttcaagcagagacatggcatccccaaggctgctgggaagggcaccaagctgaagggagatgaaacagctgcccgggagttctgtggcagcttccaggagtttgtggagaaggagaacctgcagcctgagcagatctacggggctgaccagacaggcctcttctggaagtgcctgcccagcaggaccctgaccctggagacagaccagagcaccagcggctgccgcagcagccgggagcgcatcatcatcatgtgctgtgccaatgccaccggcctgcacaagctgaacctgtgtgtggtgggcaaggccaagaagccccgggccttcaagggcacagacctgagcaacctgcctgtgacctactacagccagaagggggcctggattgagcagagcgtcttccggcagtggtttgagaagtactttgtgccccaggtgcagaagcacctgaagagcaagggcctgctggagaaggctgtgctgctgctggacttccccccagcccggcccaatgaggagatgctgagcagtgatgatggccgcatcatcgtgaagtacctgccccccaacgtgaccagcctcatccagcccatgagccagggcgtgctggccaccgtgaagcgctactaccgggccggcctgctgcagaagtacatggatgagggcaatgaccccaagatcttctggaagaacctgactgtgctggatgccatctatgaggtgtcccgggcctggaacatggtgaagagcagcaccatcaccaaggcctggaagaagctgtttcctggaaatgaggagaacagcggcatgaacattgatgaaggagccatcctggccgccaacctggccaccgtgctgcagaacacagaagaatgtgagcacgtggacatcgagaacatcgaccagtggtttgacagccgcagcagtgacagcagctgccaggtgctgacagattctgagagcgctgaggaccagaccaaggctgctgagcagaagcccagcagcaagagcaggaagacagagctgaaccctgagaagcacatcagccacaaggccgccctggagtggacagagaacctgctggactacctggagcagcaggatgacatgctgctgagtgacaagctggtgctgcggcggctgcggaccatcatcaggaagaagcagaagatccagaacaacaagaaccactag

SEQ ID NO: 173315 - DNA, 1650 bp, synthetic construct
  misc_feature 1..1650: note = Description of Artificial Sequence: Synthetic coding sequence
  source 1..1650: mol_type = other DNA
atgaacaagaggggcaagtacaccaccctgaacctggaggagaagatgaaggtgctgagccgcatcgaggccggccgcagcctgaagtctgtgatggatgaatttggcatcagcaagagcaccttctatgacatcaagaagaacaagaagctgatcctggactttgtgctgaagcaggacatgcccctggtgggcgctgagaagaggaagaggaccactggagccaagtatggagatgtggatgatgctgtgtacatgtggtaccagcagaagaggtctgctggggtgcctgtgcggggcgtggagctgcaggccgctgctgagagatttgcccgctgcttcggccgcacagacttcaaggccagcacaggctggctgttccgcttcaggaacagacatgccatcggcaacaggaagggctgtggggagcaggtgctgagctctgtgtctgaaaatgtggagcccttccggcagaagctgtccatgatcatcaaggaggagaagctgtgcctggcccagctgtacagcggagatgaaacagacctcttctggaagtccatgcctgagaacagccaggccagcaggaaggacatctgcctgcccgggaagaagatcaacaaggagcggctgagcgccttcctgtgtgccaatgctgatggcacccacaagctgaagagcatcatcatcggcaagagcaagctgcccaagtctgtgaaggaggacaccagcaccctgcccgtcatctacaagcccagcaaggatgtgtggttcacccgggagctgttcagcgagtggttcttccagaactttgtgcctgaggtgcgccacttccagctgaatgtgctgcgcttccatgatgaagatgtgcgggccctgctgctgctggacagctgcccagcccaccccagcagcgagagcctgaccagtgaagatggccgcatcaagtgcatgttcttcccccacaacaccagcaccctcatccagcccatgaaccagggcgtcatcctgagctgcaagaggctgtaccgctggaagcagctggaggagagcctggtgatctttgaggagagtgatgatgagcaggagaagggggacaagggcgtgtccaagatcaagatctacaacatcaagagcgccatcttcaactgggccaagtcctgggaggaggtgaagcagatcaccatcgccaatgcctgggagaacctgctgtacaagaaggagccagaatatgacttccagggcctggagcacggggactaccgggagatcctggagaagtgtggggagctggagaccaagctggatgatgacagagtgtggctgaatggagatgaggagaagggctgcctgctgaagaccaagggcggcatcaccaaggaggtggtgcagaagggcggggaggccgagaagcagacagctgagttcaagctgtctgctgtgcgggagagcctggactacctgctggactttgtggatgccaccccagagttccagcgcttccacttcaccctgaaggagatgcagcaggagatcgtgaagaagcagttccagagcaagatccacagccgcatcggcagcttcctgaagccccggccccacaacatcaaggacagcttcagcggccccagcaccagcggcagcaaccactag

SEQ ID NO: 173316 - DNA, 1650 bp, synthetic construct; identical to SEQ ID NO: 173315
  misc_feature 1..1650: note = Description of Artificial Sequence: Synthetic coding sequence
  source 1..1650: mol_type = other DNA

SEQ ID NO: 173317 - DNA, 1536 bp, synthetic construct
  misc_feature 1..1536: note = Description of Artificial Sequence: Synthetic coding sequence
  source 1..1536: mol_type = other DNA
atgaacaagaggggcaagtacaccaccctgaacctggaggagaagatgaaggtgctgagccgcatcgaggccggccgcagcctgaagtctgtgatggatgaatttggcatcagcaagagcaccttctatgacatcaagaagaacaagaagctgatcctggactttgtgctgaagcaggacatgcccctggtgggcgctgagaagaggaagaggaccactggagccaagtatggagatgtggatgatgctgtgtacatgtggtaccagcagaagaggtctgctggggtgcctgtgcggggcgtggagctgcaggccgctgctgagagatttgcccgctgcttcggccgcacagacttcaaggccagcacaggctggctgttccgcttcaggaacagacatgccatcggcaacaggaagggctgtggggagcaggtgctgagctctgtgtctgaaaatgtggagcccttccggcagaagctgtccatgatcatcaaggaggagaagctgtgcctggcccagctgtacagcggagatgaaacagacctcttctggaagtccatgcctgagaacagccaggccagcaggaaggacatctgcctgcccgggaagaagatcaacaaggagcggctgagcgccttcctgtgtgccaatgctgatggcacccacaagctgaagagcatcatcatcggcaagagcaagctgcccaagtctgtgaaggaggacaccagcaccctgcccgtcatctacaagcccagcaaggatgtgtggttcacccgggagctgttcagcgagtggttcttccagaactttgtgcctgaggtgcgccacttccagctgaatgtgctgcgcttccatgatgaagatgtgcgggccctgctgctgctggacagctgcccagcccaccccagcagcgagagcctgaccagtgaagatggccgcatcaagtgcatgttcttcccccacaacaccagcaccctcatccagcccatgaaccagggcgtcatcctgagctgcaagaggctgtaccgctggaagcagctggaggagagcctggtgatctttgaggagagtgatgatgagcaggagaagggggacaagggcgtgtccaagatcaagatctacaacatcaagagcgccatcttcaactgggccaagtcctgggaggaggtgaagcagatcaccatcgccaatgcctgggagaacctgctgtacaagaaggagccagaatatgacttccagggcctggagcacggggactaccgggagatcctggagaagtgtggggagctggagaccaagctggatgatgacagagtgtggctgaatggagatgaggagaagggctgcctgctgaagaccaagggcggcatcaccaaggaggtggtgcagaagggcggggaggccgagaagcagacagctgagttcaagctgtctgctgtgcgggagagcctggactacctgctggactttgtggatgccaccccagagttccagcgcttccacttcaccctgtgtgagttcagtgatgacagctag

SEQ ID NO: 173318 - DNA, 1644 bp, synthetic construct
  misc_feature 1..1644: note = Description of Artificial Sequence: Synthetic coding sequence
  source 1..1644: mol_type = other DNA
atgaccagcgctgccccagccaagaagccctacaggaaggcccctcctgagcaccgggagctgcggctggagatccctggcagccggctggagcaggaggagcccctgacagatgctgagaggatgaagctgctgcaggaggagaatgaggagctgcggcggcggctggccagcgccaccaggagaacagaggccctggagcgggagctggagatcggccaggactgcctggagctggagctgggccagagccgggaggagctggacaagttcaaggacaagttccggcggctgcagaacagctacacagccagccagaggaccaaccaggagctggaggacaagctgcacaccctcatcaagaaggccgagatggacaggaagaccctggactgggagatcgtggagctgaccaacaagctgctggatgccaagaacaccatcaacaagctggaggagctgaatgaaagataccgcctggactgcaacctggccgtgcagctgctgaagtgcaacaagagccacttcaggaaccacaagtttgctgacctgccctgtgagctgcaggacatggtgaggaagcacctgcacagcggccaggaggccgccagccctggccctgcccccagcctggcccctggagctgtggtgcccaccagcgtcatcgcccgggtgctggagaagccagagagcctgctgctgaacagcgcccagagcggcagcgctggccggcccctggccgaggatgtgtttgtgcacgtggacatgtctgaaggagtgcctggggaccctgccagccccccagcccctggcagccccaccccccagcccaacggggagtgccacagcctgggcacagcccggggcagccctgaggaggagctgcccctgcctgcctttgagaagctgaacccctaccccacccccagccccccccaccccctgtacccaggaagaagagtcatcgagttcagcgaggacaaggtgcgcatccccaggaacagccccctgcccaactgcacctacgccacccggcaggccatcagcctgagcctggtggaggagggcagcgagcgggcccggcccagccctgtgcccagcaccccagccagcgcccaggccagcccccaccaccagcccagccctgcccccctgaccctgagcgccccagccagcagcgccagcagcgaggaggacctgctggtgtcctggcagagggcctttgtggacaggaccccacctcctgctgctgtggcccagaggacagccttcggcagagatgccctgcctgagctgcagaggcactttgcccacagccctgctgacagagatgaggtggtgcaggcccccagcgcccggcctgaggagagcgagctgctgctgcccacagagccagattctggcttcccccgggaggaggaggagctgaacctgcccatcagccctgaggaggagcggcagagcctgctgcccatcaacagaggaacagaggagggccctggcaccagccacacagagggccgggcctggcccctgcccagcagcagccggccccagaggagccccaagaggatgggcgtgcaccacctgcacaggaaggacagcctgacccaggcccaggagcagggcaacctgctgaactag

SEQ ID NO: 173319 - DNA, 1644 bp, synthetic construct; identical to SEQ ID NO: 173318
  misc_feature 1..1644: note = Description of Artificial Sequence: Synthetic coding sequence
  source 1..1644: mol_type = other DNA

SEQ ID NO: 173320 - DNA, 1674 bp, synthetic construct
  misc_feature 1..1674: note = Description of Artificial Sequence: Synthetic coding sequence
  source 1..1674: mol_type = other DNA
atgaccagcgctgccccagccaagaagccctacaggaaggcccctcctgagcaccgggagctgcggctggagatccctggcagccggctggagcaggaggagcccctgacagatgctgagaggatgaagctgctgcaggaggagaatgaggagctgcggcggcggctggccagcgccaccaggagaacagaggccctggagcgggagctggagatcggccaggactgcctggagctggagctgggccagagccgggaggagctggacaagttcaaggacaagttccggcggctgcagaacagctacacagccagccagaggaccaaccaggagctggaggacaagctgcacaccctggccagcctgagccacagctggatctttgccatcaagaaggccgagatggacaggaagaccctggactgggagatcgtggagctgaccaacaagctgctggatgccaagaacaccatcaacaagctggaggagctgaatgaaagataccgcctggactgcaacctggccgtgcagctgctgaagtgcaacaagagccacttcaggaaccacaagtttgctgacctgccctgtgagctgcaggacatggtgaggaagcacctgcacagcggccaggaggccgccagccctggccctgcccccagcctggcccctggagctgtggtgcccaccagcgtcatcgcccgggtgctggagaagccagagagcctgctgctgaacagcgcccagagcggcagcgctggccggcccctggccgaggatgtgtttgtgcacgtggacatgtctgaaggagtgcctggggaccctgccagccccccagcccctggcagccccaccccccagcccaacggggagtgccacagcctgggcacagcccggggcagccctgaggaggagctgcccctgcctgcctttgagaagctgaacccctaccccacccccagccccccccaccccctgtacccaggaagaagagtcatcgagttcagcgaggacaaggtgcgcatccccaggaacagccccctgcccaactgcacctacgccacccggcaggccatcagcctgagcctggtggaggagggcagcgagcgggcccggcccagccctgtgcccagcaccccagccagcgcccaggccagcccccaccaccagcccagccctgcccccctgaccctgagcgccccagccagcagcgccagcagcgaggaggacctgctggtgtcctggcagagggcctttgtggacaggaccccacctcctgctgctgtggcccagaggacagccttcggcagagatgccctgcctgagctgcagaggcactttgcccacagccctgctgacagagatgaggtggtgcaggcccccagcgcccggcctgaggagagcgagctgctgctgcccacagagccagattctggcttcccccgggaggaggaggagctgaacctgcccatcagccctgaggaggagcggcagagcctgctgcccatcaacagaggaacagaggagggccctggcaccagccacacagagggccgggcctggcccctgcccagcagcagccggccccagaggagccccaagaggatgggcgtgcaccacctgcacaggaaggacagcctgacccaggcccaggagcagggcaacctgctgaactag

SEQ ID NO: 173321 - DNA, 1674 bp, synthetic construct; identical to SEQ ID NO: 173320
  misc_feature 1..1674: note = Description of Artificial Sequence: Synthetic coding sequence
  source 1..1674: mol_type = other DNA

SEQ ID NO: 173322 - DNA, 1644 bp, synthetic construct; identical to SEQ ID NO: 173318
  misc_feature 1..1644: note = Description of Artificial Sequence: Synthetic coding sequence
  source 1..1644: mol_type = other DNA

SEQ ID NO: 173323 - DNA, 1644 bp, synthetic construct; identical to SEQ ID NO: 173318
  misc_feature 1..1644: note = Description of Artificial Sequence: Synthetic coding sequence
  source 1..1644: mol_type = other DNA

SEQ ID NO: 173324 - DNA, 1644 bp, synthetic construct; identical to SEQ ID NO: 173318
  misc_feature 1..1644: note = Description of Artificial Sequence: Synthetic coding sequence
  source 1..1644: mol_type = other DNA

SEQ ID NO: 173325 - DNA, 1674 bp, synthetic construct; identical to SEQ ID NO: 173320
  misc_feature 1..1674: note = Description of Artificial Sequence: Synthetic coding sequence
  source 1..1674: mol_type = other DNA

SEQ ID NO: 173326 - DNA, 582 bp, synthetic construct
  misc_feature 1..582: note = Description of Artificial Sequence: Synthetic coding sequence
  source 1..582: mol_type = other DNA
atgaccagcgctgccccagccaagaagccctacaggaaggcccctcctgagcaccgggagctgcggctggagatccctggcagccggctggagcaggaggagcccctgacagatgctgagaggatgaagctgctgcaggaggagaatgaggagctgcggcggcggctggccagcgccaccaggagaacagaggccctggagcgggagctggagatcggccaggactgcctggagctggagctgggccagagccgggaggagctggacaagttcaaggacaagttccggcggctgcagaacagctacacagccagccagaggaccaaccaggagctggaggacaagctgcacaccctggccagcctgagccacagctggatctttgccatcaagaaggccgagatggacaggaagaccctggactgggagatcgtggagctgaccaacaagctgctggatgccaagaacaccatcaacaagctggaggagctgaatgaaagataccgcctggactgcaacctggccgtgcagctgctgaagtgcaacaagagccacttcaggaaccacaagtttgctgactag

SEQ ID NO: 173327 - DNA, 720 bp, synthetic construct
  misc_feature 1..720: note = Description of Artificial Sequence: Synthetic coding sequence
  source 1..720: mol_type = other DNA
tgactgctgcaggaggagaatgaggagctgcggcggcggctggccagcgccaccaggagaacagaggccctggagcgggagctggagatcggccaggactgcctggagctggagctgggccagagccgggaggagctggacaagttcaaggacaagttccggcggctgcagaacagctacacagccagccagaggaccaaccaggagctggaggacaagctgcacaccctcatcaagaaggccgagatggacaggaagaccctggactgggagatcgtggagctgaccaacaagctgctggatgccaagaacaccatcaacaagctggaggagctgaatgaaagataccgcctggactgcaacctggccgtgcagctgctgaagtgcaacaagagccacttcaggaaccacaagtttgctgatgtgtccaggacccaccccctgcctgcccacatcgaccacagcggccactgcaggacccccctgacccctgtgtctgcccccctgtctgtgctgctcttccccctgtgcccccccctggcctccatgagccccctgaagcctgtgaacagcgccaccggctggtgccctgtgtactgccccggccccatcaccagcagcggcggccctgccctgctggtgtctgtgacagaaacagagcgggaggaccccggccaggagggggagggcagccagagctacctgcccaaggagtactag

SEQ ID NO: 173328 - DNA, 5247 bp, synthetic construct
  misc_feature 1..5247: note = Description of Artificial Sequence: Synthetic coding sequence
  source 1..5247: mol_type = other DNA
atgtctgcccgggctgctgctgccaagagcacagccatggaggagacagccatctgggagcagcacacagtgaccctgcaccgggcccctggcttcggcttcggcatcgccatcagcggcggccgggacaacccccacttccagagcggggagaccagcatcgtcatcagtgatgtgctgaagggcggccctgctgagggccagctgcaggagaatgacagagtggccatggtgaatggagtgtccatggacaacgtggagcacgcctttgctgtgcagcagctgaggaagagcggcaagaatgccaagatcaccatccggaggaagaagaaggtgcagatccctgtgtccaggccagaccctgagcctgtgtctgacaatgaagaagattcctatgatgaggagatccatgaccccaggagcggccgcagcggcgtggtgaacagaagaagtgagaagatctggccccgggacagaagtgccagccgggagaggagcctgagccccaggagtgacagaagatctgtggccagcagccagcctgccaagcccaccaaggtgaccctggtgaagagcaggaagaatgaggagtatggcctgcggctggccagccacatctttgtgaaggagatcagccaggacagcctggccgccagagatggcaacatccaggagggagatgtggtgctgaagatcaatggaacagtgacagagaacatgagcctgacagatgccaagaccctgattgaaagaagcaagggcaagctgaagatggtggtgcagagagatgagcgggccaccctgctgaatgtgcctgacctgagtgacagcatccacagcgccaatgccagcgagagagatgacatcagcgagatccagagcctggccagtgaccacagcggccgcagccatgaccggcccccaagaagaagccgcagccgcagcccagaccagaggtctgagcccagcgaccacagccgccacagcccccagcagcccagcaatggcagcctgcggagcagagatgaggagcgcatcagcaagccaggagctgtgtccacccctgtgaagcatgctgatgaccacacccccaagacagtggaggaggtgacagtggagagaaatgagaagcagacccccagcctgcctgagcccaagcctgtgtatgcccaggtgggccagccagatgtggacctgcctgtgagccccagtgatggagtgctgcccaacagcacccatgaagatggcatcctgcggcccagcatgaagctggtgaagttcagaaaaggagacagcgtgggcctgcggctggccggcggcaatgatgtgggcatctttgtggccggcgtgctggaggacagccctgctgccaaggagggcctggaggagggggaccagatcctgcgggtgaacaacgtggacttcaccaacatcatccgggaggaggccgtgctcttcctgctggacctgcccaagggggaggaggtgaccatcctggcccagaagaagaaggatgtgtaccgccgcatcgtggagagtgatgtgggggacagcttctacatccgcacccactttgaatatgagaaggagagcccctacggcctgtccttcaacaagggggaggtgttccgggtggtggacaccctgtacaacgggaagctgggctcctggctggccatccgcatcggcaagaaccacaaggaggtggagcggggcatcatccccaacaagaacagagctgagcagctggcctctgtgcagtacaccctgcccaagacagctggaggagacagagctgacttctggaggttccggggcctgcggagcagcaagaggaacctgaggaagagccgggaggacctgagcgcccagcctgtgcagaccaagtttcctgcctatgagcgggtggtgctgcgggaggccggcttcctgcggcctgtgaccatcttcggccccatcgcagatgtggcccgggagaagctggcccgggaggagccagacatctaccagatcgccaagtctgagcccagagatgctggaacagaccagaggagcagcggcatcatccggctgcacaccatcaagcagatcatcgaccaggacaagcacgccctgctggatgtgaccccaaatgctgtggaccggctgaactatgcccagtggtaccccatcgtggtgttcctgaacccagacagcaagcagggcgtgaagaccatgaggatgaggctgtgcccagagagcaggaagagcgccaggaagctgtatgaaagaagccacaagctgaggaagaacaaccaccacctgttcaccaccaccatcaacctgaacagcatgaatgatggctggtatggagccctgaaggaggccatccagcagcagcagaaccagctggtgtgggtgtctgagggcaaggcagatggagccaccagtgatgacctggacctgcatgatgaccggctgagctacctgagcgcccctggcagcgagtacagcatgtacagcacagacagccgccacaccagtgactatgaggacacagacacagagggcggggcctacacagaccaggagctggatgagaccctgaatgatgaggtgggcaccccacctgagagcgccatcaccaggagcagcgagcctgtgcgggaggacagcagcggcatgcaccacgagaaccagacctacccaccctacagcccccaggcccagccccagcccatccacagaattgacagccctggcttcaagccagccagccagcagaaggccgaggccagcagccctgtgccctacctgagccctgagaccaacccagccagcagcaccagcgctgtgaaccacaacgtgaacctgaccaacgtgcggctggaggagcccaccccagcccccagcaccagctacagcccccaggccgacagcctgcggacccccagcacagaagctgcccacatcatgctgcgggaccaggagcccagcctgagcagccacgtggaccccaccaaggtgtacaggaaggacccctacccagaggagatgatgaggcagaaccacgtgctgaagcagcctgctgtgagccaccctggccacaggccagacaaggagcccaacctgacctatgagccccagctgccctacgtggagaagcaggccagccgggacctggagcagcccacctaccgctatgagagcagcagctacacagaccagttcagcaggaactatgagcaccggctgcgctatgaagatagagtgcccatgtatgaggagcagtggagctactatgatgacaagcagccctaccccagccggcccccatttgacaaccagcacagccaggacctggacagccggcagcaccctgaggagagcagcgagcggggctacttccccaggtttgaggagcccgcccccctgtcctatgacagccggcccaggtatgagcaggccccccgggccagcgccctgcggcatgaggagcagcctgcccctggctatgacacccacggccgcctgcggcctgaggcccagccccaccccagcgctggccccaagccagctgagagcaagcagtactttgagcagtacagccgctcctatgagcaggtgcccccccagggcttcaccagcagagctggccactttgagcccctgcacggggctgctgctgtgcccccactcatccccagcagccagcacaagccagaggccctgcccagcaacaccaagcccctgcccccaccacccacccagacagaggaggaggaggaccctgccatgaagccccagagcgtgctgaccagggtgaagatgtttgagaacaagaggtctgccagcctggagaccaagaaggatgtgaatgacaccggcagcttcaagcccccagaggtggccagcaagcccagcggggcccccatcatcggccccaagcccaccagccagaaccagttcagcgagcatgacaagaccctgtaccgcatccctgagccccagaagccccagctgaagcccccagaggacatcgtgcgcagcaaccactatgaccctgaggaggatgaggagtactacaggaagcagctgagctactttgaccggcgcagctttgagaacaagcccccagcccacatcgccgccagccacctgtctgagcccgccaagccagcccacagccagaaccagagcaacttcagcagctacagcagcaagggcaagcccccagaggctgatggagtggacaggagctttggagagaagagatatgagcccatccaggccaccccacctcctccacccctgcccagccagtatgcccagcccagccagcctgtgaccagcgccagcctgcacatccacagcaagggggcccatggagagggcaacagcgtgtccctggacttccagaacagcctggtgtccaagccagaccccccacccagccagaacaagccagccaccttccggccccccaaccgggaggacacagcccaggccgccttctacccccagaagagcttcccagacaaggcccctgtgaatggaacagagcagacccagaagacagtgaccccagcctacaaccgcttcacccccaagccctacaccagcagcgcccggccctttgagaggaagtttgagagccccaagttcaaccacaacctgctgcccagcgagacagcccacaagccagacctgagcagcaagacccccaccagccccaagaccctggtgaagagccacagcctggcccagcccccagagtttgacagcggcgtggagaccttcagcatccatgctgagaagcccaagtaccagatcaacaacatcagcacagtgcccaaggccatccctgtgagccccagcgctgtggaggaggatgaagatgaagatggccacacagtggtggccacagcccggggcatcttcaacagcaatggaggagtgctgagcagcattgagaccggggtgtccatcatcatcccccagggcgccatccctgagggcgtggagcaggagatctacttcaaggtgtgccgggacaacagcatcctgccccccctggacaaggagaagggggagaccctgctgagccccctggtgatgtgtggcccccacggcctgaagttcctgaagcctgtggagctgcggctgccccactgtgaccccaagacctggcagaacaagtgcctgcccggggaccccaactacctggtgggcgccaactgtgtgtctgtgctgattgaccacttctag

SEQ ID NO: 173329 - DNA, 5007 bp, synthetic construct
  misc_feature 1..5007: note = Description of Artificial Sequence: Synthetic coding sequence
  source 1..5007: mol_type = other DNA
atgtctgcccgggctgctgctgccaagagcacagccatggaggagacagccatctgggagcagcacacagtgaccctgcaccgggcccctggcttcggcttcggcatcgccatcagcggcggccgggacaacccccacttccagagcggggagaccagcatcgtcatcagtgatgtgctgaagggcggccctgctgagggccagctgcaggagaatgacagagtggccatggtgaatggagtgtccatggacaacgtggagcacgcctttgctgtgcagcagctgaggaagagcggcaagaatgccaagatcaccatccggaggaagaagaaggtgcagatccctgtgtccaggccagaccctgagcctgtgtctgacaatgaagaagattcctatgatgaggagatccatgaccccaggagcggccgcagcggcgtggtgaacagaagaagtgagaagatctggccccgggacagaagtgccagccgggagaggagcctgagccccaggagtgacagaagatctgtggccagcagccagcctgccaagcccaccaaggtgaccctggtgaagagcaggaagaatgaggagtatggcctgcggctggccagccacatctttgtgaaggagatcagccaggacagcctggccgccagagatggcaacatccaggagggagatgtggtgctgaagatcaatggaacagtgacagagaacatgagcctgacagatgccaagaccctgattgaaagaagcaagggcaagctgaagatggtggtgcagagagatgagcgggccaccctgctgaatgtgcctgacctgagtgacagcatccacagcgccaatgccagcgagagagatgacatcagcgagatccagagcctggccagtgaccacagcggccgcagccatgaccggcccccaagaagaagccgcagccgcagcccagaccagaggtctgagcccagcgaccacagccgccacagcccccagcagcccagcaatggcagcctgcggagcagagatgaggagcgcatcagcaagccaggagctgtgtccacccctgtgaagcatgctgatgaccacacccccaagacagtggaggaggtgacagtggagagaaatgagaagcagacccccagcctgcctgagcccaagcctgtgtatgcccaggtgggccagccagatgtggacctgcctgtgagccccagtgatggagtgctgcccaacagcacccatgaagatggcatcctgcggcccagcatgaagctggtgaagttcagaaaaggagacagcgtgggcctgcggctggccggcggcaatgatgtgggcatctttgtggccggcgtgctggaggacagccctgctgccaaggagggcctggaggagggggaccagatcctgcgggtgaacaacgtggacttcaccaacatcatccgggaggaggccgtgctcttcctgctggacctgcccaagggggaggaggtgaccatcctggcccagaagaagaaggatgtgtaccgccgcatcgtggagagtgatgtgggggacagcttctacatccgcacccactttgaatatgagaaggagagcccctacggcctgtccttcaacaagggggaggtgttccgggtggtggacaccctgtacaacgggaagctgggctcctggctggccatccgcatcggcaagaaccacaaggaggtggagcggggcatcatccccaacaagaacagagctgagcagctggcctctgtgcagtacaccctgcccaagacagctggaggagacagagctgacttctggaggttccggggcctgcggagcagcaagaggaacctgaggaagagccgggaggacctgagcgcccagcctgtgcagaccaagtttcctgcctatgagcgggtggtgctgcgggaggccggcttcctgcggcctgtgaccatcttcggccccatcgcagatgtggcccgggagaagctggcccgggaggagccagacatctaccagatcgccaagtctgagcccagagatgctggaacagaccagaggagcagcggcatcatccggctgcacaccatcaagcagatcatcgaccaggacaagcacgccctgctggatgtgaccccaaatgctgtggaccggctgaactatgcccagtggtaccccatcgtggtgttcctgaacccagacagcaagcagggcgtgaagaccatgaggatgaggctgtgcccagagagcaggaagagcgccaggaagctgtatgaaagaagccacaagctgaggaagaacaaccaccacctgttcaccaccaccatcaacctgaacagcatgaatgatggctggtatggagccctgaaggaggccatccagcagcagcagaaccagctggtgtgggtgtctgagggcaaggcagatggagccaccagtgatgacctggacctgcatgatgaccggctgagctacctgagcgcccctggcagcgagtacagcatgtacagcacagacagccgccacaccagtgactatgaggacacagacacagagggcggggcctacacagaccaggagctggatgagaccctgaatgatgaggtgggcaccccacctgagagcgccatcaccaggagcagcgagcctgtgcgggaggacagcagcggcatgcaccacgagaaccagacctacccaccctacagcccccaggcccagccccagcccatccacagaattgacagccctggcttcaagccagccagccagcaggtgtacaggaaggacccctacccagaggagatgatgaggcagaaccacgtgctgaagcagcctgctgtgagccaccctggccacaggccagacaaggagcccaacctgacctatgagccccagctgccctacgtggagaagcaggccagccgggacctggagcagcccacctaccgctatgagagcagcagctacacagaccagttcagcaggaactatgagcaccggctgcgctatgaagatagagtgcccatgtatgaggagcagtggagctactatgatgacaagcagccctaccccagccggcccccatttgacaaccagcacagccaggacctggacagccggcagcaccctgaggagagcagcgagcggggctacttccccaggtttgaggagcccgcccccctgtcctatgacagccggcccaggtatgagcaggccccccgggccagcgccctgcggcatgaggagcagcctgcccctggctatgacacccacggccgcctgcggcctgaggcccagccccaccccagcgctggccccaagccagctgagagcaagcagtactttgagcagtacagccgctcctatgagcaggtgcccccccagggcttcaccagcagagctggccactttgagcccctgcacggggctgctgctgtgcccccactcatccccagcagccagcacaagccagaggccctgcccagcaacaccaagcccctgcccccaccacccacccagacagaggaggaggaggaccctgccatgaagccccagagcgtgctgaccagggtgaagatgtttgagaacaagaggtctgccagcctggagaccaagaaggatgtgaatgacaccggcagcttcaagcccccagaggtggccagcaagcccagcggggcccccatcatcggccccaagcccaccagccagaaccagttcagcgagcatgacaagaccctgtaccgcatccctgagccccagaagccccagctgaagcccccagaggacatcgtgcgcagcaaccactatgaccctgaggaggatgaggagtactacaggaagcagctgagctactttgaccggcgcagctttgagaacaagcccccagcccacatcgccgccagccacctgtctgagcccgccaagccagcccacagccagaaccagagcaacttcagcagctacagcagcaagggcaagcccccagaggctgatggagtggacaggagctttggagagaagagatatgagcccatccaggccaccccacctcctccacccctgcccagccagtatgcccagcccagccagcctgtgaccagcgccagcctgcacatccacagcaagggggcccatggagagggcaacagcgtgtccctggacttccagaacagcctggtgtccaagccagaccccccacccagccagaacaagccagccaccttccggccccccaaccgggaggacacagcccaggccgccttctacccccagaagagcttcccagacaaggcccctgtgaatggaacagagcagacccagaagacagtgaccccagcctacaaccgcttcacccccaagccctacaccagcagcgcccggccctttgagaggaagtttgagagccccaagttcaaccacaacctgctgcccagcgagacagcccacaagccagacctgagcagcaagacccccaccagccccaagaccctggtgaagagccacagcctggcccagcccccagagtttgacagcggcgtggagaccttcagcatccatgctgagaagcccaagtaccagatcaacaacatcagcacagtgcccaaggccatccctgtgagccccagcgctgtggaggaggatgaagatgaagatggccacacagtggtggccacagcccggggcatcttcaacagcaatggaggagtgctgagcagcattgagaccggggtgtccatcatcatcccccagggcgccatccctgagggcgtggagcaggagatctacttcaaggtgtgccgggacaacagcatcctgccccccctggacaaggagaagggggagaccctgctgagccccctggtgatgtgtggcccccacggcctgaagttcctgaagcctgtggagctgcggctgccccactgtgaccccaagacctggcagaacaagtgcctgcccggggaccccaactacctggtgggcgccaactgtgtgtctgtgctgattgaccacttctag

SEQ ID NO: 173330 - DNA, 2982 bp, synthetic construct
  misc_feature 1..2982: note = Description of Artificial Sequence: Synthetic coding sequence
  source 1..2982: mol_type = other DNA
atgcctgtgcggggggaccggggcttccccccccggcgggagctgagcggctggctgcgggcccctggcatggaggagctgatctgggagcagtacacagtgaccctgcagaaggacagcaagaggggcttcggcattgctgtgtctgggggccgggacaacccccactttgaaaatggagagaccagcatcgtcatcagtgatgtgctgcccggcggccctgcagatggcctgctgcaggagaatgacagagtggtgatggtgaatggcacccccatggaggatgtgctgcacagctttgctgtgcagcagctgaggaagagcggcaaggtggccgccatcgtggtgaagaggcccaggaaggtgcaggtggccgccctgcaggccagcccccccctggaccaggatgaccgggcctttgaggtgatggatgaatttgatggccgctccttccgcagcggctacagcgagaggagccggctgaacagccacggcggccgcagccgctcctgggaggacagccctgagcggggccggccccatgagcgggcccggagccgggagcgggacctgagccgggacaggagccggggccgcagcctggagcggggcctggaccaggaccacgcccggacccgggacaggagccggggccgcagcctggagcggggcctggaccatgactttggccccagccgggaccgggaccgggacaggagccggggccgcagcattgaccaggactatgagcgggcctaccaccgggcctatgaccctgactatgagcgggcctacagccctgagtaccgccgcggggcccggcatgatgcccggagccggggccccaggagccgcagccgggagcacccccacagccgcagccccagccctgagccccggggccggcccggccccatcggcgtgctgctgatgaagagccgggccaatgaggagtatggcctgcggctgggcagccagatctttgtgaaggagatgaccaggacaggcctggccaccaaggatggcaacctgcatgaaggagacatcatcctgaagatcaatggcaccgtgacagagaacatgagcctgacagatgccaggaagctgattgagaagagccggggcaagctgcagctggtggtgctgcgggacagccagcagaccctcatcaacatccccagcctgaatgacagcgacagcgagattgaggacatcagcgagattgagagcaacagaagcttcagccctgaggagaggaggcaccagtacagcgactatgactaccacagcagcagcgagaagctgaaggagcggcccagcagccgggaggacacccccagccggctgagcaggatgggcgccacccccacccccttcaagagcactggagacattgctggcaccgtggtgcctgagaccaacaaggagccccgctaccaggaggaccccccagccccccagcccaaggccgcccccaggaccttcctgcggcccagcccagaagatgaggccatctacggccccaacaccaagatggtgcgcttcaagaagggggacagcgtgggcctgcggctggccggcggcaatgatgtgggcatctttgtggccggcatccaggagggcaccagcgctgagcaggagggcctgcaggagggggaccagatcctgaaggtgaacacccaggacttccggggcctggtgagagaagatgctgtgctgtacctgctggagatccccaagggggagatggtgaccatcctggcccagagcagagcagatgtgtacagagacatcctggcctgtggccgcggggacagcttcttcatccgcagccactttgaatgtgagaaggagaccccccagagcctggccttcaccagaggagaggtgttccgggtggtggacaccctgtatgatggcaagctgggcaactggctggccgtgagaattggaaatgagctggagaagggcctcatccccaacaagagcagagctgagcagatggcctctgtgcagaatgcccagagggacaatgctggggacagagctgacttctggaggatgaggggccagaggtctggagtgaagaagaacctgaggaagagccgggaggacctgacagctgtggtgtctgtgtccaccaagtttcctgcctatgagcgggtgctgctgcgggaggccggcttcaagaggcctgtggtgctgtttggccccatcgctgacatcgccatggagaagctggccaatgagctgcctgactggttccagacagccaagacagagcccaaggatgctggcagcgagaagagcactggagtggtgcggctgaacacagtgcggcagatcatcgagcaggacaagcacgccctgctggatgtgacccccaaggctgtggacctgctgaactacacccagtggttccccatcgtcatcttcttcaacccagacagccggcagggcgtgaagaccatgaggcagaggctgaaccccaccagcaacaagagcagcaggaagctgtttgaccaggccaacaagctgaagaagacctgtgcccacctgttcaccgccaccatcaacctgaacagcgccaatgacagctggtttggcagcctgaaggacaccatccagcaccagcagggcgaggccgtgtgggtgtctgagggcaagatggagggcatggatgatgatcctgaggacaggatgagctacctgacagccatgggcgctgactacctgagctgtgacagccgcctcatcagtgactttgaggacacagatggagagggcggggcctacacagacaatgagctggatgagcctgctgaggagcccctggtgagcagcatcaccaggagcagcgagcctgtgcagcacgaggaggtgcggcggggccggccccgggccggcaccggggagcccggggtcttcctggccctgtcctggacagctgtgtgcagcggctgctgcggccgccacagctag

SEQ ID NO: 173331 - DNA, 3132 bp, synthetic construct
  misc_feature 1..3132: note = Description of Artificial Sequence: Synthetic coding sequence
  source 1..3132: mol_type = other DNA
atgcctgtgcggggggaccggggcttccccccccggcgggagctgagcggctggctgcgggcccctggcatggaggagctgatctgggagcagtacacagtgaccctgcagaaggacagcaagaggggcttcggcattgctgtgtctgggggccgggacaacccccactttgaaaatggagagaccagcatcgtcatcagtgatgtgctgcccggcggccctgcagatggcctgctgcaggagaatgacagagtggtgatggtgaatggcacccccatggaggatgtgctgcacagctttgctgtgcagcagctgaggaagagcggcaaggtggccgccatcgtggtgaagaggcccaggaaggtgcaggtggccgccctgcaggccagcccccccctggaccaggatgaccgggcctttgaggtgatggatgaatttgatggccgctccttccgcagcggctacagcgagaggagccggctgaacagccacggcggccgcagccgctcctgggaggacagccctgagcggggccggccccatgagcgggcccggagccgggagcgggacctgagccgggacaggagccggggccgcagcctggagcggggcctggaccaggaccacgcccggacccgggacaggagccggggccgcagcctggagcggggcctggaccatgactttggccccagccgggaccgggaccgggacaggagccggggccgcagcattgaccaggactatgagcgggcctaccaccgggcctatgaccctgactatgagcgggcctacagccctgagtaccgccgcggggcccggcatgatgcccggagccggggccccaggagccgcagccgggagcacccccacagccgcagccccagccctgagccccggggccggcccggccccatcggcgtgctgctgatgaagagccgggccaatgaggagtatggcctgcggctgggcagccagatctttgtgaaggagatgaccaggacaggcctggccaccaaggatggcaacctgcatgaaggagacatcatcctgaagatcaatggcaccgtgacagagaacatgagcctgacagatgccaggaagctgattgagaagagccggggcaagctgcagctggtggtgctgcgggacagccagcagaccctcatcaacatccccagcctgaatgacagcgacagcgagattgaggacatcagcgagattgagagcaacagaagcttcagccctgaggagaggaggcaccagtacagcgactatgactaccacagcagcagcgagaagctgaaggagcggcccagcagccgggaggacacccccagccggctgagcaggatgggcgccacccccacccccttcaagagcactggagacattgctggcaccgtggtgcctgagaccaacaaggagccccgctaccaggaggaccccccagccccccagcccaaggccgcccccaggaccttcctgcggcccagcccagaagatgaggccatctacggccccaacaccaagatggtgcgcttcaagaagggggacagcgtgggcctgcggctggccggcggcaatgatgtgggcatctttgtggccggcatccaggagggcaccagcgctgagcaggagggcctgcaggagggggaccagatcctgaaggtgaacacccaggacttccggggcctggtgagagaagatgctgtgctgtacctgctggagatccccaagggggagatggtgaccatcctggcccagagcagagcagatgtgtacagagacatcctggcctgtggccgcggggacagcttcttcatccgcagccactttgaatgtgagaaggagaccccccagagcctggccttcaccagaggagaggtgttccgggtggtggacaccctgtatgatggcaagctgggcaactggctggccgtgagaattggaaatgagctggagaagggcctcatccccaacaagagcagagctgagcagatggcctctgtgcagaatgcccagagggacaatgctggggacagagctgacttctggaggatgaggggccagaggtctggagtgaagaagaacctgaggaagagccgggaggacctgacagctgtggtgtctgtgtccaccaagtttcctgcctatgagcgggtgctgctgcgggaggccggcttcaagaggcctgtggtgctgtttggccccatcgctgacatcgccatggagaagctggccaatgagctgcctgactggttccagacagccaagacagagcccaaggatgctggcagcgagaagagcactggagtggtgcggctgaacacagtgcggcagatcatcgagcaggacaagcacgccctgctggatgtgacccccaaggctgtggacctgctgaactacacccagtggttccccatcgtcatcttcttcaacccagacagccggcagggcgtgaagaccatgaggcagaggctgaaccccaccagcaacaagagcagcaggaagctgtttgaccaggccaacaagctgaagaagacctgtgcccacctgttcaccgccaccatcaacctgaacagcgccaatgacagctggtttggcagcctgaaggacaccatccagcaccagcagggcgaggccgtgtgggtgtctgagggcaagatggagggcatggatgatgatcctgaggacaggatgagctacctgacagccatgggcgctgactacctgagctgtgacagccgcctcatcagtgactttgaggacacagatggagagggcggggcctacacagacaatgagctggatgagcctgctgaggagcccctggtgagcagcatcaccaggagcagcgagcctgtgcagcacgaggagattgaaattgcccagaagcacccagacatctatgctgtgcccatcaagacccacaagccagaccccggcaccccccagcacaccagcagccggcccccagagccccagaaggcccccagccggccctaccaggacacccggggcagctatggcagtgatgctgaggaggaggagtaccggcagcagctgtctgagcacagcaagaggggctactacggccagagcgcccgctacagagacacagagctgtag

SEQ ID NO: 173332 - DNA, 3573 bp, synthetic construct
  misc_feature 1..3573: note = Description of Artificial Sequence: Synthetic coding sequence
  source 1..3573: mol_type = other DNA
atgcctgtgcggggggaccggggcttccccccccggcgggagctgagcggctggctgcgggcccctggcatggaggagctgatctgggagcagtacacagtgaccctgcagaaggacagcaagaggggcttcggcattgctgtgtctgggggccgggacaacccccactttgaaaatggagagaccagcatcgtcatcagtgatgtgctgcccggcggccctgcagatggcctgctgcaggagaatgacagagtggtgatggtgaatggcacccccatggaggatgtgctgcacagctttgctgtgcagcagctgaggaagagcggcaaggtggccgccatcgtggtgaagaggcccaggaaggtgcaggtggccgccctgcaggccagcccccccctggaccaggatgaccgggcctttgaggtgatggatgaatttgatggccgctccttccgcagcggctacagcgagaggagccggctgaacagccacggcggccgcagccgctcctgggaggacagccctgagcggggccggccccatgagcgggcccggagccgggagcgggacctgagccgggacaggagccggggccgcagcctggagcggggcctggaccaggaccacgcccggacccgggacaggagccggggccgcagcctggagcggggcctggaccatgactttggccccagccgggaccgggaccgggacaggagccggggccgcagcattgaccaggactatgagcgggcctaccaccgggcctatgaccctgactatgagcgggcctacagccctgagtaccgccgcggggcccggcatgatgcccggagccggggccccaggagccgcagccgggagcacccccacagccgcagccccagccctgagccccggggccggcccggccccatcggcgtgctgctgatgaagagccgggccaatgaggagtatggcctgcggctgggcagccagatctttgtgaaggagatgaccaggacaggcctggccaccaaggatggcaacctgcatgaaggagacatcatcctgaagatcaatggcaccgtgacagagaacatgagcctgacagatgccaggaagctgattgagaagagccggggcaagctgcagctggtggtgctgcgggacagccagcagaccctcatcaacatccccagcctgaatgacagcgacagcgagattgaggacatcagcgagattgagagcaacagaagcttcagccctgaggagaggaggcaccagtacagcgactatgactaccacagcagcagcgagaagctgaaggagcggcccagcagccgggaggacacccccagccggctgagcaggatgggcgccacccccacccccttcaagagcactggagacattgctggcaccgtggtgcctgagaccaacaaggagccccgctaccaggaggaccccccagccccccagcccaaggccgcccccaggaccttcctgcggcccagcccagaagatgaggccatctacggccccaacaccaagatggtgcgcttcaagaagggggacagcgtgggcctgcggctggccggcggcaatgatgtgggcatctttgtggccggcatccaggagggcaccagcgctgagcaggagggcctgcaggagggggaccagatcctgaaggtgaacacccaggacttccggggcctggtgagagaagatgctgtgctgtacctgctggagatccccaagggggagatggtgaccatcctggcccagagcagagcagatgtgtacagagacatcctggcctgtggccgcggggacagcttcttcatccgcagccactttgaatgtgagaaggagaccccccagagcctggccttcaccagaggagaggtgttccgggtggtggacaccctgtatgatggcaagctgggcaactggctggccgtgagaattggaaatgagctggagaagggcctcatccccaacaagagcagagctgagcagatggcctctgtgcagaatgcccagagggacaatgctggggacagagctgacttctggaggatgaggggccagaggtctggagtgaagaagaacctgaggaagagccgggaggacctgacagctgtggtgtctgtgtccaccaagtttcctgcctatgagcgggtgctgctgcgggaggccggcttcaagaggcctgtggtgctgtttggccccatcgctgacatcgccatggagaagctggccaatgagctgcctgactggttccagacagccaagacagagcccaaggatgctggcagcgagaagagcactggagtggtgcggctgaacacagtgcggcagatcatcgagcaggacaagcacgccctgctggatgtgacccccaaggctgtggacctgctgaactacacccagtggttccccatcgtcatcttcttcaacccagacagccggcagggcgtgaagaccatgaggcagaggctgaaccccaccagcaacaagagcagcaggaagctgtttgaccaggccaacaagctgaagaagacctgtgcccacctgttcaccgccaccatcaacctgaacagcgccaatgacagctggtttggcagcctgaaggacaccatccagcaccagcagggcgaggccgtgtgggtgtctgagggcaagatggagggcatggatgatgatcctgaggacaggatgagctacctgacagccatgggcgctgactacctgagctgtgacagccgcctcatcagtgactttgaggacacagatggagagggcggggcctacacagacaatgagctggatgagcctgctgaggagcccctggtgagcagcatcaccaggagcagcgagcctgtgcagcacgaggagagcatcaggaagcccagccctgagccccgggcccagatgaggcgggccgccagcagtgaccagctgcgggacaacagccccccaccagccttcaagccagagccccccaaggccaagacccagaacaaggaggagagctatgacttcagcaagagctatgagtacaagagcaaccccagcgctgtggccggaaatgagacccctggggccagcaccaagggctacccacctcctgtggccgccaagcccaccttcggccgcagcatcctgaagcccagcacccccatccccccccaggagggggaggaggtgggggagagcagcgaggagcaggacaatgcccccaagtctgtgctgggcaaggtgaagatctttgagaagatggaccacaaggcccggctgcagaggatgcaggagctgcaggaggcccagaatgcccgcatcgagatcgcccagaagcacccagacatctatgctgtgcccatcaagacccacaagccagaccccggcaccccccagcacaccagcagcaggcctcctgagccccagaaggcccccagccggccctaccaggacacccggggcagctatggcagtgatgctgaggaggaggagtaccggcagcagctgtctgagcacagcaagaggggctactacggccagagcgcccgctacagagacacagagctgtag

SEQ ID NO: 173333 - DNA, 306 bp, synthetic construct
  misc_feature 1..306: note = Description of Artificial Sequence: Synthetic coding sequence
  source 1..306: mol_type = other DNA
atggaggagctgatctgggagcagtacacagtgaccctgcagaaggacagcaagaggggctttggaattgctgtgtctgggggccgggacaacccccactttgaaaatggagagaccagcatcgtcatcagtgatgtgctgcccggcggccctgcagatggcctgctgcaggagaatgacagagtggtgatggtgaatggcacccccatggaggatgtgctgcacagctttgctgtgcagcagctgaggaagagcggcaaggtggccgccatcgtgtccacaggctttgccttcagcctgccctag

SEQ ID NO: 173334 - DNA, 486 bp, synthetic construct
  misc_feature 1..486: note = Description of Artificial Sequence: Synthetic coding sequence
  source 1..486: mol_type = other DNA
atggaggagctgatctgggagcagtacacagtgaccctgcagaaggacagcaagaggggctttggaattgctgtgtctgggggccgggacaacccccactttgaaaatggagagaccagcatcgtcatcagtgatgtgctgcccggcggccctgcagatggcctgctgcaggagaatgacagagtggtgatggtgaatggcacccccatggaggatgtgctgcacagctttgctgtgcagcagctgaggaagagcggcaaggtggccgccatcgtggtgaagaggcccaggaaggtgcaggtggccgccctgcaggccagcccccccctggaccaggatgaccgggcctttgaggtgatggatgaatttgatggccgctccttccgcagcggctacagcgagaggagccggctgaacagccatggaggccgcagccgctcctgggaggacagccctgagcggggccggccccatgagcgggcctag

SEQ ID NO: 173335 - DNA, 3063 bp, synthetic construct
  misc_feature 1..3063: note = Description of Artificial Sequence: Synthetic coding sequence
  source 1..3063: mol_type = other DNA
atggaggagctgatctgggagcagtacacagtgaccctgcagaaggacagcaagaggggctttggaattgctgtgtctgggggccgggacaacccccactttgaaaatggagagaccagcatcgtcatcagtgatgtgctgcccggcggccctgcagatggcctgctgcaggagaatgacagagtggtgatggtgaatggcacccccatggaggatgtgctgcacagctttgctgtgcagcagctgaggaagagcggcaaggtggccgccatcgtggtgaagaggcccaggaaggtgcaggtggccgccctgcaggccagcccccccctggaccaggatgaccgggcctttgaggtgatggatgaatttgatggccgctccttccgcagcggctacagcgagaggagccggctgaacagccatggaggccgcagccgctcctgggaggacagccctgagcggggccggccccatgagcgggcccggagccgggagcgggacctgagccgggacaggagccggggccgcagcctggagcggggcctggaccaggaccacgcccggacccgggacaggagccggggccgcagcctggagcggggcctggaccatgactttggccccagccgggaccgggaccgggacaggagccggggccgcagcattgaccaggactatgaaagagcctaccaccgggcctatgaccctgactatgaaagagcctacagccctgagtacagaagaggagcccggcatgatgcccggagccggggccccaggagccgcagccgggagcacccccacagccgcagccccagccctgagccccggggccggcccggccccatcggcgtgctgctgatgaagagccgggccaatgaggagtatggcctgcggctgggcagccagatctttgtgaaggagatgaccaggacaggcctggccaccaaggatggcaacctgcacgagggggacatcatcctgaagatcaatggaacagtgacagagaacatgagcctgacagatgccaggaagctgattgagaagagccggggcaagctgcagctggtggtgctgcgggacagccagcagaccctcatcaacatccccagcctgaatgacagcgacagcgagattgaggacatcagcgagattgagagcaacagaagcttcagccctgaggagcggcggcaccagtacagcgactatgactaccacagcagcagcgagaagctgaaggagcggcccagcagccgggaggacacccccagccggctgagcaggatgggcgccacccccacccccttcaagagcactggagacattgctggcaccgtggtgcctgagaccaacaaggagccccgctaccaggaggaccccccagccccccagcccaaggccgcccccaggaccttcctgcggcccagcccagaagatgaggccatctacggccccaacaccaagatggtgcgcttcaagaagggggacagcgtgggcctgcggctggccggcggcaatgatgtgggcatctttgtggccggcatccaggagggcaccagcgctgagcaggagggcctgcaggagggggaccagatcctgaaggtgaacacccaggacttccggggcctggtgcgggaggatgctgtgctgtacctgctggagatccccaagggggagatggtgaccatcctggcccagagcagagcagatgtgtacagagacatcctggcctgtggccgcggggacagcttcttcatccgcagccactttgaatgtgagaaggagaccccccagagcctggccttcaccagaggagaggtgttccgggtggtggacaccctgtatgatggcaagctgggcaactggctggccgtgagaattggaaatgagctggagaagggcctcatccccaacaagagcagagctgagcagatggcctctgtgcagaatgcccagagggacaatgctggggacagagctgacttctggaggatgaggggccagaggtctggagtgaagaagaacctgaggaagagccgggaggacctgacagctgtggtgtctgtgtccaccaagtttcctgcctatgaaagagtgctgctgcgggaggccggcttcaagaggcctgtggtgctgtttggccccatcgctgacatcgccatggagaagctggccaatgagctgcctgactggttccagacagccaagacagagcccaaggatgctggcagcgagaagagcactggagtggtgcggctgaacacagtgcggcagatcatcgagcaggacaagcacgccctgctggatgtgacccccaaggctgtggacctgctgaactacacccagtggttccccatcgtcatcttcttcaacccagacagccggcagggcgtgaagaccatgaggcagaggctgaaccccaccagcaacaagagcagcaggaagctgtttgaccaggccaacaagctgaagaagacctgtgcccacctgttcaccgccaccatcaacctgaacagcgccaatgacagctggtttggcagcctgaaggacaccatccagcaccagcagggcgaggccgtgtgggtgtctgagggcaagatggagggcatggatgatgatcctgaggacaggatgagctacctgacagccatgggcgctgactacctgagctgtgacagccgcctcatcagtgactttgaggacacagatggagagggcggggcctacacagacaatgagctggatgagcctgctgaggagcccctggtgagcagcatcaccaggagcagcgagcctgtgcagcacgaggagattgagatcgcccagaagcacccagacatctatgctgtgcccatcaagacccacaagccagaccccggcaccccccagcacaccagcagcaggcctcctgagccccagaaggcccccagccggccctaccaggacacccggggcagctatggcagtgatgctgaggaggaggagtaccggcagcagctgtctgagcacagcaagaggggctactacggccagagcgcccgctacagagacacagagctgtag

SEQ ID NO: 173336 - DNA, 3474 bp, synthetic construct
  misc_feature 1..3474: note = Description of Artificial Sequence: Synthetic coding sequence
  source 1..3474: mol_type = other DNA
atgaagacagcccaggccctgcacaggatgtggatccaggccgtgaagaagctgcggcgctggaagggccgggcccctggcatggaggagctgatctgggagcagtacacagtgaccctgcagaaggacagcaagaggggcttcggcattgctgtgtctgggggccgggacaacccccactttgaaaatggagagaccagcatcgtcatcagtgatgtgctgcccggcggccctgcagatggcctgctgcaggagaatgacagagtggtgatggtgaatggcacccccatggaggatgtgctgcacagctttgctgtgcagcagctgaggaagagcggcaaggtggccgccatcgtggtgaagaggcccaggaaggtgcaggtggccgccctgcaggccagcccccccctggaccaggatgaccgggcctttgaggtgatggatgaatttgatggccgctccttccgcagcggctacagcgagaggagccggctgaacagccacggcggccgcagccgctcctgggaggacagccctgagcggggccggccccatgagcgggcccggagccgggagcgggacctgagccgggacaggagccggggccgcagcctggagcggggcctggaccaggaccacgcccggacccgggacaggagccggggccgcagcctggagcggggcctggaccatgactttggccccagccgggaccgggaccgggacaggagccggggccgcagcattgaccaggactatgagcgggcctaccaccgggcctatgaccctgactatgagcgggcctacagccctgagtaccgccgcggggcccggcatgatgcccggagccggggccccaggagccgcagccgggagcacccccacagccgcagccccagccctgagccccggggccggcccggccccatcggcgtgctgctgatgaagagccgggccaatgaggagtatggcctgcggctgggcagccagatctttgtgaaggagatgaccaggacaggcctggccaccaaggatggcaacctgcatgaaggagacatcatcctgaagatcaatggcaccgtgacagagaacatgagcctgacagatgccaggaagctgattgagaagagccggggcaagctgcagctggtggtgctgcgggacagccagcagaccctcatcaacatccccagcctgaatgacagcgacagcgagattgaggacatcagcgagattgagagcaacagaagcttcagccctgaggagaggaggcaccagtacagcgactatgactaccacagcagcagcgagaagctgaaggagcggcccagcagccgggaggacacccccagccggctgagcaggatgggcgccacccccacccccttcaagagcactggagacattgctggcaccgtggtgcctgagaccaacaaggagccccgctaccaggaggaccccccagccccccagcccaaggccgcccccaggaccttcctgcggcccagcccagaagatgaggccatctacggccccaacaccaagatggtgcgcttcaagaagggggacagcgtgggcctgcggctggccggcggcaatgatgtgggcatctttgtggccggcatccaggagggcaccagcgctgagcaggagggcctgcaggagggggaccagatcctgaaggtgaacacccaggacttccggggcctggtgagagaagatgctgtgctgtacctgctggagatccccaagggggagatggtgaccatcctggcccagagcagagcagatgtgtacagagacatcctggcctgtggccgcggggacagcttcttcatccgcagccactttgaatgtgagaaggagaccccccagagcctggccttcaccagaggagaggtgttccgggtggtggacaccctgtatgatggcaagctgggcaactggctggccgtgagaattggaaatgagctggagaagggcctcatccccaacaagagcagagctgagcagatggcctctgtgcagaatgcccagagggacaatgctggggacagagctgacttctggaggatgaggggccagaggtctggagtgaagaagaacctgaggaagagccgggaggacctgacagctgtggtgtctgtgtccaccaagtttcctgcctatgagcgggtgctgctgcgggaggccggcttcaagaggcctgtggtgctgtttggccccatcgctgacatcgccatggagaagctggccaatgagctgcctgactggttccagacagccaagacagagcccaaggatgctggcagcgagaagagcactggagtggtgcggctgaacacagtgcggcagatcatcgagcaggacaagcacgccctgctggatgtgacccccaaggctgtggacctgctgaactacacccagtggttccccatcgtcatcttcttcaacccagacagccggcagggcgtgaagaccatgaggcagaggctgaaccccaccagcaacaagagcagcaggaagctgtttgaccaggccaacaagctgaagaagacctgtgcccacctgttcaccgccaccatcaacctgaacagcgccaatgacagctggtttggcagcctgaaggacaccatccagcaccagcagggcgaggccgtgtgggtgtctgagggcaagatggagggcatggatgatgatcctgaggacaggatgagctacctgacagccatgggcgctgactacctgagctgtgacagccgcctcatcagtgactttgaggacacagatggagagggcggggcctacacagacaatgagctggatgagcctgctgaggagcccctggtgagcagcatcaccaggagcagcgagcctgtgcagcacgaggaggccaagacccagaacaaggaggagagctatgacttcagcaagagctatgagtacaagagcaaccccagcgctgtggccggaaatgagacccctggggccagcaccaagggctacccacctcctgtggccgccaagcccaccttcggccgcagcatcctgaagcccagcacccccatccccccccaggagggggaggaggtgggggagagcagcgaggagcaggacaatgcccccaagtctgtgctgggcaaggtgaagatctttgagaagatggaccacaaggcccggctgcagaggatgcaggagctgcaggaggcccagaatgccagaattgaaattgcccagaagcacccagacatctatgctgtgcccatcaagacccacaagccagaccccggcaccccccagcacaccagcagccggcccccagagccccagaaggcccccagccggccctaccaggacacccggggcagctatggcagtgatgctgaggaggaggagtaccggcagcagctgtctgagcacagcaagaggggctactacggccagagcgcccgctacagagacacagagctgtag

SEQ ID NO: 173337 - DNA, 3666 bp, synthetic construct
  misc_feature 1..3666: note = Description of Artificial Sequence: Synthetic coding sequence
  source 1..3666: mol_type = other DNA
atgaagacagcccaggccctgcacaggatgtggatccaggccgtgaagaagctgcggcgctggaagggccgggtgagccccagcgccagcagccccctggtgttccccaacctgagctcctgggagggggagggcagcaagaccatcctgacagcccctggcatggaggagctgatctgggagcagtacacagtgaccctgcagaaggacagcaagaggggctttggaattgctgtgtctgggggccgggacaacccccactttgaaaatggagagaccagcatcgtcatcagtgatgtgctgcccggcggccctgcagatggcctgctgcaggagaatgacagagtggtgatggtgaatggcacccccatggaggatgtgctgcacagctttgctgtgcagcagctgaggaagagcggcaaggtggccgccatcgtggtgaagaggcccaggaaggtgcaggtggccgccctgcaggccagcccccccctggaccaggatgaccgggcctttgaggtgatggatgaatttgatggccgctccttccgcagcggctacagcgagaggagccggctgaacagccatggaggccgcagccgctcctgggaggacagccctgagcggggccggccccatgagcgggcccggagccgggagcgggacctgagccgggacaggagccggggccgcagcctggagcggggcctggaccaggaccacgcccggacccgggacaggagccggggccgcagcctggagcggggcctggaccatgactttggccccagccgggaccgggaccgggacaggagccggggccgcagcattgaccaggactatgaaagagcctaccaccgggcctatgaccctgactatgaaagagcctacagccctgagtacagaagaggagcccggcatgatgcccggagccggggccccaggagccgcagccgggagcacccccacagccgcagccccagccctgagccccggggccggcccggccccatcggcgtgctgctgatgaagagccgggccaatgaggagtatggcctgcggctgggcagccagatctttgtgaaggagatgaccaggacaggcctggccaccaaggatggcaacctgcacgagggggacatcatcctgaagatcaatggaacagtgacagagaacatgagcctgacagatgccaggaagctgattgagaagagccggggcaagctgcagctggtggtgctgcgggacagccagcagaccctcatcaacatccccagcctgaatgacagcgacagcgagattgaggacatcagcgagattgagagcaacagaagcttcagccctgaggagcggcggcaccagtacagcgactatgactaccacagcagcagcgagaagctgaaggagcggcccagcagccgggaggacacccccagccggctgagcaggatgggcgccacccccacccccttcaagagcactggagacattgctggcaccgtggtgcctgagaccaacaaggagccccgctaccaggaggaccccccagccccccagcccaaggccgcccccaggaccttcctgcggcccagcccagaagatgaggccatctacggccccaacaccaagatggtgcgcttcaagaagggggacagcgtgggcctgcggctggccggcggcaatgatgtgggcatctttgtggccggcatccaggagggcaccagcgctgagcaggagggcctgcaggagggggaccagatcctgaaggtgaacacccaggacttccggggcctggtgcgggaggatgctgtgctgtacctgctggagatccccaagggggagatggtgaccatcctggcccagagcagagcagatgtgtacagagacatcctggcctgtggccgcggggacagcttcttcatccgcagccactttgaatgtgagaaggagaccccccagagcctggccttcaccagaggagaggtgttccgggtggtggacaccctgtatgatggcaagctgggcaactggctggccgtgagaattggaaatgagctggagaagggcctcatccccaacaagagcagagctgagcagatggcctctgtgcagaatgcccagagggacaatgctggggacagagctgacttctggaggatgaggggccagaggtctggagtgaagaagaacctgaggaagagccgggaggacctgacagctgtggtgtctgtgtccaccaagtttcctgcctatgaaagagtgctgctgcgggaggccggcttcaagaggcctgtggtgctgtttggccccatcgctgacatcgccatggagaagctggccaatgagctgcctgactggttccagacagccaagacagagcccaaggatgctggcagcgagaagagcactggagtggtgcggctgaacacagtgcggcagatcatcgagcaggacaagcacgccctgctggatgtgacccccaaggctgtggacctgctgaactacacccagtggttccccatcgtcatcttcttcaacccagacagccggcagggcgtgaagaccatgaggcagaggctgaaccccaccagcaacaagagcagcaggaagctgtttgaccaggccaacaagctgaagaagacctgtgcccacctgttcaccgccaccatcaacctgaacagcgccaatgacagctggtttggcagcctgaaggacaccatccagcaccagcagggcgaggccgtgtgggtgtctgagggcaagatggagggcatggatgatgatcctgaggacaggatgagctacctgacagccatgggcgctgactacctgagctgtgacagccgcctcatcagtgactttgaggacacagatggagagggcggggcctacacagacaatgagctggatgagcctgctgaggagcccctggtgagcagcatcaccaggagcagcgagcctgtgcagcacgaggagagcatcaggaagcccagccctgagccccgggcccagatgagaagagctgccagcagtgaccagctgcgggacaacagccccccaccagccttcaagccagagccccccaaggccaagacccagaacaaggaggagagctatgacttcagcaagagctatgagtacaagagcaaccccagcgctgtggccggaaatgagacccctggggccagcaccaagggctacccacctcctgtggccgccaagcccaccttcggccgcagcatcctgaagcccagcacccccatccccccccaggagggggaggaggtgggggagagcagcgaggagcaggacaatgcccccaagtctgtgctgggcaaggtgaagatctttgagaagatggaccacaaggcccggctgcagaggatgcaggagctgcaggaggcccagaatgccagaattgaaattgcccagaagcacccagacatctatgctgtgcccatcaagacccacaagccagaccccggcaccccccagcacaccagcagccggcccccagagccccagaaggcccccagccggccctaccaggacacccggggcagctatggcagtgatgctgaggaggaggagtaccggcagcagctgtctgagcacagcaagaggggctactacggccagagcgcccgctacagagacacagagctgtag

SEQ ID NO: 173338 - DNA, 2787 bp, synthetic construct
  misc_feature 1..2787: note = Description of Artificial Sequence: Synthetic coding sequence
  source 1..2787: mol_type = other DNA
atggctgtgcgcttccaggtggccgacatggaggagctgaccatctgggagcagcacacagccaccctgagcaaggacccccggcggggctttggaattgccatcagcggcggccgggacaggcctgggggctccatggtggtgtctgatgtggtgcctgggggccctgctgagggccgcctgcagacaggagaccacatcgtgatggtgaatggagtgtccatggagaatgccaccagcgcctttgccatccagatcctgaagacctgcaccaagatggccaacatcaccgtgaagaggccccggcgcatccacctgcctgccaccaaggccagccccagcagccctggccggcaggacagtgatgaagatgatggcccccagagggtggaggaggtggaccagggccggggctatgatggagacagcagcagcggcagcggccgctcctgggatgagaggagccggcggccccggcccggccggcggggccgggccggcagccatggaagaagaagccctgggggcggcagcgaggccaacggcctggccctggtgtctggcttcaagaggctgccccggcaggatgtgcagatgaagcctgtgaagtctgtgctggtgaagagaagagacagcgaggagtttggagtgaagctgggcagccagatcttcatcaagcacatcacagattctggcctggccgcccggcaccggggcctgcaggagggggacctgatcctgcagatcaacggggtgagcagccagaacctgagcctgaatgacaccaggaggctcatcgagaagtctgagggcaagctgagcctgctggtgctgcgggaccggggccagttcctggtgaacatccccccagctgtgtctgacagcgacagcagccccctggaggacatcagtgacctggccagcgagctgagccaggccccacccagccacatccccccaccacccaggcatgcccagaggagccctgaggccagccagacagacagccctgtggagagcccccggctgcggcgggagagctctgtggacagcaggaccatcagcgagccagatgagcagaggtctgagctgccccgggagagcagctatgacatctacagagtgcccagcagccagagcatggaggaccggggctacagcccagacaccagggtggtgcgcttcctgaagggcaagagcatcggcctgcggctggccggcggcaatgatgtgggcatctttgtgtctggagtgcaggccggcagccctgcagatggccagggcatccaggagggggaccagatcctgcaggtgaatgatgtgcccttccagaacctgacccgggaggaggccgtgcagttcctgctgggcctgcccccaggagaggagatggagctggtgacccagaggaagcaggacatcttctggaagatggtgcagagccgggtgggggacagcttctacatccgcacccactttgagctggagcccagccccccatctggcctgggcttcaccagaggagatgtgttccacgtgctggacaccctgcaccctggccctggccagagccacgcccggggcggccactggctggccgtgaggatgggccgggacctgcgggagcaggagcggggcatcatccccaaccagagcagagctgagcagctggccagcctggaggccgcccagagagctgtgggcgtgggccctggcagcagcgctggcagcaatgcccgggcagagttctggaggctgcggggcctgcggcggggggccaagaagaccacccagaggagccgggaggacctgagcgccctgacccggcagggccgctacccaccctatgaaagagtggtgctgcgggaggccagcttcaagaggcctgtggtgatcctgggccctgtggccgacatcgccatgcagaagctgacagctgagatgccagaccagtttgaaattgctgagaccgtgtccaggacagacagccccagcaagatcatcaagctggacacagtgcgggtgattgctgagaaggacaagcacgccctgctggatgtgacccccagcgccatcgagcggctgaactacgtgcagtactaccccatcgtggtgttcttcatccctgagagcaggcctgccctgaaggccctgcggcagtggctggccccagccagcagaagaagcacccggcggctgtatgcccaggcccagaagctgaggaagcacagcagccacctgttcaccgccaccatccccctgaatggcaccagtgacacctggtaccaggagctgaaggccatcatccgggagcagcagacccggcccatctggacagctgaggaccagctggatggcagcctggaggacaacctggacctgccccaccacggcctggccgacagcagcgctgacctgagctgtgacagccgggtgaacagcgactatgaaacagatggagagggcggggcctacacagatggagagggctacacagatggagagggcggcccctacacagatgtggatgatgagcccccagccccagccctggcccggagcagcgagcctgtgcaggctgatgagagccagagcccccgggaccggggccgcatcagcgcccaccagggcgcccaggtggacagccgccacccccagggccagtggaggcaggacagcatgaggacctatgagcgggaggccctgaagaagaagttcatgagggtgcatgatgctgagagcagtgatgaagatggctatgactggggccctgccacagacctgtag

SEQ ID NO: 173339 - DNA, 2859 bp, synthetic construct
  misc_feature 1..2859: note = Description of Artificial Sequence: Synthetic coding sequence
  source 1..2859: mol_type = other DNA
atgaacctgtgtggcctgatgcccatcttccctgcccccctggaccaggtggccgacatggaggagctgaccatctgggagcagcacacagccaccctgagcaaggacccccggcggggctttggaattgccatcagcggcggccgggacaggcctgggggctccatggtggtgtctgatgtggtgcctgggggccctgctgagggccgcctgcagacaggagaccacatcgtgatggtgaatggagtgtccatggagaatgccaccagcgcctttgccatccagatcctgaagacctgcaccaagatggccaacatcaccgtgaagaggccccggcgcatccacctgcctgccaccaaggccagccccagcagccctggccggcaggacagtgatgaagatgatggcccccagagggtggaggaggtggaccagggccggggctatgatggagacagcagcagcggcagcggccgctcctgggatgagaggagccggcggccccggcccggccggcggggccgggccggcagccatggaagaagaagccctgggggcggcagcgaggccaacggcctggccctggtgtctggcttcaagaggctgccccggcaggatgtgcagatgaagcctgtgaagtctgtgctggtgaagagaagagacagcgaggagtttggagtgaagctgggcagccagatcttcatcaagcacatcacagattctggcctggccgcccggcaccggggcctgcaggagggggacctgatcctgcagatcaacggggtgagcagccagaacctgagcctgaatgacaccaggaggctcatcgagaagtctgagggcaagctgagcctgctggtgctgcgggaccggggccagttcctggtgaacatccccccagctgtgtctgacagcgacagcagccccctggaggagggcgtgaccatggctgatgagatgagcagccccccagctgacatcagtgacctggccagcgagctgagccaggccccacccagccacatccccccaccacccaggcatgcccagaggagccctgaggccagccagacagacagccctgtggagagcccccggctgcggcgggagagctctgtggacagcaggaccatcagcgagccagatgagcagaggtctgagctgccccgggagagcagctatgacatctacagagtgcccagcagccagagcatggaggaccggggctacagcccagacaccagggtggtgcgcttcctgaagggcaagagcatcggcctgcggctggccggcggcaatgatgtgggcatctttgtgtctggagtgcaggccggcagccctgcagatggccagggcatccaggagggggaccagatcctgcaggtgaatgatgtgcccttccagaacctgacccgggaggaggccgtgcagttcctgctgggcctgcccccaggagaggagatggagctggtgacccagaggaagcaggacatcttctggaagatggtgcagagccgggtgggggacagcttctacatccgcacccactttgagctggagcccagccccccatctggcctgggcttcaccagaggagatgtgttccacgtgctggacaccctgcaccctggccctggccagagccacgcccggggcggccactggctggccgtgaggatgggccgggacctgcgggagcaggagcggggcatcatccccaaccagagcagagctgagcagctggccagcctggaggccgcccagagagctgtgggcgtgggccctggcagcagcgctggcagcaatgcccgggcagagttctggaggctgcggggcctgcggcggggggccaagaagaccacccagaggagccgggaggacctgagcgccctgacccggcagggccgctacccaccctatgaaagagtggtgctgcgggaggccagcttcaagaggcctgtggtgatcctgggccctgtggccgacatcgccatgcagaagctgacagctgagatgccagaccagtttgaaattgctgagaccgtgtccaggacagacagccccagcaagatcatcaagctggacacagtgcgggtgattgctgagaaggacaagcacgccctgctggatgtgacccccagcgccatcgagcggctgaactacgtgcagtactaccccatcgtggtgttcttcatccctgagagcaggcctgccctgaaggccctgcggcagtggctggccccagccagcagaagaagcacccggcggctgtatgcccaggcccagaagctgaggaagcacagcagccacctgttcaccgccaccatccccctgaatggcaccagtgacacctggtaccaggagctgaaggccatcatccgggagcagcagacccggcccatctggacagctgaggaccagctggatggcagcctggaggacaacctggacctgccccaccacggcctggccgacagcagcgctgacctgagctgtgacagccgggtgaacagcgactatgaaacagatggagagggcggggcctacacagatggagagggctacacagatggagagggcggcccctacacagatgtggatgatgagcccccagccccagccctggcccggagcagcgagcctgtgcaggctgatgagagccagagcccccgggaccggggccgcatcagcgcccaccagggcgcccaggtggacagccgccacccccagggccagtggaggcaggacagcatgaggacctatgagcgggaggccctgaagaagaagttcatgagggtgcatgatgctgagagcagtgatgaagatggctatgactggggccctgccacagacctgtag

SEQ ID NO: 173340 - DNA, 2802 bp, synthetic construct
  misc_feature 1..2802: note = Description of Artificial Sequence: Synthetic coding sequence
  source 1..2802: mol_type = other DNA
atggaggagctgaccatctgggagcagcacacagccaccctgagcaaggacccccggcggggcttcggcatcgccatcagcggcggccgggacaggcctgggggctccatggtggtgtctgatgtggtgcctgggggccctgctgagggccgcctgcagacaggagaccacatcgtgatggtgaatggagtgtccatggagaatgccaccagcgcctttgccatccagatcctgaagacctgcaccaagatggccaacatcaccgtgaagaggccccggcgcatccacctgcctgccaccaaggccagccccagcagccctggccggcaggacagtgatgaagatgatggcccccagagggtggaggaggtggaccagggccggggctatgatggagacagcagcagcggcagcggccgctcctgggatgagaggagcagaagacccaggcctggaagaagaggccgggccggcagccacggccgccgcagccctgggggcggcagcgaggccaacggcctggccctggtgtctggcttcaagaggctgccccggcaggatgtgcagatgaagcctgtgaagtctgtgctggtgaagaggcgggacagcgaggagtttggagtgaagctgggcagccagatcttcatcaagcacatcacagacagcggcctggccgcccggcaccggggcctgcaggagggggacctgatcctgcagatcaatggagtgagcagccagaacctgagcctgaatgacacccggcggctgattgagaagtctgagggcaagctgagcctgctggtgctgcgggaccggggccagttcctggtgaacatccccccagctgtgtctgacagcgacagcagccccctggaggagggcgtgaccatggctgatgagatgagcagccccccagctgacatcagtgacctggccagcgagctgagccaggccccacccagccacatccccccaccacccaggcatgcccagaggagccctgaggccagccagacagacagccctgtggagagcccccggctgcggcgggagagctctgtggacagcaggaccatcagcgagccagatgagcagaggtctgagctgccccgggagagcagctatgacatctacagagtgcccagcagccagagcatggaggaccggggctacagcccagacaccagggtggtgcgcttcctgaagggcaagagcatcggcctgcggctggccggcggcaatgatgtgggcatctttgtgtctggagtgcaggccggcagccctgcagatggccagggcatccaggagggggaccagatcctgcaggtgaatgatgtgcccttccagaacctgacccgggaggaggccgtgcagttcctgctgggcctgcccccaggagaggagatggagctggtgacccagaggaagcaggacatcttctggaagatggtgcagagccgggtgggggacagcttctacatccgcacccactttgagctggagcccagcccccccagcggcctgggcttcaccagaggagatgtgttccacgtgctggacaccctgcaccctggccctggccagagccacgcccggggcggccactggctggccgtgaggatgggccgggacctgcgggagcaggagcggggcatcatccccaaccagagcagagctgagcagctggccagcctggaggccgcccagagagctgtgggcgtgggccctggcagcagcgctggcagcaatgcccgggcagagttctggaggctgcggggcctgcggcggggggccaagaagaccacccagaggagccgggaggacctgagcgccctgacccggcagggccgctacccaccctatgagcgggtggtgctgcgggaggccagcttcaagaggcctgtggtgatcctgggccctgtggccgacatcgccatgcagaagctgacagctgagatgccagaccagtttgaaattgctgagaccgtgtccaggacagacagccccagcaagatcatcaagctggacacagtgcgggtgattgctgagaaggacaagcacgccctgctggatgtgaccccatctgccatcgagcggctgaactacgtgcagtactaccccatcgtggtgttcttcatccctgagagcaggcctgccctgaaggccctgcggcagtggctggccccagccagccgccgcagcacccggcggctgtatgcccaggcccagaagctgaggaagcacagcagccacctgttcaccgccaccatccccctgaatggcaccagtgacacctggtaccaggagctgaaggccatcatccgggagcagcagacccggcccatctggacagctgaggaccagctggatggcagcctggaggacaacctggacctgccccaccacggcctggccgacagcagcgctgacctgagctgtgacagccgggtgaacagcgactatgaaacagatggagagggcggggcctacacagatggagagggctacacagatggagagggcggcccctacacagatgtggatgatgagcccccagccccagccctggcccggagcagcgagcctgtgcaggctgatgagagccagagcccccgggaccggggccgcatcagcgcccaccagggcgcccaggtggacagccgccacccccagggccagtggaggcaggacagcatgaggacctatgaaagagaggccctgaagaagaagttcatgagggtgcatgatgctgagagcagtgatgaagatggctatgactggggccctgccacagacctgtag

SEQ ID NO: 173341 - DNA, 2652 bp, synthetic construct
  misc_feature 1..2652: note = Description of Artificial Sequence: Synthetic coding sequence
  source 1..2652: mol_type = other DNA
atggtggtgtctgatgtggtgcctgggggccctgctgagggccgcctgcagacaggagaccacatcgtgatggtgaatggagtgtccatggagaatgccaccagcgcctttgccatccagatcctgaagacctgcaccaagatggccaacatcaccgtgaagaggccccggcgcatccacctgcctgccaccaaggccagccccagcagccctggccggcaggacagtgatgaagatgatggcccccagagggtggaggaggtggaccagggccggggctatgatggagacagcagcagcggcagcggccgctcctgggatgagaggagcagaagacccaggcctggaagaagaggccgggccggcagccacggccgccgcagccctgggggcggcagcgaggccaacggcctggccctggtgtctggcttcaagaggctgccccggcaggatgtgcagatgaagcctgtgaagtctgtgctggtgaagaggcgggacagcgaggagtttggagtgaagctgggcagccagatcttcatcaagcacatcacagacagcggcctggccgcccggcaccggggcctgcaggagggggacctgatcctgcagatcaatggagtgagcagccagaacctgagcctgaatgacacccggcggctgattgagaagtctgagggcaagctgagcctgctggtgctgcgggaccggggccagttcctggtgaacatccccccagctgtgtctgacagcgacagcagccccctggaggacatcagtgacctggccagcgagctgagccaggccccacccagccacatccccccaccacccaggcatgcccagaggagccctgaggccagccagacagacagccctgtggagagcccccggctgcggcgggagagctctgtggacagcaggaccatcagcgagccagatgagcagaggtctgagctgccccgggagagcagctatgacatctacagagtgcccagcagccagagcatggaggaccggggctacagcccagacaccagggtggtgcgcttcctgaagggcaagagcatcggcctgcggctggccggcggcaatgatgtgggcatctttgtgtctggagtgcaggccggcagccctgcagatggccagggcatccaggagggggaccagatcctgcaggtgaatgatgtgcccttccagaacctgacccgggaggaggccgtgcagttcctgctgggcctgcccccaggagaggagatggagctggtgacccagaggaagcaggacatcttctggaagatggtgcagagccgggtgggggacagcttctacatccgcacccactttgagctggagcccagcccccccagcggcctgggcttcaccagaggagatgtgttccacgtgctggacaccctgcaccctggccctggccagagccacgcccggggcggccactggctggccgtgaggatgggccgggacctgcgggagcaggagcggggcatcatccccaaccagagcagagctgagcagctggccagcctggaggccgcccagagagctgtgggcgtgggccctggcagcagcgctggcagcaatgcccgggcagagttctggaggctgcggggcctgcggcggggggccaagaagaccacccagaggagccgggaggacctgagcgccctgacccggcagggccgctacccaccctatgagcgggtggtgctgcgggaggccagcttcaagaggcctgtggtgatcctgggccctgtggccgacatcgccatgcagaagctgacagctgagatgccagaccagtttgaaattgctgagaccgtgtccaggacagacagccccagcaagatcatcaagctggacacagtgcgggtgattgctgagaaggacaagcacgccctgctggatgtgaccccatctgccatcgagcggctgaactacgtgcagtactaccccatcgtggtgttcttcatccctgagagcaggcctgccctgaaggccctgcggcagtggctggccccagccagccgccgcagcacccggcggctgtatgcccaggcccagaagctgaggaagcacagcagccacctgttcaccgccaccatccccctgaatggcaccagtgacacctggtaccaggagctgaaggccatcatccgggagcagcagacccggcccatctggacagctgaggaccagctggatggcagcctggaggacaacctggacctgccccaccacggcctggccgacagcagcgctgacctgagctgtgacagccgggtgaacagcgactatgaaacagatggagagggcggggcctacacagatggagagggctacacagatggagagggcggcccctacacagatgtggatgatgagcccccagccccagccctggcccggagcagcgagcctgtgcaggctgatgagagccagagcccccgggaccggggccgcatcagcgcccaccagggcgcccaggtggacagccgccacccccagggccagtggaggcaggacagcatgaggacctatgaaagagaggccctgaagaagaagttcatgagggtgcatgatgctgagagcagtgatgaagatggctatgactggggccctgccacagacctgtag

SEQ ID NO: 173342 - DNA, 2760 bp, synthetic construct
  misc_feature 1..2760: note = Description of Artificial Sequence: Synthetic coding sequence
  source 1..2760: mol_type = other DNA
atggaggagctgaccatctgggagcagcacacagccaccctgagcaaggacccccggcggggcttcggcatcgccatcagcggcggccgggacaggcctgggggctccatggtggtgtctgatgtggtgcctgggggccctgctgagggccgcctgcagacaggagaccacatcgtgatggtgaatggagtgtccatggagaatgccaccagcgcctttgccatccagatcctgaagacctgcaccaagatggccaacatcaccgtgaagaggccccggcgcatccacctgcctgccaccaaggccagccccagcagccctggccggcaggacagtgatgaagatgatggcccccagagggtggaggaggtggaccagggccggggctatgatggagacagcagcagcggcagcggccgctcctgggatgagaggagcagaagacccaggcctggaagaagaggccgggccggcagccacggccgccgcagccctgggggcggcagcgaggccaacggcctggccctggtgtctggcttcaagaggctgccccggcaggatgtgcagatgaagcctgtgaagtctgtgctggtgaagaggcgggacagcgaggagtttggagtgaagctgggcagccagatcttcatcaagcacatcacagacagcggcctggccgcccggcaccggggcctgcaggagggggacctgatcctgcagatcaatggagtgagcagccagaacctgagcctgaatgacacccggcggctgattgagaagtctgagggcaagctgagcctgctggtgctgcgggaccggggccagttcctggtgaacatccccccagctgtgtctgacagcgacagcagccccctggaggacatcagtgacctggccagcgagctgagccaggccccacccagccacatccccccaccacccaggcatgcccagaggagccctgaggccagccagacagacagccctgtggagagcccccggctgcggcgggagagctctgtggacagcaggaccatcagcgagccagatgagcagaggtctgagctgccccgggagagcagctatgacatctacagagtgcccagcagccagagcatggaggaccggggctacagcccagacaccagggtggtgcgcttcctgaagggcaagagcatcggcctgcggctggccggcggcaatgatgtgggcatctttgtgtctggagtgcaggccggcagccctgcagatggccagggcatccaggagggggaccagatcctgcaggtgaatgatgtgcccttccagaacctgacccgggaggaggccgtgcagttcctgctgggcctgcccccaggagaggagatggagctggtgacccagaggaagcaggacatcttctggaagatggtgcagagccgggtgggggacagcttctacatccgcacccactttgagctggagcccagcccccccagcggcctgggcttcaccagaggagatgtgttccacgtgctggacaccctgcaccctggccctggccagagccacgcccggggcggccactggctggccgtgaggatgggccgggacctgcgggagcaggagcggggcatcatccccaaccagagcagagctgagcagctggccagcctggaggccgcccagagagctgtgggcgtgggccctggcagcagcgctggcagcaatgcccgggcagagttctggaggctgcggggcctgcggcggggggccaagaagaccacccagaggagccgggaggacctgagcgccctgacccggcagggccgctacccaccctatgagcgggtggtgctgcgggaggccagcttcaagaggcctgtggtgatcctgggccctgtggccgacatcgccatgcagaagctgacagctgagatgccagaccagtttgaaattgctgagaccgtgtccaggacagacagccccagcaagatcatcaagctggacacagtgcgggtgattgctgagaaggacaagcacgccctgctggatgtgaccccatctgccatcgagcggctgaactacgtgcagtactaccccatcgtggtgttcttcatccctgagagcaggcctgccctgaaggccctgcggcagtggctggccccagccagccgccgcagcacccggcggctgtatgcccaggcccagaagctgaggaagcacagcagccacctgttcaccgccaccatccccctgaatggcaccagtgacacctggtaccaggagctgaaggccatcatccgggagcagcagacccggcccatctggacagctgaggaccagctggatggcagcctggaggacaacctggacctgccccaccacggcctggccgacagcagcgctgacctgagctgtgacagccgggtgaacagcgactatgaaacagatggagagggcggggcctacacagatggagagggctacacagatggagagggcggcccctacacagatgtggatgatgagcccccagccccagccctggcccggagcagcgagcctgtgcaggctgatgagagccagagcccccgggaccggggccgcatcagcgcccaccagggcgcccaggtggacagccgccacccccagggccagtggaggcaggacagcatgaggacctatgaaagagaggccctgaagaagaagttcatgagggtgcatgatgctgagagcagtgatgaagatggctatgactggggccctgccacagacctgtag

SEQ ID NO: 173343 - DNA, 1623 bp, synthetic construct; identical to SEQ ID NO: 146586
  misc_feature 1..1623: note = Description of Artificial Sequence: Synthetic coding sequence
  source 1..1623: mol_type = other DNA

SEQ ID NO: 173344 - DNA, 3627 bp, synthetic construct
  misc_feature 1..3627: note = Description of Artificial Sequence: Synthetic coding sequence
  source 1..3627: mol_type = other DNA
atggacctgcacatgatgaactgtgagctgctggccacctgcagcgccctgggctacctggagggggacacctaccacaaggagccagactgcctggagagcgtgaaggacctgatccgctacctgcggcatgaagatgagaccagagatgtgcggcagcagctgggcgccgcccagatcctgcagagcgacctgctgcccatcctgacccagcaccaccaggacaagcccctgtttgatgctgtgatccggctgatggtgaacctgacccagcctgccctgctgtgctttggaaacctgcccaaggagcccagcttccgccaccacttcctgcaggtgctgacctacctgcaggcctacaaggaggcctttgccagcgagaaggccttcggcgtgctgtctgagaccctgtatgagctgctgcagctgggctgggaggagcggcaggaggaggacaacctgctgattgaaagaatcctgctgctggtgaggaacatcctgcacgtgcctgctgacctggaccaggagaagaagattgatgatgatgccagcgcccatgaccagctgctgtgggccatccacctgagcggcctggatgacctgctgctcttcctggccagcagcagcgctgaggagcagtggagcctgcacgtgctggagatcgtgtccctgatgttccgggaccagaaccctgagcagctggccggcgtgggccagggccgcctggcccaggagaggtctgctgactttgctgagctggaggtgctgcggcagcgggagatggccgagaagaagacccgggccctgcagaggggcaacagacacagcagatttggaggcagctacatcgtgcagggcctgaagagcatcggggagcgggacctgatcttccacaagggcctgcacaacctgaggaactacagcagtgacctgggcaagcagcccaagaaggtgcccaagaggcggcaggccgcccgggagctgagcatccagaggagaagtgccctgaatgtgcggctcttcctgcgggacttctgcagcgagttcctggagaactgctacaaccggctgatgggctctgtgaaggaccacctgctgcgggagaaggcccagcagcatgatgagacctactacatgtgggccctggccttcttcatggccttcaacagagctgccagcttccggcccggcctggtgtctgagaccctgtctgtgaggaccttccacttcatcgagcagaacctgaccaactactatgagatgatgctgacagacaggaaggaggccgcctcctgggcccggaggatgcacctggccctgaaggcctaccaggagctgctggccaccgtgaatgagatggacatcagcccagatgaggccgtgcgggagagcagccgcatcatcaagaacaacatcttctacgtgatggagtaccgggagctgttcctggccctcttcaggaagtttgatgagcgctgccagcccaggagcttcctgcgggacctggtggagaccacccacctgttcctgaagatgctggagcgcttctgccgcagccggggcaacctggtggtgcagaacaagcagaagaagaggaggaagaagaagaagaaggtgctggaccaggccatcgtgtctggaaatgtgcccagcagccctgaggaggtggaggccgtgtggccagccctggccgagcagctgcagtgctgtgcccagaacagcgagctgtccatggacagcgtggtgccctttgatgctgccagcgaggtgcctgtggaggagcagagagctgaggccatggtgcgcatccaggactgcctgctggccggccaggccccccaggccctgaccctgctgcggagcgcccgggaggtgtggccagaaggagatgtgtttggcagccaggacatcagccctgaggaggagatccagctgctgaagcagatcctgagcgcccccctgccccggcagcagggccctgaggagagaggagctgaggaggaggaggaggaggaggaggaggaggaggaggagctgcaggtggtgcaggtgtctgagaaggagttcaacttcctggactacctgaagagatttgcctgcagcacagtggtgcgggcctacgtgctgctgctgcggagctaccagcagaacagcgcccacaccaaccactgcatcgtgaagatgctgcaccggctggcccatgacctgaagatggaggccctgctcttccagctgagcgtcttctgcctcttcaaccggctgctgagtgaccctgctgctggggcctacaaggagctggtgacctttgccaagtacatcctgggcaagttctttgccctggccgctgtgaaccagaaggcctttgtggagctgctcttctggaagaacacagctgtggtgcgggagatgacagagggctacggcagcctggatgacaggagcagcagcagaagagcccccacctggagccctgaggaggaggcccacctgcgggagctgtacctggccaacaaggatgtggagggccaggatgtggtggaggccatcctggcccacctgaacacagtgcccaggaccaggaagcagatcatccaccacctggtgcagatgggcctggccgacagcgtgaaggacttccagaggaagggcacccacatcgtgctgtggacaggagaccaggagctggagctgcagaggctgtttgaggagttccgggacagtgatgatgtgctgggccacatcatgaagaacatcacagccaagaggagccgggccagaattgtggacaagctgctggccctgggcctggtggccgagcggcgggagctgtacaagaagaggcagaagaagctggccagcagcatcctgcccaacggggctgagagcctgaaggacttctgccaggaggacctggaggaggaggagaacctgcctgaggaggacagcgaggaggaggaggagggcggcagcgaggccgagcaggtgcagggcagcctggtgctgagcaatgaaaacctgggccagagcctgcaccaggagggcttcagcatccccctgctgtggctgcagaactgcctgatccgggcagcagatgaccgggaggaggatggctgcagccaggccgtgcccctggtgcccctgacagaggagaatgaggaggccatggagaatgagcagttccagcagctgctgaggaagctgggcgtgcggcccccagccagcggccaggagaccttctggaggatcccagccaagctgagccccacccagctgcggcgggctgctgccagcctgagccagcctgaggaggagcagaagctgcagcctgagctgcagcccaaggtgcctggagagcagggcagtgatgaggagcactgcaaggagcaccgggcccaggccctgcgggccctgctgctggcccacaagaagaaggccggcctggccagccctgaggaggaggatgctgtgggcaaggagcccctgaaggccgcccccaagaagaggcagctgctggacagtgatgaggagcaggaggaggatgagggcaggaacagagcccctgagctgggcgcccctggcatccagaagaagaagcgctaccagattgaagatgatgaagatgactag

SEQ ID NO: 173345 - DNA, 906 bp, synthetic construct
  misc_feature 1..906: note = Description of Artificial Sequence: Synthetic coding sequence
  source 1..906: mol_type = other DNA
atgctggagccccaggagaatggagtcatcgacctgcctgactatgaacatgtggaggatgagaccttcccccccttccccccaccagccagccctgagcggcaggatggagagggcacagagccagatgaggagagcggaaatggagcccctgtgcgggtgccccccaagaggacagtgaagaggaacatccccaagctggatgcccagaggctcatcagcgagcggggcctgcctgccctgcggcacgtgtttgacaaggccaagttcaagggcaaaggacatgaagctgaggacctgaagatgctgatccgccacatggagcactgggcccacaggctcttccccaagctgcagtttgaggacttcatcgacagagtggagtacctgggcagcaagaaggaggtgcagacctgcctgaagaggatccggctggacctgcccatcctgcacgaggactttgtgagcaacaatgatgaggtggctgaaaataatgaacatgatgtgaccagcacagagctggaccccttcctgaccaacctgtctgagagcgagatgtttgccagcgagctgagccgcagcctgacagaggagcagcagcagagaattgaaagaaacaagcagctggccctggagcggcggcaggccaagctgctgagcaacagccagaccctgggcaatgacatgctgatgaacaccccccgggcccacacagtggaggaggtgaacacagatgaggaccagaaggaggagagcaatggcctgaatgaagacatcctggacaacccctgcaatgatgccatcgccaacaccctgaatgaggaggagaccctgctggaccagagcttcaagaatgtgcagcagcagctggatgccaccagcaggaacatcacagaggccaggtag

SEQ ID NO: 173346 - DNA, 603 bp, synthetic construct
  misc_feature 1..603: note = Description of Artificial Sequence: Synthetic coding sequence
  source 1..603: mol_type = other DNA
atgctgatccgccacatggagcactgggcccacaggctcttccccaagctgcagtttgaggacttcatcgacagagtggagtacctgggcagcaagaaggaggtgcagacctgcctgaagaggatccggctggacctgcccatcctgcatgaagattttgtgagcaacaatgatgaggtggccgagaacaatgaacatgatgtgaccagcacagagctggaccccttcctgaccaacctgtctgagagcgagatgtttgccagcgagctgagccgcagcctgacagaggagcagcagcagagaattgaaagaaacaagcagctggccctggagcggcggcaggccaagctgctgagcaacagccagaccctgggcaatgacatgctgatgaacaccccccgggcccacacagtggaggaggtgaacacagatgaggaccagaaggaggagagcaatggcctgaatgaagacatcctggacaacccctgcaatgatgccatcgccaacaccctgaatgaggaggagaccctgctggaccagagcttcaagaatgtgcagcagcagctggatgccaccagcaggaacatcacagaggccaggtag

SEQ ID NO: 173347 - DNA, 537 bp, synthetic construct
  misc_feature 1..537: note = Description of Artificial Sequence: Synthetic coding sequence
  source 1..537: mol_type = other DNA
atgatgatccacggcttccagagcagccaccgggacttctgcttcggcccctggaagctgacagccagcaagacccacatcatgaagtctgcagatgtggagaagctggctgatgagctgcacatgcccagcctgcctgagatgatgtttggagacaacgtgctgcgcatccagcacggcagcggctttggaattgagttcaatgccacagatgccctgcgctgtgtgaacaactaccagggcatgctgaaggtggcctgtgccgaggagtggcaggagagcaggacagaaggagagcacagcaaggaggtgatcaagccctatgactggacctacaccacagactacaagggcaccctgctgggggagagcctgaagctgaaggtggtgcccaccacagaccacatcgacacagagaagctgaaggcccgggagcagatcaagttctttgaggaggtgctgctgtttgaagatgagctgcatgaccatggagtgagcagcctgtctgtgaagatccctgggggcggccacctgtag

SEQ ID NO: 173348 - DNA, 819 bp, synthetic construct
  misc_feature 1..819: note = Description of Artificial Sequence: Synthetic coding sequence
  source 1..819: mol_type = other DNA
atgatgatccacggcttccagagcagccaccgggacttctgcttcggcccctggaagctgacagccagcaagacccacatcatgaagtctgcagatgtggagaagctggctgatgagctgcacatgcccagcctgcctgagatgatgtttggagacaacgtgctgcgcatccagcacggcagcggctttggaattgagttcaatgccacagatgccctgcgctgtgtgaacaactaccagggcatgctgaaggtggcctgtgccgaggagtggcaggagagcaggacagaaggagagcacagcaaggaggtgatcaagccctatgactggacctacaccacagactacaagggcaccctgctgggggagagcctgaagctgaaggtggtgcccaccacagaccacatcgacacagagaagctgaaggcccgggagcagatcaagttctttgaggaggtgctgctgtttgaagatgagctgcatgaccatggagtgagcagcctgtctgtgaagatccgggtgatgcccagcagcttcttcctgctgctgcgcttcttcctgagaattgatggagtgctgatccgcatgaatgacacccggctgtaccatgaagctgacaagacctacatgctgcgggagtacaccagccgggagagcaagatcagcagcctgatgcacgtgccccccagcctcttcacagagcccaatgagatcagccagtacctgcccatcaaggaggccgtgtgtgagaagctgatcttccctgagagaattgaccccaacccagctgacagccagaagagcacccaggtggagtag

SEQ ID NO: 173349 - DNA, 1143 bp, synthetic construct; identical to SEQ ID NO: 161301
  misc_feature 1..1143: note = Description of Artificial Sequence: Synthetic coding sequence
  source 1..1143: mol_type = other DNA

SEQ ID NO: 173350 - DNA, 756 bp, synthetic construct
  misc_feature 1..756: note = Description of Artificial Sequence: Synthetic coding sequence
  source 1..756: mol_type = other DNA
atgatctacaccatgaagaaggtgcacgccctgtgggcctctgtgtgcctgctgctgaacctggccccagcccccctgaatgctgacagcgaggaggatgaggagcacaccatcatcacagacacagagctgccccccctgaagctgatgcacagcttctgtgccttcaaggcagatgatggcccctgcaaggccatcatgaagcgcttcttcttcaacatcttcacccggcagtgtgaggagttcatctacggcggctgtgagggcaaccagaacagatttgagagcctggaggagtgcaagaagatgtgcacccgggacaatgccaaccgcatcatcaagaccaccctgcagcaggagaagccagacttctgcttcctggaggaggaccccggcatctgccggggctacatcacccgctacttctacaacaaccagaccaagcagtgtgagcgcttcaagtatggaggctgcctgggcaacatgaacaactttgagaccctggaggagtgcaagaacatctgtgaagatggccccaacggcttccaggtggacaactacggcacccagctgaatgctgtgaacaacagcctgaccccccagagcaccaaggtgcccagcctgtttgtgaccaaggagggcaccaatgatggctggaagaatgctgcccacatctaccaggtgttcctgaatgccttctgcatccacgcctccatgttcttcctgggcctggacagcatcagctgcctgtgctag

SEQ ID NO: 173351 - DNA, 915 bp, synthetic construct; identical to SEQ ID NO: 161158
  misc_feature 1..915: note = Description of Artificial Sequence: Synthetic coding sequence
  source 1..915: mol_type = other DNA

SEQ ID NO: 173352 - DNA, 756 bp, synthetic construct; identical to SEQ ID NO: 173350
  misc_feature 1..756: note = Description of Artificial Sequence: Synthetic coding sequence
  source 1..756: mol_type = other DNA

SEQ ID NO: 173353 - DNA, 231 bp, synthetic construct
  misc_feature 1..231: note = Description of Artificial Sequence: Synthetic coding sequence
  source 1..231: mol_type = other DNA
atgatctacaccatgaagaaggtgcacgccctgtgggcctctgtgtgcctgctgctgaacctggccccagcccccctgaatgctgacagcgaggaggatgaggagcacaccatcatcacagacacagagctgccccccctgaagctgatgcacagcttctgtgccttcaaggcagatgatggcccctgcaaggccatcatgaagcgcttcttcttcaacatcttcacctag

SEQ ID NO: 173354 - DNA, 186 bp, synthetic construct
  misc_feature 1..186: note = Description of Artificial Sequence: Synthetic coding sequence
  source 1..186: mol_type = other DNA
atgatctacaccatgaagaaggtgcacgccctgtgggcctctgtgtgcctgctgctgaacctggccccagcccccctgaatgctgacagcgaggaggatgaggagcacaccatcatcacagacacagagctgccccccctgaagctgatgcacagcttctgtgccttcaaggcagatgatggatag

SEQ ID NO: 173355 - DNA, 321 bp, synthetic construct
  misc_feature 1..321: note = Description of Artificial Sequence: Synthetic coding sequence
  source 1..321: mol_type = other DNA
atgatctacaccatgaagaaggtgcacgccctgtgggcctctgtgtgcctgctgctgaacctggccccagcccccctgaatgctgacagcgaggaggatgaggagcacaccatcatcacagacacagagctgccccccctgaagctgatgcacagcttctgtgccttcaaggcagatgatggcccctgcaaggccatcatgaagcgcttcttcttcaacatcttcacccggcagtgtgaggagttcatctacggcggctgtgagggcaaccagaacagatttgagagcctggaggagtgcaagaagatgtgcaccaggtag

SEQ ID NO: 173356 - DNA, 867 bp, synthetic construct
  misc_feature 1..867: note = Description of Artificial Sequence: Synthetic coding sequence
  source 1..867: mol_type = other DNA
atgatctacaccatgaagaaggtgcacgccctgtgggcctctgtgtgcctgctgctgaacctggccccagcccccctgaatgctgacagcgaggaggatgaggagcacaccatcatcacagacacagagctgccccccctgaagctgatgcacagcttctgtgccttcaaggcagatgatggcccctgcaaggccatcatgaagcgcttcttcttcaacatcttcacccggcagtgtgaggagttcatctacggcggctgtgagggcaaccagaacagatttgagagcctggaggagtgcaagaagatgtgcacccgggacaatgccaaccgcatcatcaagaccaccctgcagcaggagaagccagacttctgcttcctggaggaggaccccggcatctgccggggctacatcacccgctacttctacaacaaccagaccaagcagtgtgagcgcttcaagtatggaggctgcctgggcaacatgaacaactttgagaccctggaggagtgcaagaacatctgtgaagatggccccaacggcttccaggtggacaactacggcacccagctgaatgctgtgaacaacagcctgaccccccagagcaccaaggtgcccagcctgtttgagttccacggccccagctggtgcctgaccccagctgaccggggcctgtgccgggccaatgaaaatcgcttctactacaacagcgtgattggaaaatgtcggcccttcaagtacagcggctgcggcggcaatgaaaacaacttcaccagcaagcaggagtgcctgcgggcctgcaagaagggcttcatccagaggatcagcaaaggaggcctcatcaagaccaagaggaagaggaagtag

SEQ ID NO: 173357 - DNA, 321 bp, synthetic construct; identical to SEQ ID NO: 173355
  misc_feature 1..321: note = Description of Artificial Sequence: Synthetic coding sequence
  source 1..321: mol_type = other DNA

SEQ ID NO: 173358 - DNA, 318 bp, synthetic construct
  misc_feature 1..318: note = Description of Artificial Sequence: Synthetic coding sequence
  source 1..318: mol_type = other DNA
atgatctacaccatgaagaaggtgcacgccctgtgggcctctgtgtgcctgctgctgaacctggccccagcccccctgaatgctgacagcgaggaggatgaggagcacaccatcatcacagacacagagctgccccccctgaagctgatgcacagcttctgtgccttcaaggcagatgatggcccctgcaaggccatcatgaagcgcttcttcttcaacatcttcacccggcagtgtgaggagttcatctacggcggctgtgagggcaaccagaacagatttgagagcctggaggagtgcaagaagatgtgcacctag

SEQ ID NO: 173359 - DNA, 966 bp, synthetic construct
  misc_feature 1..966: note = Description of Artificial Sequence: Synthetic coding sequence
  source 1..966: mol_type = other DNA
atgggagagccccagggctccatgaggatcctggtgactggaggcagcggcctggtgggcaaggccatccagaaggtggtggctgatggagctggcctgcccggggaggactgggtgtttgtgagcagcaaggatgctgacctgacagacacagcccagacccgggccctgtttgagaaggtgcagcccacccacgtgatccacctggccgccatggtgggcggcctcttcaggaacatcaagtacaacctggacttctggaggaagaatgtgcacatgaatgacaacgtgctgcacagcgcctttgaggtgggcgccaggaaggtggtgtcctgcctgagcacctgcatcttcccagacaagaccacctaccccattgatgagaccatgatccacaatggaccaccccacaacagcaactttggctacagctatgccaagaggatgattgatgtgcagaacagagcctacttccagcagtatggctgcaccttcaccgctgtgatccccaccaacgtgtttggcccccatgacaacttcaacattgaagatggccacgtgctgcccggcctcatccacaaggtgcacctggccaagagcagcggcagcgccctgactgtgtggggcaccggcaacccccggcggcagttcatctacagcctggacctggcccagctgttcatctgggtgctgcgggagtacaatgaggtggagcccatcatcctgtctgtgggggaggaggatgaggtgtccatcaaggaggccgctgaggccgtggtggaggccatggacttccacggggaggtgacctttgacaccaccaagagtgatggccagttcaagaagacagccagcaacagcaagctgcggacctacctgcctgacttccgcttcacccccttcaagcaggccgtgaaggagacctgtgcctggttcacagacaactatgagcaggccaggaagtag

SEQ ID NO: 173360 - DNA, 360 bp, synthetic construct
  misc_feature 1..360: note = Description of Artificial Sequence: Synthetic coding sequence
  source 1..360: mol_type = other DNA
atgggagagccccagggctccatgaggatcctggtgactggaggcagcggcctggtgggcaaggccatccagaaggtggtggctgatggagctggcctgcccggggaggactgggtgtttgtgagcagcaaggatgctgacctgacagacacagcccagacccgggccctgtttgagaaggtgcagcccacccacgtgatccacctggccgccatggtgggcggcctcttcaggaacatcaagtacaacctggacttctggaggaagaatgtgcacatgaatgacaacgtgctgcacagcgcctttgaggtgggcgccaggaaggtggtgtcctgcctgagcacctgcatcttcccctag

SEQ ID NO: 173361 - DNA, 807 bp, synthetic construct
  misc_feature 1..807: note = Description of Artificial Sequence: Synthetic coding sequence
  source 1..807: mol_type = other DNA
atgggagagccccagggctccatgaggatcctggtgactggaggcagcggcctggtgggcaaggccatccagaaggtggtggctgatggagctggcctgcccggggaggactgggtgtttgtgagcagcaaggatgctgacctgacagacacagcccagacccgggccctgtttgagaaggtgcagcccacccacgtgatccacctggccgccatggtgggcggcctcttcaggaacatcaagtacaacctggacttctggaggaagaatgtgcacatgaatgacaacgtgctgcacagcgcctttgaggtgggcgccaggaaggtggtgtcctgcctgagcacctgcatcttcccagacaagaccacctaccccattgatgagaccatgatccacaatggaccaccccacaacagcaactttggctacagctatgccaagaggatgattgatgtgcagaacagagcctacttccagcagtatggctgcaccttcaccgctgtgatccccaccaacgtgtttggcccccatgacaacttcaacattgaagatggccacgtgctgcccggcctcatccacaaggtgcacctggccaagagcagcggcagcgccctgactgtgtggggcaccggcaacccccggcggcagttcatctacagcctggacctggcccagctgttcatctgggtgctgcgggagtacaatgaggtggagcccatcatcctgtctgtgggggaggaggatgaggtgtccatcaaggaggccgctgaggccgtggtggaggccatggacttccacggggagtag

SEQ ID NO: 173362 - DNA, 966 bp, synthetic construct; identical to SEQ ID NO: 173359
  misc_feature 1..966: note = Description of Artificial Sequence: Synthetic coding sequence
  source 1..966: mol_type = other DNA

SEQ ID NO: 173363 - DNA, 597 bp, synthetic construct
  misc_feature 1..597: note = Description of Artificial Sequence: Synthetic coding sequence
  source 1..597: mol_type = other DNA
atgggagagccccagggctccatgaggatcctggtgactggaggcagcggcctggtgggcaaggccatccagaaggtggtggctgatggagctggcctgcccggggaggactgggtgtttgtgagcagcaaggatgctgacctgacagacacagcccagacccgggccctgtttgagaaggtgcagcccacccacgtgatccacctggccgccatggtgggcggcctcttcaggaacatcaagtacaacctggacttctggaggaagaatgtgcacatgaatgacaacgtgctgcacagcgcctttgaggtgggcgccaggaaggtggtgtcctgcctgagcacctgcatcttcccagacaagaccacctaccccattgatgagaccatgatccacaatggaccaccccacaacagcaactttggctacagctatgccaagaggatgattgatgtgcagaacagagcctacttccagcagtatggctgcaccttcaccgctgtgatccccaccaacgtgtttggcccccatgacaacttcaacattgaagatggccacgtgctgcccggcctcatccacaaggtgcacctggcctag

SEQ ID NO: 173364 - DNA, 2658 bp, synthetic construct
  misc_feature 1..2658: note = Description of Artificial Sequence: Synthetic coding sequence
  source 1..2658: mol_type = other DNA
atggtggagaagagcagcattgatgaaaattccatcagcctggagaaggaggtgcgccacgtgcaggagcagaacctggacatcctgaagacagacctgagcctgaagagcttcagcgaggagatctacagcgagagctgtgccctgctgcccaccagcagcgctgacatcgaggagacagacctgtctgagaagagctgccccctggagaatggaggccgcagcagcatcagccacctgaagaaggccgccagcgaggagaagcccctgggcgtgggggagatggaggaggagtgcaccctggagcctgagctggccgccttccccaagcaggacggcggcacccaggagtacacagatgccaccctggaggaccacagaggagatgtgcaggaggccgacaccctgcaccggcagctgagcctgagccagtgcttccccctgctgatgacagaggagcagcagaaccctggagagcagatcagcaccaacatccacgccagcggggaggagaagtgctatgaggaggtgcaggtgcagaatgaggccagcttcagcaccctggagggggagatgattgagaccagcttcagccagaacatccccaagctggatgaggcccacaccacagaggccgctgagagcgagaccagcctgacccagtacctgctggccgccggcaagcgggaggtgcctgagaccaaggacacccgggaccaggccaagctggtgcagagcgagagcatcacctccatggaggtggaggaggtgaccttcaacacagtgtatgagtactacaaccagaagcaggagagcctgggccggcccctgagccctgagagtgacatcagcattggagtgggcagcaccaccagcgaggagatcagcgagctggaccagttctacaccccacccagctctgtggagtactttgagagccccaagagcccagacctgtacttcaaccccagcgacatcaccaagcagagcagcatccacagcggcggggagaccgtggagcgctacagcacccccctgggggaggtggccgagcgctacagcaccccatctgagggggaggtgggggagcgctacagcaccccacctggagagaccctggagcgctacagcaccccacctggagagaccctggagcgctacagcaccccacctggagaggccctggagcgctacagcatccccaccggcggccccaaccccaccggcaccttcaagacctaccccagcaagattgaaagagaagatggcaccccaaatgagcacttctacacccccacagaggagcggggcagcgcctatgagatctggaggagtgacagctttggcaccccaaatgaggccatcgagcccaaggacaatgagatgcctccttccttcatcgagcccctgaccaagaggaaggtgtatgagaacaccaccctgggcttcatcgtggaggtggagggcctgcctgtgcctggggtgaagtggtacagaaacaagagcctgctggagccagatgagcgcatcaagatggagcgggtgggcaatgtgtgcagcctggagatcagcaacatccagaagggggagggcggggagtacatgtgccacgctgtgaacatcatcggggaggccaagagctttgccaacgtggacatcatgccccaggaggagcgggtggtggccctgcccccacctgtgacccaccagcacgtgatggagtttgacctggagcacaccaccagcagcaggacccccagcccccaggagatcgtgctggaggtggagctgtctgagaaggatgtgaaggagtttgagaagcaggtgaagatcgtgacagtgcctgagttcaccccagaccacaagtccatgattgtgtccctggatgtgctgcccttcaactttgtggaccccaacatggacagccgggagggggaggacaaggagctgaagattgacctggaggtgtttgagatgccaccccgcttcatcatgcccatctgtgacttcaagatccctgagaacagtgatgctgtgttcaagtgcagcgtgattggcatccccaccccagaggtgaagtggtacaaggagtacatgtgcattgaaccagacaacatcaagtatgtgatcagcgaggagaagggcagccacaccctgaagatcagaaatgtgtgcctgagtgacagcgccacctaccgctgcagagctgtgaactgtgtgggggaggccatctgccggggcttcctgaccatgggagacagcgagatctttgctgtgattgccaagaagagcaaggtgaccctgagcagcctgatggaggagctggtgctgaagagcaactacacagacagcttctttgagttccaggtggtggagggccccccacgcttcatcaagggcatcagtgactgctacgcccccatcggcacagctgcctacttccagtgcctggtgcggggcagcccccggcccaccgtgtactggtacaaggatggcaagctggtgcagggccgccgcttcaccgtggaggagagcggcaccggcttccacaacctcttcatcaccagcctggtgaagagtgatgaaggagagtaccgctgtgtggccaccaacaagagcggcatggccgagagctttgctgccctgaccctgacctag

SEQ ID NO: 173365 - DNA, 16815 bp, synthetic construct
  misc_feature 1..16815: note = Description of Artificial Sequence: Synthetic coding sequence
  source 1..16815: mol_type = other DNA
atgaccacccaggcccccaccttcacccagcccctgcagagcgtggtggtgctggagggcagcacagccacctttgaggcccacatcagcggcttccctgtgcctgaggtgtcctggttcagagatggccaggtgatcagcaccagcaccctgcccggggtgcagatctccttcagtgatggccgggccaagctgaccatcccagctgtgaccaaggccaacagcggccgctacagcctgaaggccaccaacggcagcggccaggccaccagcacagctgagctgctggtgaaggccgagacagccccacccaactttgtgcagaggctgcagagcatgacagtgcggcagggcagccaggtgcggctgcaggtgcgggtgacaggcatccccacccctgtggtgaagttctacagagatggagctgagatccagagcagcctggacttccagatcagccaggagggggacctgtacagcctgctgattgctgaggcctacccagaagattctggcacctacagcgtgaatgccaccaacagcgtgggccgggccaccagcacagctgagctgctggtgcagggcgaggaggaggtgcctgccaagaagaccaagaccatcgtgtccacagcccagatcagcgagagccggcagaccagaattgagaagaagattgaggcccactttgatgcccggagcatcgccaccgtggagatggtgattgatggagctgctggccagcagctgccccacaagaccccaccccgcatcccccccaagcccaagagccgcagccccaccccacccagcattgctgccaaggcccagctggcccggcagcagagccccagccccatccgccacagccccagccctgtgagacatgtgcgggcccccacccccagccctgtgcgctctgtgtccccagctgcccgcatcagcaccagccccatccgctctgtgcgcagccccctgctgatgaggaagacccaggccagcacagtggccactggacctgaggtgcccccaccctggaagcaggagggctacgtggccagcagcagcgaggccgagatgagggagaccaccctgaccaccagcacccagatcagaacagaggagcgctgggagggccgctatggagtgcaggagcaggtgaccatctctggagctgctggagctgctgcctctgtgtctgccagcgccagctatgctgctgaggccgtggccactggagccaaggaggtgaagcaggatgctgacaagtctgctgctgtggccaccgtggtggccgctgtggacatggcccgggtgcgggagcctgtgatctctgctgtggagcagacagcccagaggaccaccaccacagctgtgcacatccagcctgcccaggagcaggtgaggaaggaggccgagaagacagctgtgaccaaggtggtggtggccgctgacaaggccaaggagcaggagctgaagagcaggaccaaggaggtgatcaccaccaagcaggagcagatgcacgtgacccatgagcagatcaggaaggagacagagaagacctttgtgcccaaggtggtgatctctgctgccaaggccaaggagcaggagacccgcatcagcgaggagatcaccaagaagcagaagcaggtgacccaggaggccatccggcaggagacagagatcacagctgcctccatggtggtggtggccacagccaagagcaccaagctggagaccgtgcctggggcccaggaggagaccaccacccagcaggaccagatgcacctgtcctatgagaagatcatgaaggagaccaggaagacagtggtgcccaaggtgattgtggccacccccaaggtgaaggagcaggacctggtgtcccggggccgggagggcatcaccaccaagcgggagcaggtgcagatcacccaggagaagatgaggaaggaggccgagaagacagccctgagcaccatcgctgtggccacagccaaggccaaggagcaggagaccatcctgcggacccgggagaccatggccacccggcaggagcagatccaggtgacccacggcaaggtggatgtgggcaagaaggccgaggccgtggccaccgtggtggccgctgtggaccaggcccgggtgcgggagccccgggagcccggccacctggaggagagctatgcccagcagaccaccctggagtatggctacaaggagcgcatctctgctgccaaggtggccgagcccccccagaggcctgccagcgagccccacgtggtgcccaaggctgtgaagcccagggtcatccaggcccccagcgagacccacatcaagaccacagaccagaagggcatgcacatcagcagccagatcaagaagaccacagacctgaccacagagcggctggtgcacgtggacaagaggcccaggacagccagcccccacttcaccgtgtccaagatctctgtgcccaagacagagcacggctatgaggccagcattgctggcagcgccatcgccaccctgcagaaggagctgagcgccaccagcagcgcccagaagatcaccaagtctgtgaaggcccccaccgtgaagcccagcgagaccagggtgcgggcagagcccacccccctgccccagttcccctttgctgacaccccagacacctacaagtctgaggccggcgtggaggtgaagaaggaggtgggcgtgtccatcaccggcaccaccgtgcgggaggagagatttgaggtgctgcacggccgggaggccaaggtgacagaaacagcccgggtgcctgcccctgtggagatccctgtgaccccacccaccctggtgtctggcctgaagaatgtgacagtgattgaaggagagagcgtgaccctggagtgccacatcagcggctaccccagccccaccgtgacctggtaccgggaggactaccagatcgagagcagcattgacttccagatcaccttccagagcggcatcgcccggctgatgatccgggaggcctttgctgaggacagcggccgcttcacctgcagcgctgtgaatgaagctggcaccgtgtccaccagctgctacctggccgtgcaggtgtctgaggagtttgagaaggagaccacagctgtgacagagaagttcaccacagaggagaagagatttgtggagagcagagatgtggtgatgacagacaccagcctgacagaggagcaggccggccctggagagcctgctgccccctacttcatcaccaagcctgtggtgcagaagctggtggagggcggctctgtggtgtttggctgccaggtgggcggcaaccccaagccccacgtgtactggaagaagagcggcgtgcccctgaccaccggctaccgctacaaggtgtcctacaacaagcagacaggagagtgcaagctggtgatctccatgacctttgctgatgatgctggggagtacaccatcgtggtgaggaacaagcacggggagaccagcgccagcgccagcctgctggaggaggccgactatgagctgctgatgaagagccagcaggagatgctgtaccagacccaggtgacagcctttgtgcaggagcccaaggtgggggagacagcccctggctttgtgtacagtgaatatgagaaggagtatgagaaggagcaggccctgatcaggaagaagatggccaaggacacagtggtggtgaggacctacgtggaggaccaggagttccacatcagcagctttgaggagcggctcatcaaggagattgagtaccgcatcatcaagaccaccctggaggagctgctggaggaggatggagaggagaagatggctgtggacatcagcgagagcgaggccgtggagagcggctttgacagccgcatcaagaactaccgcatcctggagggcatgggcgtgaccttccactgcaagatgagcggctaccccctgcccaagatcgcctggtacaaggatggcaagaggatcaagcatggagagcgctaccagatggacttcctgcaggacggccgggccagcctgcgcatccctgtggtgctgcctgaagatgagggcatctacacagcctttgccagcaacatcaagggaaatgccatctgcagcggcaagctgtatgtggagcctgctgcccccctgggcgcccccacctacatccccaccctggagcctgtgagccgcatccgcagcctgagccccaggtctgtgagccgcagccccatccgcatgagccctgccaggatgagccctgccaggatgagccctgccaggatgagccctgccaggatgagccctggaagaaggctggaggagacagatgagagccagctggagcggctgtacaagcctgtgtttgtgctgaagcctgtgtccttcaagtgcctggagggccagacagccaggtttgacctgaaggtggtgggccggcccatgcctgagaccttctggttccatgatggccagcagatcgtgaatgactacacccacaaggtggtgatcaaggaggatggcacccagagcctcatcatcgtgcctgccacccccagcgacagcggggagtggacagtggtggcccagaacagagctggccgcagcagcatcagcgtcatcctgactgtggaggccgtggagcaccaggtgaagcccatgtttgtggagaagctgaagaatgtgaacatcaaggagggcagccggctggagatgaaggtgcgggccaccggcaaccccaacccagacatcgtgtggctgaagaacagcgacatcatcgtgccccacaagtaccccaagatccgcatcgagggcaccaagggggaggccgccctgaagattgacagcacagtgtcccaggacagcgcctggtacacagccacagccatcaacaaggccggccgggacaccacccgctgcaaggtgaatgtggaggtggagtttgctgagcctgagcctgagaggaagctgatcatcccccggggcacctaccgggccaaggagattgctgcccctgagctggagcccctgcacctgcgctatggccaggagcagtgggaggagggggacctgtatgacaaggagaagcagcagaagcccttcttcaagaagaagctgaccagcctgcggctgaagagatttggacctgcccactttgaatgtcggctgacccccatcggggaccccaccatggtggtggagtggctgcatgatggcaagcccctggaggccgccaaccggctgaggatgatcaatgaatttggctactgcagcctggactatggagtggcctacagccgggacagcggcatcatcacctgccgggccaccaacaagtatggaacagaccacaccagcgccaccctgattgtgaaggatgagaagagcctggtggaggagagccagctgcctgagggcaggaagggcctgcagagaattgaggagctggagaggatggcccacgagggcgccctgactggagtgaccacagaccagaaggagaagcagaagccagacatcgtgctgtacccagagcctgtgcgggtgctggagggggagacagcccgcttccgctgccgggtgacaggctacccccagcccaaggtgaactggtacctgaatggccagctgatcaggaagagcaagcgcttccgggtgcgctatgatggcatccactacctggacatcgtggactgcaagagctatgacacaggagaggtgaaggtgacagcagaaaatcctgagggcgtgattgagcacaaggtgaagctggagatccagcagcgggaggacttccgctctgtgctgcggcgggcccctgagcccaggcctgagttccacgtgcatgagcccgggaagctgcagtttgaggtgcagaaggtggacaggcctgtggacaccacagagaccaaggaggtggtgaagctgaagagagctgagcgcatcacccatgagaaggtgcctgaggagagcgaggagctgcggagcaagttcaagagaagaacagaggagggctactatgaggccatcacagctgtggagctgaagagcaggaagaaggatgagagctatgaggagctgctgaggaagaccaaggatgagctgctgcactggaccaaggagctgacagaggaggagaagaaggccctggccgaggagggcaagatcaccatccccaccttcaagccagacaagattgagctgagccccagcatggaggcccccaagatctttgagcgcatccagagccagacagtgggccagggcagtgatgcccacttccgggtgcgggtggtgggcaagccagaccctgaatgtgagtggtacaagaatggagtgaagattgaaagaagtgaccgcatctactggtactggccagaggacaacgtgtgtgagctggtgatcagagatgtgacagctgaggacagcgccagcatcatggtgaaggccatcaacattgctggggagaccagcagccacgccttcctgctggtgcaggccaagcagctgatcaccttcacccaggagctgcaggatgtggtggccaaggagaaggacaccatggccacctttgaatgtgagaccagcgagccctttgtgaaggtgaagtggtacaaggatggcatggaggtgcatgaaggagacaagtacaggatgcacagcgacaggaaggtgcacttcctgagcatcctgaccatcgacaccagtgatgctgaggactacagctgtgtgctggtggaggatgaaaatgtgaagaccacagccaagctgattgtggagggcgctgtggtggagtttgtgaaggagctgcaggacatcgaggtgcctgagagctacagcggggagctggagtgcatcgtgtccccagaaaatattgagggcaagtggtaccacaatgatgtggagctgaagagcaatggcaagtacaccatcaccagcagaagaggccggcagaacctgactgtgaaggatgtgaccaaggaggaccagggcgagtacagctttgtgattgatggcaagaagaccacctgcaagctgaagatgaagccccggcccatcgccatcctgcagggcctgagtgaccagaaggtgtgtgagggggacatcgtgcagctggaggtgaaggtgtccctggagagcgtggagggcgtgtggatgaaggatggccaggaggtgcagcccagcgacagagtgcacatcgtgattgacaagcagagccacatgctgctgattgaggacatgaccaaggaggatgctggcaactacagcttcaccatcccagccctgggcctgagcaccagcggccgggtgtctgtgtacagcgtggatgtgatcacccccctgaaggatgtgaatgtgattgagggcaccaaggctgtgctggagtgcaaggtgtctgtgcctgatgtgacctctgtgaagtggtacctgaatgatgagcagatcaagccagatgacagagtgcaggccatcgtgaagggcaccaagcagaggctggtgatcaacagaacccacgccagtgatgagggcccctacaagctgattgtgggccgggtggagaccaactgcaacctgtctgtggagaagatcaagatcatccggggcctgcgggacctgacctgcacagagacccagaatgtggtgtttgaggtggagctgagccacagcggcattgatgtgctgtggaacttcaaggacaaggagatcaagcccagcagcaagtacaagattgaggcccacggcaagatctacaagctgactgtgctgaacatgatgaaggatgatgagggcaagtacaccttctacgccggggagaacatgaccagcggcaagctgactgtggccggcggggccatcagcaagcccctgacagaccagacagtggccgagagccaggaggccgtgtttgaatgtgaggtggccaacccagacagcaaaggagagtggctgagagatggcaagcacctgcccctgaccaacaacatccgctctgagagtgatggccacaagaggaggctcatcatcgccgccaccaagctggatgacatcggggagtacacctacaaggtggccaccagcaagaccagcgccaagctgaaggtggaggccgtgaagatcaagaagaccctgaagaacctgactgtgacagagacccaggatgctgtgttcaccgtggagctgacccaccccaacgtgaagggcgtgcagtggatcaagaatggagtggtgctggagagcaatgagaagtatgccatctctgtgaagggcaccatctacagcctgcgcatcaagaactgtgccatcgtggatgaatctgtgtatggcttccggctgggccgcctgggcgccagcgcccggctgcacgtggagaccgtgaagatcatcaagaagcccaaggatgtgacagccctggagaatgccaccgtggcctttgaggtgtctgtgtcccatgacacagtgcctgtgaagtggttccacaagtctgtggagatcaagcccagcgacaagcaccggctggtgtctgagaggaaggtgcacaagctgatgctgcagaacatcagccccagtgatgctggggagtacacagctgtggtgggccagctggagtgcaaggccaagctgtttgtggagaccctgcacatcaccaagaccatgaagaacatcgaggtgcctgagaccaagacagccagctttgaatgtgaggtgagccacttcaacgtgcccagcatgtggctgaagaatggagtggagattgagatgtctgagaagttcaagatcgtggtgcagggcaagctgcaccagctgatcatcatgaacaccagcacagaggacagcgctgagtacacctttgtgtgtggaaatgaccaggtgtctgccaccctgactgtgacccccatcatgatcacctccatgctgaaggacatcaatgctgaggagaaggacaccatcacctttgaggtgacagtgaactatgagggcatctcctacaagtggctgaagaatggagtggagatcaagagcacagacaagtgccagatgaggaccaagaagctgacccacagcctgaacatcagaaatgtgcactttggagatgctgctgactacacctttgtggccggcaaggccaccagcacagccaccctgtatgtggaggcccggcacatcgagttcaggaagcacatcaaggacatcaaggtgctggagaagaagagggccatgtttgaatgtgaggtgtctgagccagacatcaccgtgcagtggatgaaggatgaccaggagctgcagatcacagaccgcatcaagatccagaaggagaagtatgtgcaccggctgctgatccccagcaccaggatgtctgatgctgggaagtacacagtggtggccggcggcaatgtgtccacagccaagctgtttgtggagggcagagatgtgcgcatccgcagcatcaagaaggaggtgcaggtgattgagaagcagagagctgtggtggagtttgaggtgaatgaagatgatgtggatgcccactggtacaaggatggcatcgagatcaacttccaggtgcaggagcggcacaagtatgtggtggagcggcgcatccacaggatgttcatcagcgagacccggcagagtgatgctggggagtacacctttgtggccggcaggaacagaagctctgtgaccctgtatgtgaatgcccctgagcccccccaggtgctgcaggagctgcagcctgtgacagtgcagagcggcaagccagcccgcttctgtgccgtcatcagcggccggccccagcccaagatctcctggtacaaggaggagcagctgctgagcacaggcttcaagtgcaagttcctgcatgatggccaggagtacaccctgctgctgattgaggccttcccagaagatgctgctgtgtacacctgtgaggccaagaatgactatggagtggccaccaccagcgccagcctgtctgtggaggtgcctgaggtggtgtccccagaccaggagatgcctgtgtaccccccagccatcatcacccccctgcaggacacagtgaccagcgagggccagcctgcccgcttccagtgccgggtgtctggaacagacctgaaggtgtcctggtacagcaaggacaagaagatcaagcccagccgcttcttcaggatgacccagtttgaggacacctaccagctggagattgctgaggcctacccagaagatgagggcacctacacctttgtggccagcaatgctgtgggccaggtgagcagcacagccaacctgagcctggaggcccctgagagcatcctgcacgagcgcatcgagcaggagattgagatggagatgaaggagctgttcagcgagggggagagcgagcacagcgagcgggacaccagagatgccttcagtgacagcgaggacatcgaccacaagtccatggccgccaagagatatgccagccgcatcagcagcaccagctcctggccagagtacttcaagcccagcttcacccagaagctgaccttcaagtatgtgctggagggggagcctgtggtgttcacctgccgcctcatcgcctgccccaccccagagatgacctggttccacaacaaccggcccatccccaccggcctgcggcgcatcatcaaggccgagagtgacctgcaccaccacagcagcagcctggagatcaagagggtgcaggaccgggacagcggcagctaccgcctgctggccatcaacagcgagggcagcgctgagagcacagccagcctgctggtgatccagaagggccaggatgagaagtacctggagttcctgaagagagctgagaggacccatgaaaatgtggaggccctggtggagcggggggaggaccgcatcaaggtggacctgcgcttcaccggcagccccttcaacaagaagcaggatgtggagcagaagggcatgatgaggaccatccacttcaagaccatgagcagcgccaagaagacagactacatgtatgatgaggagtacctggagagcaagagtgacatccggggctggctgaatgtgggggagagcttcctggacaaggagaccaaggtgaagctgcagaggctgcgggaggccaggaagaccctgatggagaagaagaagctgagcctgctggacaccagcagcgagatcagcagcaggaccctgcggtctgaggccagtgacaaggacatcctcttcagccgggaggacatgaagatccgctccatgtctgacctggccgagagctacaaggtggaccacagcgctgagagcatcgtgcagaacccccacgccctgagcaaccagatggaccagaacatcgagagcgaggagctgcccaccagcttccagaccatcgtggatgaggagatcttccagacagagatccgcatgagccaggaggccctggtgaaggagagcctgcccaaggaccacctgtatggagagatcctggtgaatgaaaacacccaggcccggggccagctggaggagatcatggccaacaccaccatcggggagagcagcacctacatcaccaacgtgtgtgagaaggaggaggtgtatgagaccccagaaaatgtgtcccaggccatcaccccccacgccagcgagagctttggcaccctggtgaatgtggaggagagcgaggagatcgccagcgagcgcatcaagaaggatgacctgcgggagctgcagctgagcgccagcaccagaattgatgagttcaagacagagcagaaggaggagaacatgaggttctttgagaacagcttcaggaagaggccccagcgctgccccccatccttcctgcaggagattgagagccaggaggtgtatgaaggagacagctgcaactttgtgtgccacttccagggctacccccagcccatcgtgacctggtacaacaatgacatgcccatccccaggaaccagaacttcatcatccacagcctggagaactacagcatcctgaccctgagctctgtgcaccaccagaatgaaggcagcatcacctgtgtgctcttcaaccagtatggcaccgtgaagaccacctccatgctgaaggtgaaggccaagcagaagcatgatgtgaaggcccacaaggtgcctgtgttccatgactacctggatgaggaggaggagctggccctggtgtttgaccaggccaagggggcccaccccagcatgagccaggagggccagaccaacctgcacctgctgaagaccaacccccctgtgcccccatctggggacacagagctgctgtccttccctgtggagatccaggtgacagctgccacccccatccctgagcaggacaaggagagcaaggaggtgttccagacagaggagctggagcccaaggccatgccccaggaccaggtgacccagagccccaagcacagatttgtgttcctgagtgacatcaccaatgaaccacccaagatgctgcaggagatgcccaagcacgcccgctgccgggagggggacagcatcatcctggagtgcctgatctctggagagccccagcctgtggtgacctggttccagaatggagtgctgctgaagcagaaccagaagttccagtttgaggaggtgaactgcagccaccagctgtacatcaaggatgtgaacagccaggacagcggcaagtacaagtgtgtggccgagaacaacagcggggctgtggagagcgtgtctgacctgactgtggagcctgtgacctaccgggagaacagccagtttgagaacatcggggagatctacggcaagtacagccgggaccagcagctgcaggaccagggcgagagcgtgcgggcccacttctatgactacccagctggccccttcaccccctggaccaacgtgaaggagtacagcgtgcgggactacttccagagcctggagaccatcgagcagattgaccagaaggagcaggtgcgctgcatccccagccgggagaagatccccaggtttgtgcacggggccagcaggaccatcaagatcagcaagcccatccgggcagagttcatccagtgccaggccgagggcaaggagagacatgtgtctgagaagagcaagctgcaccaggccgagggcaccgtgtacccctttgtggatgacttcagtgatgtgaccatcaagaaggagatccggaacaactttgggaagctgggccgctctgagaaggaaaatgtgcaggagtgtgcccagagcgactacctgcccaacatccacagcgagcgcatcagtgacagctacaacaccaaggacagcagcgccatcgtgtatgaggagagcctgggggaggagatccactacccaggcaagaaggtgaagcaccgcatcattgaatttgagaagctgcacgtggagaagggcgtgctggagaagaggcccaccaggaccagcatcgtgaaccccccccagaagaagattgatgacaaggccttcagcctgaagcagcgggagagccgcagcagcaacctgaatgccaacatgtaccaggccgagaagatgagccccaacacagaaagtgacagcagcaacatcgccatcaacctgaagctgctgagcagccagacccacaaggagtttgatgcccaggagcgggagcagcaggagaagatcagcctgattgacaagccagccatcagcaagagagctgagcacgagagccccatcacctttgacctgaagcagttccacacccagatcaagcacacagatgtgaagttccaggagctggacagcggccagcctgaggaggcctacttcaagatccagcaccctgctgacacagagaacatcgtgtttgacctgaagcagatgtacagccacatcggggaccctgccctggagttccagggccaggagacccgggagcagcaggagatccactacaaggagaagatccccagccctgagaccctgcagcctgacacccacaacatcagcaagtctgtgcagaacaacgtgtttgccagccaggagatcagcagcagccaggagctgagcaacagaaccatggtggagaagagcagcattgatgaaaattccatcagcctggagaaggaggtgcgccacgtgcaggagcagaacctggacatcctgaagacagacctgagcctgaagagcttcagcgaggagatctacagcgagagctgtgccctgctgcccaccagcagcgctgacatcgaggagacagacctgtctgagaagagctgccccctggagaatggaggccgcagcagcatcagccacctgaagaaggccgccagcgaggagaagcccctgggcgtgggggagatggaggaggagtgcaccctggagcctgagctggccgccttccccaagcaggacggcggcacccaggagtacacagatgccaccctggaggaccacagaggagatgtgcaggaggccgacaccctgcaccggcagctgagcctgagccagtgcttccccctgctgatgacagaggagcagcagaaccctggagagcagatcagcaccaacatccacgccagcggggaggagaagtgctatgaggaggtgcaggtgcagaatgaggccagcttcagcaccctggagggggagatgattgagaccagcttcagccagaacatccccaagctggatgaggcccacaccacagaggccgctgagagcgagaccagcctgacccagtacctgctggccgccggcaagcgggaggtgcctgagaccaaggacacccgggaccaggccaagctggtgcagagcgagagcatcacctccatggaggtggaggaggtgaccttcaacacagtgtatgagtactacaaccagaagcaggagagcctgggccggcccctgagccctgagagtgacatcagcattggagtgggcagcaccaccagcgaggagatcagcgagctggaccagttctacaccccacccagctctgtggagtactttgagagccccaagagcccagacctgtacttcaaccccagcgacatcaccaagcagagcagcatccacagcggcggggagaccgtggagcgctacagcacccccctgggggaggtggccgagcgctacagcaccccatctgagggggaggtgggggagcgctacagcaccccacctggagagaccctggagcgctacagcaccccacctggagagaccctggagcgctacagcaccccacctggagagaccctggagcgctacagcaccccacctggagagaccctggagcgctacagcaccccacctggagagaccctggagcgctacagcaccccacctggagaggccctggagcgctacagcatccccactggaggccccaaccccaccggcaccttcaagacctaccccagcaagattgagcgggaggatggcaccccaaatgagcacttctacacccccacagaggagcggggcagcgcctatgagatctggaggagtgacagctttggcaccccaaatgaggccatcgagcccaaggacaatgagatgccacccagcttcatcgagcccctgaccaagaggaaggtgtatgagaacaccaccctgggcttcatcgtggaggtggagggcctgcctgtgcctggggtgaagtggtacagaaacaagagcctgctggagccagatgagcgcatcaagatggagcgggtgggcaatgtgtgcagcctggagatcagcaacatccagaagggggagggcggggagtacatgtgccacgctgtgaacatcattggagaggccaagagctttgccaacgtggacatcatgccccaggaggagcgggtggtggccctgcccccacctgtgacccaccagcacgtgatggagtttgacctggagcacaccaccagcagcaggacccccagcccccaggagatcgtgctggaggtggagctgtctgagaaggatgtgaaggagtttgagaagcaggtgaagatcgtgacagtgcctgagttcaccccagaccacaagtccatgattgtgtccctggatgtgctgcccttcaactttgtggaccccaacatggacagccgggagggggaggacaaggagctgaagattgacctggaggtgtttgagatgccaccccgcttcatcatgcccatctgtgacttcaagatcccagaaaattctgatgctgtgttcaagtgcagcgtcatcggcatccccaccccagaggtgaagtggtacaaggagtacatgtgcatcgagccagacaacatcaagtatgtgatcagcgaggagaagggcagccacaccctgaagatcagaaatgtgtgcctgagtgacagcgccacctaccgctgcagagctgtgaactgtgtgggggaggccatctgccggggcttcctgaccatgggagacagcgagatctttgctgtgattgccaagaagagcaaggtgaccctgagcagcctgatggaggagctggtgctgaagagcaactacacagacagcttctttgagttccaggtggtggagggccccccacgcttcatcaagggcatcagtgactgctacgcccccatcggcacagctgcctacttccagtgcctggtgcggggcagcccccggcccaccgtgtactggtacaaggatggcaagctggtgcagggccgccgcttcaccgtggaggagagcggcaccggcttccacaacctcttcatcaccagcctggtgaagagtgatgaaggagagtaccgctgtgtggccaccaacaagagcggcatggccgagagctttgctgccctgaccctgacctag

SEQ ID NO: 173366 - DNA, 1419 bp, synthetic construct
  misc_feature 1..1419: note = Description of Artificial Sequence: Synthetic coding sequence
  source 1..1419: mol_type = other DNA
atgtacatctatgaggccagcgaggaggccgtgctggaggagaaggtgctggtgacccagccccagaagaccaagcccaagctggccaaggtgcctgagccccccaagaaggtggtgcctgaggacaagatctacgtgaccatccccaagaagcgggagaccccagccaccaaggagccagacaccacccggggcatcttccctgaggtggagcccccagaggccatccctgagatccctgagcaccccccaacagaggagtttgaggtgttcaaggaggtgattcctgagggggagacccccatcgtgaagaggaggaagacccccagccccacagcccctgaggccatgaaggaggtggtgcctgagatgaagatctttgaagatgtgcctgaggagcctgagacccccaggatgaagaccccagaggccccccaggagatcatcccagccaagacagtgcccagcaagaagcgggagcccccatctgtgaaggtgcctgaggccctgcaggagatcgtgcctgagaagaagaccctggtggtgcccctgaggaagccagaggtgctgcctgatgaggtgcctgaggccctgcgggaggtggtgcctgagaagaaggtgcaccccccccagagagctgaggtggtgcctgtgaaggtgcatgaggcccccaaggagatcatccctgagaagaaggtgtctgtggtgccccccaagaagccagaggtgccccctgtgaaggtgcctgaggccagcaaggaggtgatccgggaggagaaggtgcccctggccccacccaaggagcctgaggtgccccctgtgaaggtgcctgagccccccaaggaggtggtgcctgagaagaaggcccctgtggccccacccaaggagcctgaggtgccccctgtgaaggtgcctgaggcccccaaggaggtggtgcctgagaagaaggtgcctgtgcccccacccaagaagccagaggtgccccccaccaaggtgcctgaggtgcccaaggctgctgtgcctgagaagaagctgcctgaggccatcccccccaagccagagagccccccacctgaggtgcctgaggtgctgccccccaaggaggtggtgcctgagaagaaggtgcctgtgcccccagccaagaagccagaggcccccccacccaaggtgcctgaggcccccaaggaggtggtgctggagaagaaggcctctgtggccgtgcccaagaagccagaggccccccgggccaaggtgcctgaggccgcccaggaggtggtgcctgagaagaagatccccaaggcccccatcaagaagccagaggccccagctgtgacagtgcctgaggtgccccaggagatcgtgcctgagaagaagaccctggtgctgcccaagaagccagaggtgccccctgtgacctag

SEQ ID NO: 173367 - DNA, 1122 bp, synthetic construct
  misc_feature 1..1122: note = Description of Artificial Sequence: Synthetic coding sequence
  source 1..1122: mol_type = other DNA
gtggtgcctgagaagaaggtgcccctggtggtgcccaagaagccagaggcccccccagccaaggtgcctgaggtgcccaaggaggtggtgcctgagaagaaggtggccgtgcccaagaagccagaggtgcccccagccaaggtgcctgaggtgcccaagaagcctgtgctggaggagaagccagctgtgcctgtgcctgagagagctgagagccccccacctgaggtgtatgaggagcctgaggagatcgcccctgaggaggagatcgcccctgaggaggagaagcctgtgcctgtggccgaggaggaggagcctgaggtgcccccacctgctgtgcctgaggagcccaagaagatcatccctgagaagaaggtgcctgtgatcaagaagccagaggcccccccacccaaggagcctgagatgcccaagaaggtggtgcctgtgaagaaggtgcccaccgtgaagaagccagagaccccagctgccaaggtgcctgaggtgcccaagaagctggtgcctgtgaagaaggagcctgtgcctgtgaccaagaagccagaggtgctgcctgagaaggtgcccaaggtgcctgagaagatcatccctgagaaggaggtgtctgtgcccatcccagctgagcctgaggtgcccccagctgaggtggaggagaccccagaggagatcatctatgaggagaaggccagcatcaccatcggcaggaaggagaccccacctgtggaggagcgggagattgagaagtacatcaagccagaggagcctgagcctgagccccagcctgaggagatccctgtgaaggagcctgagcctgagaaggtgattgagaagcccaagctgaagccccggcccccacctcctcctccagccccacccaaggaggatgtgaaggagaagatcttccagctgaaggccatccccaagaagaaggtgcctgagaagccccaggtgcctgagaaggtggagctgacccccctgaaggtgcctgagcccccaccacccaagcctgtggaggaggtggaggtgcccaccgtgaccaagcgggagaggaagatccctgagcccaccaaggtgcctgagatcaagccagccatccccctgcctgcctag

SEQ ID NO: 173368 - DNA, 543 bp, synthetic construct
  misc_feature 1..543: note = Description of Artificial Sequence: Synthetic coding sequence
  source 1..543: mol_type = other DNA
aaggtgcctgaggtgcccaagaagcctgtgctggaggagaagccagctgtgcctgtgcctgagagagctgagagccccccacctgaggtgtatgaggagcctgaggagatcgcccctgaggaggagatcgcccctgaggaggagaagcctgtgcctgtggccgaggaggaggagcctgaggtgcccccacctgctgtgcctgaggagcccaagaagatcatccctgagaagaaggtgcctgtgatcaagaagccagaggcccccccacccaaggagcctgagcctgagaaggtgattgagaagcccaagctgaagccccggcccccacctcctcctccagccccacccaaggaggatgtgaaggagaagatcttccagctgaaggccatccccaagaagaaggtgcctgagaagccccaggtgcctgagaaggtggagctgacccccctgaaggtgcctggaggagagaagaaggtgaggaagctgctgcctgagaggaagccagagcccaaggaggaggtggtgctgaagagcggcatctag

SEQ ID NO: 173369 - DNA, 438 bp, synthetic construct
  misc_feature 1..438: note = Description of Artificial Sequence: Synthetic coding sequence
  source 1..438: mol_type = other DNA
gaagacacctaccagctggagattgctgaggcctacccagaagatgagggcacctacacctttgtggccagcaatgctgtgggccaggtgagcagcacagccaacctgagcctggaggcccctgagagcatcctgcacgagagaattgagcaggagattgagatggagatgaaggagctgttcagcgagggggagagcgagcacagcgagcgggacaccagagatgccttcagtgacagtgaagatattgaccacaagtccatggccgccaagagatatgccagccgcatcagcagcaccagctcctggccagagtacttcaagcccagcttcacccagaagctgaccttcaagtatgtgctggagggggagcctgtggtgttcacctgccgcctgattgcctgccccaccccagagatgacctggttccacaactag

SEQ ID NO: 173370 - DNA, 546 bp, synthetic construct
  misc_feature 1..546: note = Description of Artificial Sequence: Synthetic coding sequence
  source 1..546: mol_type = other DNA
atgttctttgccagccacacagaggaggaggtgtctgtgacagtgcctgaggtgcagaaggagatcgtgacagaggagaagatccacgtggccatcagcaagagggtggagcccccacccaaggtgcctgagctgcctgagaagccagcccctgaggaggtggcccctgtgcccatccccaagaaggtggagcccccagcccccaaggtgcctgaggtgcccaagaagcctgtgcctgaggagaagaagcctgtgcctgtgcccaagaaggagcctgctgccccacccaaggtgcctgaggtgcccaagaagcctgtgcctgaggagaagatccctgtgcctgtggccaagaagaaggaggcccccccagccaaggtgcctgagatccccaagaagaaggtgcctgaggagaggaagcctgtgcccaggaaggaggaggaggtgcccccaccacccaaggtgcctgccctgcccaagaagcctgtgcctgaggagaaggtggccgtgcctgtgcctgtggccaagaaggcccctcctccaagatag

SEQ ID NO: 173371 - DNA, 2490 bp, synthetic construct
  misc_feature 1..2490: note = Description of Artificial Sequence: Synthetic coding sequence
  source 1..2490: mol_type = other DNA
gtggaggagttcatcaagctggagcagcaccgggtggaggaggagcaccgggtggagaaggtgcaccgggtgattgaggtgtttgaggccgaggaggtggaggtgtttgagaagcccaaggccccacccaagggccctgagatcagcgagaagatcatcccccccaagaagccacccaccaaggtggtgcccaggaaggagcccccagccaaggtgcctgaggtgcccaagaagatcgtggtggaggagaaggtgcgggtgcctgaggagccccgggtgccccccaccaaggcccctgaggtgcccaagaagatcgtgcctgaggagaaggtgcgggaggccgtgctgaagaagccagaggtgcccccagccaaggtgcccggcatgcccaagaagtctgtgcaggaggagaagagccccatcgtcatcagcgaggacacagagatgtacatctatgaggccagcgaggaggccgtgctggaggagaaggtgctggtgacccagccccagaagaccaagcccaagctggccaaggtgcctgagccccccaagaaggtggtgcctgaggacaagatctacgtgaccatccccaagaagcgggagaccccagccaccaaggagccagacaccacccggggcatcttccctgaggtggagcccccagaggccatccctgagatccctgagcaccccccaacagaggagtttgaggtgttcaaggaggtgattcctgagggggagacccccatcgtgaagaggaggaagacccccagccccacagcccctgaggccatgaaggaggtggtgcctgagatgaagatctttgaagatgtgcctgaggagcctgagacccccaggatgaagaccccagaggccccccaggagatcatcccagccaagacagtgcccagcaagaagcgggagcccccatctgtgaaggtgcctgaggccctgcaggagatcgtgcctgagaagaagaccctggtggtgcccctgaggaagccagaggtgctgcctgatgaggtgcctgaggccctgcgggaggtggtgcctgagaagaaggtgcaccccccccagagagctgaggtggtgcctgtgaaggtgcatgaggcccccaaggagatcatccctgagaagaaggtgtctgtggtgccccccaagaagccagaggtgccccctgtgaaggtgcctgaggccagcaaggaggtgatccgggaggagaaggtgcccctggccccacccaaggagcctgaggtgccccctgtgaaggtgcctgagccccccaaggaggtggtgcctgagaagaaggcccctgtggccccacccaaggagcctgaggtgccccctgtgaaggtgcctgaggcccccaaggaggtggtgcctgagaagaaggtgcctgtgcccccacccaagaagccagaggtgccccccaccaaggtgcctgaggtgcccaaggctgctgtgcctgagaagaagctgcctgaggccatcccccccaagccagagagccccccacctgaggtgcctgaggtgctgccccccaaggaggtggtgcctgagaagaaggtgcctgtgcccccagccaagaagccagaggcccccccacccaaggtgcctgaggcccccaaggaggtggtgctggagaagaaggcctctgtggccgtgcccaagaagccagaggccccccgggccaaggtgcctgaggccgcccaggaggtggtgcctgagaagaagatccccaaggcccccatcaagaagccagaggccccagctgtgacagtgcctgaggtgccccaggagatcgtgcctgagaagaagaccctggtgctgcccaagaagccagaggtgccccctgtgacagtgcctgaggcccccaaggaggtggtgctggagaagaaggtgcccagcgccccacccaagaagccagaggtgccccctgtgaaggtgcctgaggcccccaaggaggtggtgcctgagaagaaggtgcctgtgcccccacccaagaagccagaggtgccccccaccaaggtgcctgaggtgcccaaggctgctgtgcctgagaagaaggtgcctgaggccatcccccccaagccagagagccccccacctgaggtgcctgaggtgctgccccccaaggaggtggtgcctgagaagaaggtgcctgtgcccccagccaagaagccagaggcccccccacccaaggtgcctgaggcccccaaggaggtggtgctggagaagaaggcctctgtggccgtgcccaagaagccagaggccccccgggccaaggtgcctgaggccgcccaggaggtggtgcctgagaagaagatccccaaggcccccatcaagaagccagaggccccagctgtgacagtgcctgaggtgccccaggaggccgctgagaaggagatccctgtggccccacccaagaagccagaggcccccatcgtgcctgtgcctgaggcccaggaggtggtgcctgagaagaagtag

SEQ ID NO: 173372 - DNA, 504 bp, synthetic construct
  misc_feature 1..504: note = Description of Artificial Sequence: Synthetic coding sequence
  source 1..504: mol_type = other DNA
atggccaccagcgagctgagctgtgaggtgtctgaggagaactgtgaaagaagagaggccttctgggccgagtggaaggacctgaccctgagcaccaggcctgaggagggctgcagcctgcacgaggaggacacccagagacatgagacctaccaccagcagggccagtgccaggtgctggtgcagaggagcccctggctgatgatgaggatgggcatcctgggccggggcctgcaggagtaccagctgccctaccagagggtgctgcccctgcccatcttcaccccagccaagatgggcgccaccaaggaggagcgggaggacacccccatccagctgcaggagctgctggccctggagacagccctgggcggccagtgtgtggaccggcaggaggtggccgagatcaccaagcagctgccccctgtggtgcctgtgtccaagccaggggccctgcggcgcagcctgagccgctccatgagccaggaggcccagaggggctag

SEQ ID NO: 173373 - DNA, 744 bp, synthetic construct
  misc_feature 1..744: note = Description of Artificial Sequence: Synthetic coding sequence
  source 1..744: mol_type = other DNA
atggccggcggcgtgctgcccctgcggggcctgcgggccctgtgccgggtgctgctcttcctgagccagttctgcatcctgagcggcggggagcagagccaggccctggcccagagcatcaaggaccccggccccaccaggaccttcaccgtggtgcccagggctgctgagagcacagagatccccccctacgtgatgaagtgccccagcaatggcctgtgcagccggctgcctgctgactgcatcgactgcaccaccaacttcagctgcacctacggcaagcctgtgacctttgactgtgctgtgaagcccagcgtgacctgtgtggaccaggacttcaagagccagaagaacttcatcatcaacatgacctgccgcttctgctggcagctgcctgagacagattatgaatgtaccaacagcaccagctgcatgacagtgtcctgcccccggcagcgctacccagccaactgcaccgtgcgggaccacgtgcactgcctgggcaacagaaccttccccaagatgctgtactgcaactggacaggaggctacaagtggagcacagccctggccctgagcatcaccctgggcggctttggagctgaccgcttctacctgggccagtggagggagggcctgggcaagctgttctcctttggaggcctgggcatctggaccctgattgatgtgctgctgattggagtgggctacgtgggccctgcagatggcagcctgtacatctag

SEQ ID NO: 173374 - DNA, 666 bp, synthetic construct
  misc_feature 1..666: note = Description of Artificial Sequence: Synthetic coding sequence
  source 1..666: mol_type = other DNA
atggccggcggcgtgctgcccctgcggggcctgcgggccctgtgccgggtgctgctcttcctgagccagttctgcatcctgagcggcggggagagcacagagatccccccctacgtgatgaagtgccccagcaatggcctgtgcagccggctgcctgctgactgcatcgactgcaccaccaacttcagctgcacctacggcaagcctgtgacctttgactgtgctgtgaagcccagcgtgacctgtgtggaccaggacttcaagagccagaagaacttcatcatcaacatgacctgccgcttctgctggcagctgcctgagacagattatgaatgtaccaacagcaccagctgcatgacagtgtcctgcccccggcagcgctacccagccaactgcaccgtgcgggaccacgtgcactgcctgggcaacagaaccttccccaagatgctgtactgcaactggacaggaggctacaagtggagcacagccctggccctgagcatcaccctgggcggctttggagctgaccgcttctacctgggccagtggagggagggcctgggcaagctgttctcctttggaggcctgggcatctggaccctgattgatgtgctgctgattggagtgggctacgtgggccctgcagatggcagcctgtacatctag

SEQ ID NO: 173375 - DNA, 1251 bp, synthetic construct
  misc_feature 1..1251: note = Description of Artificial Sequence: Synthetic coding sequence
  source 1..1251: mol_type = other DNA
atggccagcagcagcggcagcagccccaggcctgccccagatgaaaatgagttccccttcggctgccccccaacagtgtgccaggaccccaaggagccccgggccctgtgctgtgccggctgcctgtctgagaaccccagaaatggagaggaccagatctgccccaagtgccgcggggaggacctgcagagcatcagccctggcagccggctgcggacccaggagaaggcccaccctgaggtggccgaggccggcatcggctgcccctttgctggggtgggctgcagcttcaagggcagcccccagagcgtgcaggagcacgaggtgaccagccagaccagccacctgaacctgctgctgggcttcatgaagcagtggaaggcccggctgggctgcggcctggagagcggccccatggccctggagcagaacctgagtgacctgcagctgcaggccgctgtggaggtggccggggacctggaggtggactgctaccgggccccctgcagcgagagccaggaggagctggccctgcagcacttcatgaaggagaagctgctggccgagctggagggcaagctgcgggtgtttgagaacatcgtggccgtgctgaacaaggaggtggaggccagccacctggccctggccaccagcatccaccagagccagctggaccgggagcgcatcctgagcctggagcagagggtggtggagctgcagcagaccctggcccagaaggaccaggccctgggcaagctggagcagagcctgcggctgatggaggaggccagctttgatggcaccttcctgtggaagatcaccaacgtgacccggcgctgccatgaaagtgcctgtggccgcacagtgtccctcttcagccctgccttctacacagccaagtatggctacaagctgtgcctgcggctgtacctgaatggagatggcaccgggaagaggacccacctgagcctcttcatcgtcatcatgagaggagaatatgatgccctgctgccctggcccttcaggaacaaggtgaccttcatgctgctggaccagaacaaccgggagcacgccattgatgccttccggccagacctgagcagcgccagcttccagaggccccagagcgagaccaacgtggccagcggctgccccctcttcttccccctgagcaagctgcagagccccaagcacgcctacgtgaaggatgacaccatgttcctgaagtgcatcgtggagaccagcacctag

SEQ ID NO: 173376 - DNA, 1251 bp, synthetic construct; identical to SEQ ID NO: 173375
  misc_feature 1..1251: note = Description of Artificial Sequence: Synthetic coding sequence
  source 1..1251: mol_type = other DNA

SEQ ID NO: 173377 - DNA, 885 bp, synthetic construct
  misc_feature 1..885: note = Description of Artificial Sequence: Synthetic coding sequence
  source 1..885: mol_type = other DNA
atgaagcagtggaaggcccggctgggctgcggcctggagagcggccccatggccctggagcagaacctgagtgacctgcagctgcaggccgctgtggaggtggccggggacctggaggtggactgctaccgggccccctgcagcgagagccaggaggagctggccctgcagcacttcatgaaggagaagctgctggccgagctggagggcaagctgcgggtgtttgagaacatcgtggccgtgctgaacaaggaggtggaggccagccacctggccctggccaccagcatccaccagagccagctggaccgggagcgcatcctgagcctggagcagagggtggtggagctgcagcagaccctggcccagaaggaccaggccctgggcaagctggagcagagcctgcggctgatggaggaggccagctttgatggcaccttcctgtggaagatcaccaacgtgacccggcgctgccatgaaagtgcctgtggccgcacagtgtccctcttcagccctgccttctacacagccaagtatggctacaagctgtgcctgcggctgtacctgaatggagatggcaccgggaagaggacccacctgagcctcttcatcgtcatcatgagaggagaatatgatgccctgctgccctggcccttcaggaacaaggtgaccttcatgctgctggaccagaacaaccgggagcacgccattgatgccttccggccagacctgagcagcgccagcttccagaggccccagagcgagaccaacgtggccagcggctgccccctcttcttccccctgagcaagctgcagagccccaagcacgcctacgtgaaggatgacaccatgttcctgaagtgcatcgtggagaccagcacctag

SEQ ID NO: 173378 - DNA, 2076 bp, synthetic construct
  misc_feature 1..2076: note = Description of Artificial Sequence: Synthetic coding sequence
  source 1..2076: mol_type = other DNA
atgaatgctgctgtggtgcggaggacccaggaggccctgggcaaggtgatccggcggccccccctgacagagaagctgctgagcaagccacccttccgctacctgcatgacatcatcacagaggtgatccgcatgacaggcttcatgaagggcctgtacacagatgctgagatgaagagtgacaacgtgaaggacaaggatgccaagatctccttcctgcagaaggccattgatgtggtggtgatggtgtctggagagcccctgctggccaagccagccagaattgtggccggccacgagcctgagaggaccaatgagctgctgcagatcatcggcaagtgctgcctgaacaagctgagcagtgatgatgctgtgcggcgggtgctggccggggagaagggggaggtgaagggccgggccagcctgaccagccgcagccaggagctggacaacaagaatgtgcgggaggaggagagccgggtgcacaagaacacagaggacagaggagatgctgagatcaaggagaggagcaccagccgggacaggaagcagaaggaggagctgaaggaggacaggaagccccgggagaaggacaaggacaaggagaaggccaaggaaaatggaggcaacagacaccgggagggggagcgggagcgggccaaggcccgggcccggccagacaatgaaaggcagaaggaccggggcaaccgggagcgggaccgggacagcgagaggaagaaggagacagagaggaagtctgagggcggcaaggagaaggagcggctgcgggaccgggaccgggagcgggaccgggacaagggcaaggaccgggacagaagaagagtgaagaatggagagcacagctgggacctggaccgggagaagaaccgggagcatgacaagccagagaagaagagcgccagcagtggagagatgagcaagaagctgagtgatggcaccttcaaggacagcaaggccgagacagaaacagagatcagcacccgggccagcaagagcctgaccaccaagaccagcaagagaagaagcaagaacagcgtggagggcaggaaggaggacaacatcagcgccaagagcctggacagcatcgtgtctggcatcaacaatgagcccaaccaggagaccaccaccagcgagatcggcaccaaggaggccaacatcaacagcaccagcatcagtgatgacaacagcgccagcctgcgctgtgagaacatccagcccaaccccacagagaagcagaagggggacagcaccagtgatgctgaaggagatgctggccctgctggccaggacaagtctgaggtgcctgagaccccagagatccccaatgagctgagcagcaacatccgccgcatccccaggcctggcagcgcccggcctgccccaccccgggtgaagaggcaggacagcatggaggccctgcagatggacagaagtggcagcggcaagacagtgtccaatgtcatcacagagagccacaacagcgacaatgaagaagatgaccagtttgtggtggaggccgccccccagctgtctgagatgtctgaaattgagatggtgacagctgtggagctggaggaggaggagaagcatggaggcctggtgaagaagatcctggagaccaagaaggactatgagaagctgcagcagagccccaagccaggagagaaggagaggagcctgtttgagagcgcctggaagaaggagaaggacatcgtgtccaaggagattgagaagctgcggaccagcatccagaccctgtgcaagagcgccctgcccctgggcaagatcatggactacatccaggaggatgtggatgccatgcagaatgagctgcagatgtggcacagcgagaaccggcagcacgccgaggccctgcagcaggagcagaggatcacagactgtgctgtggagcccctgaaggccgagctggccgagctggagcagctgatcaaggaccagcaggacaagatctgtgctgtgaaggccaacatcctgaagaatgaggagaagatccagaagatggtgtacagcatcaacctgaccagcagaagatag

SEQ ID NO: 173379 - DNA, 1878 bp, synthetic construct
  misc_feature 1..1878: note = Description of Artificial Sequence: Synthetic coding sequence
  source 1..1878: mol_type = other DNA
atgaatgctgctgtggtgcggaggacccaggaggccctgggcaaggtgatccggcggccccccctgacagagaagctgctgagcaagccacccttccgctacctgcatgacatcatcacagaggtgatccgcatgacaggcttcatgaagggcctgtacacagatgctgagatgaagagtgacaacgtgaaggacaaggatgccaagatctccttcctgcagaaggccattgatgtggtggtgatggtgtctggagagcccctgctggccaagccagccagaattgtggccggccacgagcctgagaggaccaatgagctgctgcagatcatcggcaagtgctgcctgaacaagctgagcagtgatgatgctgtgcggcgggtgctggccggggagaagggggaggtgaagggccgggccagcctgaccagccgcagccaggagctggacaacaagaatgtgcgggaggaggagagccgggtgcacaagaacacagaggacagaggagatgctgagatcaaggagaggagcaccagccgggacaggaagcagaaggaggagctgaaggaggacaggaagccccgggagaaggacaaggacaaggagaaggccaaggaaaatggaggcaacagacaccgggagggggagcgggagcgggccaaggcccgggcccggccagacaatgaaaggcagaaggaccggggcaaccgggagcgggaccgggacagcgagaggaagaaggagacagagaggaagtctgagggcggcaaggagaaggagcggctgcgggaccgggaccgggagcgggaccgggacaagggcaaggaccgggacagaagaagagtgaagaatggagagcacagctgggacctggaccgggagaagaaccgggagcatgacaagccagagaagaagagcgccagcagtggagagatgagcaagaagctgagtgatggcaccttcaaggacagcaaggccgagacagaaacagagatcagcacccgggccagcaagagcctgaccaccaagaccagcaagagaagaagcaagaacagcgtggagggggacagcaccagtgatgctgaaggagatgctggccctgctggccaggacaagtctgaggtgcctgagaccccagagatccccaatgagctgagcagcaacatccgccgcatccccaggcctggcagcgcccggcctgccccaccccgggtgaagaggcaggacagcatggaggccctgcagatggacagaagtggcagcggcaagacagtgtccaatgtcatcacagagagccacaacagcgacaatgaagaagatgaccagtttgtggtggaggccgccccccagctgtctgagatgtctgaaattgagatggtgacagctgtggagctggaggaggaggagaagcatggaggcctggtgaagaagatcctggagaccaagaaggactatgagaagctgcagcagagccccaagccaggagagaaggagaggagcctgtttgagagcgcctggaagaaggagaaggacatcgtgtccaaggagattgagaagctgcggaccagcatccagaccctgtgcaagagcgccctgcccctgggcaagatcatggactacatccaggaggatgtggatgccatgcagaatgagctgcagatgtggcacagcgagaaccggcagcacgccgaggccctgcagcaggagcagaggatcacagactgtgctgtggagcccctgaaggccgagctggccgagctggagcagctgatcaaggaccagcaggacaagatctgtgctgtgaaggccaacatcctgaagaatgaggagaagatccagaagatggtgtacagcatcaacctgaccagcagaagatag

SEQ ID NO: 173380 - DNA, 2076 bp, synthetic construct
  misc_feature 1..2076: note = Description of Artificial Sequence: Synthetic coding sequence
  source 1..2076: mol_type = other DNA
atgaatgctgctgtggtgcggaggacccaggaggccctgggcaaggtgatccggcggccccccctgacagagaagctgctgagcaagccacccttccgctacctgcatgacatcatcacagaggtgatccgcatgacaggcttcatgaagggcctgtacacagatgctgagatgaagagtgacaacgtgaaggacaaggatgccaagatctccttcctgcagaaggccattgatgtggtggtgatggtgtctggagagcccctgctggccaagccagccagaattgtggccggccacgagcctgagaggaccaatgagctgctgcagatcatcggcaagtgctgcctgaacaagctgagcagtgatgatgctgtgcggcgggtgctggccggggagaagggggaggtgaagggccgggccagcctgaccagccgcagccaggagctggacaacaagaatgtgcgggaggaggagagccgggtgcacaagaacacagaggacagaggagatgctgagatcaaggagaggagcaccagccgggacaggaagcagaaggaggagctgaaggaggacaggaagccccgggagaaggacaaggacaaggagaaggccaaggaaaatggaggcaacagacaccgggagggggagcgggagcgggccaaggcccgggcccggccagacaatgaaaggcagaaggaccggggcaaccgggagcgggaccgggacagcgagaggaagaaggagacagagaggaagtctgagggcggcaaggagaaggagcggctgcgggaccgggaccgggagcgggaccgggacaagggcaaggaccgggacagaagaagagtgaagaatggagagcacagctgggacctggaccgggagaagaaccgggagcatgacaagccagagaagaagagcgccagcagtggagagatgagcaagaagctgagtgatggcaccttcaaggacagcaaggccgagacagaaacagagatcagcacccgggccagcaagagcctgaccaccaagaccagcaagagaagaagcaagaacagcgtggagggcaggaaggaggacaacatcagcgccaagagcctggacagcatcgtgtctggcatcaacaatgagcccaaccaggagaccaccaccagcgagatcggcaccaaggaggccaacatcaacagcaccagcatcagtgatgacaacagcgccagcctgcgctgtgagaacatccagcccaaccccacagagaagcagaagggcaagaatggaagtgagcgggagggagatgctggccctgctggccaggacaagtctgaggtgcctgagaccccagagatccccaatgagctgagcagcaacatccgccgcatccccaggcctggcagcgcccggcctgccccaccccgggtgaagaggcaggacagcatggaggccctgcagatggacagaagtggcagcggcaagacagtgtccaatgtcatcacagagagccacaacagcgacaatgaagaagatgaccagtttgtggtggaggccgccccccagctgtctgagatgtctgaaattgagatggtgacagctgtggagctggaggaggaggagaagcatggaggcctggtgaagaagatcctggagaccaagaaggactatgagaagctgcagcagagccccaagccaggagagaaggagaggagcctgtttgagagcgcctggaagaaggagaaggacatcgtgtccaaggagattgagaagctgcggaccagcatccagaccctgtgcaagagcgccctgcccctgggcaagatcatggactacatccaggaggatgtggatgccatgcagaatgagctgcagatgtggcacagcgagaaccggcagcacgccgaggccctgcagcaggagcagaggatcacagactgtgctgtggagcccctgaaggccgagctggccgagctggagcagctgatcaaggaccagcaggacaagatctgtgctgtgaaggccaacatcctgaagaatgaggagaagatccagaagatggtgtacagcatcaacctgaccagcagaagatag

SEQ ID NO: 173381 - DNA, 1878 bp, synthetic construct
  misc_feature 1..1878: note = Description of Artificial Sequence: Synthetic coding sequence
  source 1..1878: mol_type = other DNA
atgaatgctgctgtggtgcggaggacccaggaggccctgggcaaggtgatccggcggccccccctgacagagaagctgctgagcaagccacccttccgctacctgcatgacatcatcacagaggtgatccgcatgacaggcttcatgaagggcctgtacacagatgctgagatgaagagtgacaacgtgaaggacaaggatgccaagatctccttcctgcagaaggccattgatgtggtggtgatggtgtctggagagcccctgctggccaagccagccagaattgtggccggccacgagcctgagaggaccaatgagctgctgcagatcatcggcaagtgctgcctgaacaagctgagcagtgatgatgctgtgcggcgggtgctggccggggagaagggggaggtgaagggccgggccagcctgaccagccgcagccaggagctggacaacaagaatgtgcgggaggaggagagccgggtgcacaagaacacagaggacagaggagatgctgagatcaaggagaggagcaccagccgggacaggaagcagaaggaggagctgaaggaggacaggaagccccgggagaaggacaaggacaaggagaaggccaaggaaaatggaggcaacagacaccgggagggggagcgggagcgggccaaggcccgggcccggccagacaatgaaaggcagaaggaccggggcaaccgggagcgggaccgggacagcgagaggaagaaggagacagagaggaagtctgagggcggcaaggagaaggagcggctgcgggaccgggaccgggagcgggaccgggacaagggcaaggaccgggacagaagaagagtgaagaatggagagcacagctgggacctggaccgggagaagaaccgggagcatgacaagccagagaagaagagcgccagcagtggagagatgagcaagaagctgagtgatggcaccttcaaggacagcaaggccgagacagaaacagagatcagcacccgggccagcaagagcctgaccaccaagaccagcaagagaagaagcaagaacagcgtggagggcacagccaagctgatcctggagggagatgctggccctgctggccaggacaagtctgaggtgcctgagaccccagagatccccaatgagctgagcagcaacatccgccgcatccccaggcctggcagcgcccggcctgccccaccccgggtgaagaggcaggacagcatggaggccctgcagatggacagaagtggcagcggcaagacagtgtccaatgtcatcacagagagccacaacagcgacaatgaagaagatgaccagtttgtggtggaggccgccccccagctgtctgagatgtctgaaattgagatggtgacagctgtggagctggaggaggaggagaagcatggaggcctggtgaagaagatcctggagaccaagaaggactatgagaagctgcagcagagccccaagccaggagagaaggagaggagcctgtttgagagcgcctggaagaaggagaaggacatcgtgtccaaggagattgagaagctgcggaccagcatccagaccctgtgcaagagcgccctgcccctgggcaagatcatggactacatccaggaggatgtggatgccatgcagaatgagctgcagatgtggcacagcgagaaccggcagcacgccgaggccctgcagcaggagcagaggatcacagactgtgctgtggagcccctgaaggccgagctggccgagctggagcagctgatcaaggaccagcaggacaagatctgtgctgtgaaggccaacatcctgaagaatgaggagaagatccagaagatggtgtacagcatcaacctgaccagcagaagatag

SEQ ID NO: 173382 - DNA, 1674 bp, synthetic construct
  misc_feature 1..1674: note = Description of Artificial Sequence: Synthetic coding sequence
  source 1..1674: mol_type = other DNA
atggcctacagcgaggagcacaagggcatgccctgtggcttcatccggcagaacagcggcaacagcatcagcctggactttgagcccagcattgagtaccagtttgtggagcggctggaggagcgctacaagtgtgccttctgccacagcgtgctgcacaacccccaccagacaggctgcggccaccgcttctgccagcactgcatcctgagcctgcgggagctgaacacagtgcccatctgccctgtggacaaggaggtgatcaagagccaggaggtgttcaaggacaactgctgcaagcgggaggtgctgaacctgtatgtgtactgcagcaatgcccctggctgcaatgccaaggtgatcctgggccgctaccaggaccacctgcagcagtgcctcttccagcctgtgcagtgcagcaatgaaaaatgtcgggagcctgtgctgaggaaggacctgaaggagcacctgagcgccagctgccagttcaggaaggagaagtgcctgtactgcaagaaggatgtggtggtgatcaacctgcagaaccacgaggagaacctgtgcccagagtaccctgtgttctgccccaacaactgtgccaagatcatcctgaagacagaggtggatgagcacctggccgtgtgcccagaggccgagcaggactgccccttcaagcactacggctgtgctgtgacagacaagagaagaaacctgcagcagcacgagcacagcgccctgcgggagcacatgaggctggtgctggagaagaatgtgcagctggaggagcagatcagtgacctgcacaagagcctggagcagaaggagagcaagatccagcagctggccgagaccatcaagaagctggagaaggagttcaagcagtttgcccagctgtttgggaagaatggcagcttcctgcccaacatccaggtgtttgccagccacatcgacaagagcgcctggctggaggcccaggtgcaccagctgctgcagatggtgaaccagcagcagaacaagtttgacctgcggcccctgatggaggccgtggacacagtgaagcagaagatcaccctgctggagaacaatgaccagaggctggccgtgctggaggaggagaccaacaagcatgacacccacatcaacatccacaaggcccagctgagcaagaatgaggagcgcttcaagctgctggagggcacctgctacaacgggaagctgatctggaaggtgacagactacaagatgaagaagcgggaggccgtggatggccacacagtgtccatcttcagccagagcttctacaccagccgctgtggctaccgcctgtgtgcccgggcctacctgaatggagatggcagcggccggggcagccacctgagcctgtactttgtggtgatgagaggagaatttgacagcctgctgcagtggcccttccggcagagggtgaccctgatgctgctggaccagagcggcaagaagaacatcatggagaccttcaagccagaccccaacagcagcagcttcaagaggccagatggagagatgaacatcgccagcggctgccccaggtttgtggcccacagcgtgctggagaatgccaagaatgcctacatcaaggatgacaccctcttcctgaaggtggccgtggacctgacagacctggaggacctgtag

SEQ ID NO: 173383 - DNA, 1674 bp, synthetic construct; identical to SEQ ID NO: 173382
  misc_feature 1..1674: note = Description of Artificial Sequence: Synthetic coding sequence
  source 1..1674: mol_type = other DNA

SEQ ID NO: 173384 - DNA, 1674 bp, synthetic construct; identical to SEQ ID NO: 173382
  misc_feature 1..1674: note = Description of Artificial Sequence: Synthetic coding sequence
  source 1..1674: mol_type = other DNA

SEQ ID NO: 173385 - DNA, 1356 bp, synthetic construct
  misc_feature 1..1356: note = Description of Artificial Sequence: Synthetic coding sequence
  source 1..1356: mol_type = other DNA
atggcctacagcgaggagcacaagggcatgccctgtggcttcatccggcagaacagcggcaacagcatcagcctggactttgagcccagcattgagtaccagtttgtggagcggctggaggagcgctacaagtgtgccttctgccacagcgtgctgcacaacccccaccagacaggctgcggccaccgcttctgccagcactgcatcctgagcctgcgggagctgaacacagtgcccatctgccctgtggacaaggaggtgatcaagagccaggaggtgttcaaggacaactgctgcaagcgggaggtgctgaacctgtatgtgtactgcagcaatgcccctggctgcaatgccaaggtgatcctgggccgctaccaggacaagagaagaaacctgcagcagcacgagcacagcgccctgcgggagcacatgaggctggtgctggagaagaatgtgcagctggaggagcagatcagtgacctgcacaagagcctggagcagaaggagagcaagatccagcagctggccgagaccatcaagaagctggagaaggagttcaagcagtttgcccagctgtttgggaagaatggcagcttcctgcccaacatccaggtgtttgccagccacatcgacaagagcgcctggctggaggcccaggtgcaccagctgctgcagatggtgaaccagcagcagaacaagtttgacctgcggcccctgatggaggccgtggacacagtgaagcagaagatcaccctgctggagaacaatgaccagaggctggccgtgctggaggaggagaccaacaagcatgacacccacatcaacatccacaaggcccagctgagcaagaatgaggagcgcttcaagctgctggagggcacctgctacaacgggaagctgatctggaaggtgacagactacaagatgaagaagcgggaggccgtggatggccacacagtgtccatcttcagccagagcttctacaccagccgctgtggctaccgcctgtgtgcccgggcctacctgaatggagatggcagcggccggggcagccacctgagcctgtactttgtggtgatgagaggagaatttgacagcctgctgcagtggcccttccggcagagggtgaccctgatgctgctggaccagagcggcaagaagaacatcatggagaccttcaagccagaccccaacagcagcagcttcaagaggccagatggagagatgaacatcgccagcggctgccccaggtttgtggcccacagcgtgctggagaatgccaagaatgcctacatcaaggatgacaccctcttcctgaaggtggccgtggacctgacagacctggaggacctgtag

SEQ ID NO: 173386 - DNA, 1569 bp, synthetic construct
  misc_feature 1..1569: note = Description of Artificial Sequence: Synthetic coding sequence
  source 1..1569: mol_type = other DNA
atgagcctgctgaactgtgagaacagctgtggcagcagccagagcgagagtgactgctgcgtggccatggccagcagctgcagcgctgtgaccaaggatgattctgtgggcggcacagccagcacaggcaacctgagcagcagcttcatggaggagatccagggctatgatgtggagtttgacccccccctggagagcaaatatgaatgtcccatctgcctgatggccctgcgggaggccgtgcagaccccctgtggccaccgcttctgcaaggcctgcatcatcaagagcatcagagatgctggccacaagtgccctgtggacaatgagatcctgctggagaaccagctgttcccagacaactttgccaagcgggagatcctgagcctgatggtgaagtgccccaatgaaggctgcctgcacaagatggagctgcggcacctggaggaccaccaggcccactgtgaatttgccctgatggactgcccccagtgccagaggcccttccagaagttccacatcaacatccacatcctgaaggactgcccccggcggcaggtgtcctgtgacaactgtgccgcctccatggcctttgaggacaaggagatccatgaccagaactgccccctggccaacgtcatctgtgagtactgcaacaccatcctgatccgggagcagatgcccaaccactatgacctggactgccccacagcccccatcccctgcaccttcagcaccttcggctgccacgagaagatgcagaggaaccacctggcccggcacctgcaggagaacacccagagccacatgaggatgctggcccaggccgtgcacagcctgagcgtcatcccagacagcggctacatcagcgaggtgaggaacttccaggagaccatccaccagctggagggccgcctggtgcggcaggaccaccagatccgggagctgacagccaagatggagacccagagcatgtatgtgtctgagctgaagaggaccatccgcaccctggaggacaaggtggccgagattgaggcccagcagtgcaatggcatctacatctggaagattggcaactttggcatgcacctgaagtgccaggaggaggagaagcctgtggtgatccacagccctggcttctacaccgggaagccaggctacaagctgtgcatgaggctgcacctgcagctgcccacagcccagagatgtgccaactacatcagcctgtttgtgcacaccatgcagggcgagtatgacagccacctgccctggcccttccagggcaccatccggctgaccatcctggaccagagcgaggcccctgtgcggcagaaccacgaggagatcatggatgccaagccagagctgctggccttccagaggcccaccatccccaggaaccccaagggcttcggctacgtgaccttcatgcacctggaggccctgcggcagaggaccttcatcaaggatgacaccctgctggtgcgctgtgaggtgtccaccaggtttgacatgggcagcctgcggcgggagggcttccagcccaggagcacagatgctggggtgtag

SEQ ID NO: 173387 - DNA, 1569 bp, synthetic construct; identical to SEQ ID NO: 173386
  misc_feature 1..1569: note = Description of Artificial Sequence: Synthetic coding sequence
  source 1..1569: mol_type = other DNA

SEQ ID NO: 173388 - DNA, 2013 bp, synthetic construct
  misc_feature 1..2013: note = Description of Artificial Sequence: Synthetic coding sequence
  source 1..2013: mol_type = other DNA
atgagcagcggcaagagcgcccgctacaaccgcttcagcggcggccccagcaacctgcccaccccagatgtgaccaccggcaccaggatggagaccaccttcggccctgccttctctgctgtgaccaccatcaccaaggcagatggcaccagcacctacaagcagcactgcaggacccccagcagcagcagcaccctggcctacagccccagagatgaggaggacagcatgccacccatcagcaccccccggcggagtgacagcgccatctctgtgcgcagcctgcacagcgagagctccatgagcctgcggagcaccttcagcctgcctgaggaggaggaggagcctgagcccctggtgtttgctgagcagcccagcgtgaagctgtgctgccagctgtgctgcagcgtcttcaaggaccctgtgatcaccacctgtggccacaccttctgccgccgctgtgccctgaagtctgagaagtgccctgtggacaacgtgaagctgactgtggtggtgaacaacattgctgtggccgagcagattggagagctgttcatccactgccgccacggctgccgggtggccggcagcggcaagccacccatctttgaggtggacccccggggctgccccttcaccatcaagctgagcgccaggaaggaccacgagggcagctgtgactacagacctgtgcgctgccccaacaaccccagctgcccccccctgctgaggatgaacctggaggcccacctgaaggaatgtgagcacatcaagtgcccccacagcaaatatggctgcaccttcatcggcaaccaggacacctatgagacccacctggagacctgccgctttgagggcctgaaggagttcctgcagcagacagatgaccgcttccacgagatgcacgtggccctggcccagaaggaccaggagatcgccttcctgcgctccatgctgggcaagctgtctgagaagattgaccagctggagaagagcctggagctgaagtttgatgtgctggatgagaaccagagcaagctgtctgaggacctgatggagttcagaagagatgcctccatgctgaatgatgagctgagccacatcaatgcccggctgaacatgggcatcctgggcagctatgacccccagcagatcttcaagtgcaagggcacctttgtgggccaccagggccctgtgtggtgcctgtgtgtgtacagcatgggagacctgctcttcagcggcagcagtgacaagaccatcaaggtgtgggacacctgcaccacctacaagtgccagaagaccctggagggccatgatggcatcgtgctggccctgtgcatccagggctgcaagctgtacagcggcagcgctgactgcaccatcatcgtgtgggacatccagaacctgcagaaggtgaacaccatccgggcccatgacaaccctgtgtgcaccctggtgagcagccacaacgtgctcttcagcggcagcctgaaggccatcaaggtgtgggacatcgtgggcacagagctgaagctgaagaaggagctgaccggcctgaaccactgggtgcgggccctggtggccgcccagagctacctgtacagcggcagctaccagaccatcaagatctgggacatccgcaccctggactgcatccacgtgctgcagaccagcggcggctctgtgtacagcattgctgtgaccaaccaccacatcgtgtgtggcacctatgagaacctgatccacgtgtgggacatcgagagcaaggagcaggtgaggaccctgaccggccacgtgggcaccgtgtatgccctggccgtcatcagcaccccagaccagaccaaggtgttcagcgccagctatgacaggagcctgcgggtgtggagcatggacaacatgatctgcacccagaccctgctgcggcaccagggctctgtgacagccctggccgtgtcccggggccgcctcttcagcggggctgtggacagcacagtgaaggtgtggacctgctag

SEQ ID NO: 173389 - DNA, 2115 bp, synthetic construct
  misc_feature 1..2115: note = Description of Artificial Sequence: Synthetic coding sequence
  source 1..2115: mol_type = other DNA
atggcccgggagctgcgggccctgctgctgtggggccgccgcctgcggcccctgctgcgggccccagccctggccgctgtgcctgggggcaagcccatcctgtgccccaggaggaccacagcccagctgggccccaggagaaatcctgcctggagcctgcaggccggccgcctcttcagcacccagacagctgaggacaaggaggagcccctgcacagcatcatcagcagcacagagagcgtgcagggcagcaccagcaagcatgagttccaggccgagaccaagaagctgctggacatcgtggcccggagcctgtacagcgagaaggaggtgttcatccgggagctgatcagcaatgccagtgatgccctggagaagctgcggcacaagctggtgtctgatggccaggccctgcctgagatggagatccacctgcagaccaatgctgagaagggcaccatcaccatccaggacacaggaattggcatgacccaggaggagctggtgagcaacctgggcaccatcgcccggagcggcagcaaggccttcctggatgccctgcagaaccaggccgaggccagcagcaagatcatcggccagtttggagtgggcttctacagcgccttcatggtggccgacagagtggaggtgtacagccgctctgctgcccctggcagcctgggctaccagtggctgagtgatggcagcggcgtgtttgaaattgctgaggccagcggcgtgaggacaggcaccaagatcatcatccacctgaagagtgactgcaaggagttcagcagcgaggcccgggtgagagatgtggtgaccaagtacagcaactttgtgtccttccccctgtacctgaatggccgcaggatgaacaccctgcaggccatctggatgatggaccccaaggatgtgcgggagtggcagcacgaggagttctaccgctacgtggcccaggcccatgacaagccccgctacaccctgcactacaagacagatgcccccctgaacatccgcagcatcttctacgtgcctgacatgaagcccagcatgtttgatgtgtcccgggagctgggcagctctgtggccctgtacagcaggaaggtgctgatccagaccaaggccacagacatcctgcccaagtggctgcgcttcatccggggcgtggtggacagcgaggacatccccctgaacctgagccgggagctgctgcaggagagcgccctgatcaggaagctgagagatgtgctgcagcagaggctcatcaagttcttcatcgaccagagcaagaaggatgctgagaagtatgccaagttctttgaggactatggcctcttcatgagggagggcatcgtgacagccacagagcaggaggtgaaggaggacatcgccaagctgctgcgctatgagagcagcgccctgcccagcggccagctgaccagcctgtctgaatatgccagcaggatgagagctggcaccaggaacatctactacctgtgtgcccccaacagacacctggccgagcacagcccctactatgaggccatgaagaagaaggacacagaggtgctcttctgctttgagcagtttgatgagctgaccctgctgcacctgcgggagtttgacaagaagaagctgatctctgtggagacagacatcgtggtggaccactacaaggaggagaagtttgaagatagaagccctgctgctgagtgcctgtctgagaaggagacagaggagctgatggcctggatgagaaatgtgctgggcagccgggtgaccaacgtgaaggtgaccctgcggctggacacccacccagccatggtgacagtgctggagatgggcgccgcccggcacttcctgaggatgcagcagctggccaagacccaggaggagcgggcccagctgctgcagcccaccctggagatcaaccccaggcatgccctgatcaagaagctgaaccagctgcgggccagcgagcccggcctggcccagctgctggtggaccagatctatgaaaatgccatgattgctgctggcctggtggatgacccccgggccatggtgggccgcctgaatgagctgctggtgaaggccctggagcggcactag

SEQ ID NO: 173390 - DNA, 1956 bp, synthetic construct
  misc_feature 1..1956: note = Description of Artificial Sequence: Synthetic coding sequence
  source 1..1956: mol_type = other DNA
atggcccgggagctgcgggccctgctgctgtggggccgccgcctgcggcccctgctgcgggccccagccctggccgctgtgcctgggggcagcaccagcaagcatgagttccaggccgagaccaagaagctgctggacatcgtggcccggagcctgtacagcgagaaggaggtgttcatccgggagctgatcagcaatgccagtgatgccctggagaagctgcggcacaagctggtgtctgatggccaggccctgcctgagatggagatccacctgcagaccaatgctgagaagggcaccatcaccatccaggacaccggcatcggcatgacccaggaggagctggtgagcaacctgggcaccatcgcccggagcggcagcaaggccttcctggatgccctgcagaaccaggccgaggccagcagcaagatcatcggccagtttggagtgggcttctacagcgccttcatggtggccgacagagtggaggtgtacagccgctctgctgcccctggcagcctgggctaccagtggctgagtgatggcagcggcgtgtttgaaattgctgaggccagcggcgtgaggacaggcaccaagatcatcatccacctgaagagtgactgcaaggagttcagcagcgaggcccgggtgagagatgtggtgaccaagtacagcaactttgtgtccttccccctgtacctgaatggaagaaggatgaacaccctgcaggccatctggatgatggaccccaaggatgtgcgggagtggcagcacgaggagttctaccgctacgtggcccaggcccatgacaagccccgctacaccctgcactacaagacagatgcccccctgaacatccgcagcatcttctacgtgcctgacatgaagcccagcatgtttgatgtgtcccgggagctgggcagctctgtggccctgtacagcaggaaggtgctgatccagaccaaggccacagacatcctgcccaagtggctgcgcttcatccggggcgtggtggacagcgaggacatccccctgaacctgagccgggagctgctgcaggagagcgccctgatcaggaagctgagagatgtgctgcagcagaggctcatcaagttcttcatcgaccagagcaagaaggatgctgagaagtatgccaagttctttgaagattatggcctcttcatgagggagggcatcgtgacagccacagagcaggaggtgaaggaggacatcgccaagctgctgcgctatgagagcagcgccctgcccagcggccagctgaccagcctgtctgaatatgccagcaggatgagagctggcaccaggaacatctactacctgtgtgcccccaacagacacctggccgagcacagcccctactatgaggccatgaagaagaaggacacagaggtgctcttctgctttgagcagtttgatgagctgaccctgctgcacctgcgggagtttgacaagaagaagctgatctctgtggagacagacatcgtggtggaccactacaaggaggagaagtttgaggacaggagccctgctgctgaatgtctgtctgagaaggagacagaggagctgatggcctggatgagaaatgtgctgggcagccgggtgaccaacgtgaaggtgaccctgcggctggacacccacccagccatggtgacagtgctggagatgggcgccgcccggcacttcctgaggatgcagcagctggccaagacccaggaggagcgggcccagctgctgcagcccaccctggagatcaaccccaggcatgccctgatcaagaagctgaaccagctgcgggccagcgagcccggcctggcccagctgctggtggaccagatctatgaaaatgccatgattgctgctggcctggtggatgacccccgggccatggtgggccgcctgaatgagctgctggtgaaggccctggagcggcactag

SEQ ID NO: 173391 - DNA, 1911 bp, synthetic construct
  misc_feature 1..1911: note = Description of Artificial Sequence: Synthetic coding sequence
  source 1..1911: mol_type = other DNA
atggagggccggggcccctaccgcatctatgaccccggcggctctgtgcccagcggggaggccagcgctgcctttgagcggctggtgaaggagaacagccggctgaaggagaagatgcagggcatcaagatgctgggggagctgctggaggagagccagatggaggccacccggctgcggcagaaggccgaggagctggtgaaggacaatgagctgctgcccccacccagccccagcctgggcagctttgaccccctggccgagctgaccgggaaggacagcaatgtgacagccagccccacagccccagcctgccccagcgacaagccagcccctgtgcagaagccacccagcagcggcaccagcagcgagtttgaggtggtgaccccagaggagcagaacagccctgagagcagcagccacgccaatgccatggccctgggccccctgcccagagaagatggcaacctgatgctgcacctgcagaggctggagaccaccctgtctgtgtgtgccgaggagccagaccacggccagctgttcacccacctgggccgcatggccctggagttcaaccggctggccagcaaggtgcacaagaatgagcagaggaccagcatcctgcagaccctgtgtgagcagctgaggaaagaaaatgaggccctgaaggccaagctggacaagggcctggagcagagggaccaggccgctgagcggctgcgggaggagaacctggagctgaagaagctgctgatgagcaatggaaacaaggagggcgccagcggccggcccggcagccccaagatggagggcaccgggaagaaggctgtggccggccagcagcaggcctctgtgacagctgggaaggtgcctgaggtggtggccctgggcgctgctgagaagaaggtgaagatgctggagcagcagaggtctgagctgctggaggtgaacaagcagtgggaccagcacttccgctccatgaagcagcagtatgagcagaagatcacagagctgcggcagaagctggccgacctgcagaagcaggtgacagacctggaggccgagcgggagcagaagcagagggactttgacaggaagctgctgctggccaagagcaagattgagatggaggagacagacaaggagcagctgacagctgaggccaaggagctgcggcagaaggtgaagtacctgcaggaccagctgagccccctgacccggcagcgggagtaccaggagaaggagatccagaggctgaacaaggccctggaggaggccctgagcatccagaccccacccagcagccccccaacagccttcggcagccctgagggcgctggggccctgctgaggaagcaggagctggtgacccagaatgagctgctgaagcagcaggtgaagatctttgaggaggacttccagcgggagaggagtgaccgggagaggatgaatgaggagaaggaggagctgaagaagcaggtggagaagctgcaggcccaggtgaccctgagcaatgcccagctgaaggccttcaaggatgaggagaaggcccgggaggccctgcggcagcagaagaggaaggccaaggccagcggggagcgctaccacgtggagccccaccctgagcacctgtgtggggcctacccctatgcctacccacccatgcctgccatggtgccccaccacggctttgaggactggagccagatccgctacccacctccacccatggccatggagcaccccccacccctgcccaacagccgcctcttccacctgcctgagtacacctggaggctgccctgtggcggcgtgaggaaccccaaccagagcagccaggtgatggaccccccaacagcccggcccacagagcctgagagccccaagaatgaccgggagggcccccagtag

SEQ ID NO: 173392 - DNA, 1911 bp, synthetic construct; identical to SEQ ID NO: 173391
  misc_feature 1..1911: note = Description of Artificial Sequence: Synthetic coding sequence
  source 1..1911: mol_type = other DNA

SEQ ID NO: 173393 - DNA, 1590 bp, synthetic construct
  misc_feature 1..1590: note = Description of Artificial Sequence: Synthetic coding sequence
  source 1..1590: mol_type = other DNA
atgctgggggagctgctggaggagagccagatggaggccacccggctgcggcagaaggccgaggagctggtgaaggacaatgagctgctgcccccacccagccccagcctgggcagctttgaccccctggccgagctgaccgggaaggacagcaatgtgacagccagccccacagccccagcctgccccagcgacaagccagcccctgtgcagaagccacccagcagcggcaccagcagcgagtttgaggtggtgaccccagaggagcagaacagccctgagagcagcagccacgccaatgccatggccctgggccccctgccccgggaggatggcaacctgatgctgcacctgcagaggctggagaccaccctgtctgtgtgtgccgaggagccagaccacggccagctgttcacccacctgggccgcatggccctggagttcaaccggctggccagcaaggtgcacaagaatgagcagaggaccagcatcctgcagaccctgtgtgagcagctgaggaaagaaaatgaggccctgaaggccaagctggacaagggcctggagcagagggaccaggccgctgagcggctgcgggaggagaacctggagctgaagaagctgctgatgagcaatggaaacaaggagggcgccagcggccggcccggcagccccaagatggagggcaccgggaagaaggctgtggccggccagcagcaggcctctgtgacagctgggaaggtgcctgaggtggtggccctgggcgctgctgagaagaaggtgaagatgctggagcagcagaggtctgagctgctggaggtgaacaagcagtgggaccagcacttccgctccatgaagcagcagtatgagcagaagatcacagagctgcggcagaagctggccgacctgcagaagcaggtgacagacctggaggccgagcgggagcagaagcagagggactttgacaggaagctgctgctggccaagagcaagattgagatggaggagacagacaaggagcagctgacagctgaggccaaggagctgcggcagaaggtgaagtacctgcaggaccagctgagccccctgacccggcagcgggagtaccaggagaaggagatccagaggctgaacaaggccctggaggaggccctgagcatccagaccccacccagcagccccccaacagccttcggcagccctgagggcgctggggccctgctgaggaagcaggagctggtgacccagaatgagctgctgaagcagcaggtgaagatctttgaggaggacttccagcgggagaggagtgaccgggagaggatgaatgaggagaaggaggagctgaagaagcaggtggagaagctgcaggcccaggtgaccctgagcaatgcccagctgaaggccttcaaggatgaggagaaggcccgggaggccctgcggcagcagaagaggaaggccaagccagagtacacctggaggctgccctgtggcggcgtgaggaaccccaaccagagcagccaggtgatggaccccccaacagcccggcccacagagcctgagagccccaagaatgaccgggagggcccccagtag

SEQ ID NO: 173394 - DNA, 1908 bp, synthetic construct
  misc_feature 1..1908: note = Description of Artificial Sequence: Synthetic coding sequence
  source 1..1908: mol_type = other DNA
atggagggccggggcccctaccgcatctatgaccccggcggctctgtgcccagcggggaggccagcgctgcctttgagcggctggtgaaggagaacagccggctgaaggagaagatgcagggcatcaagatgctgggggagctgctggaggagagccagatggaggccacccggctgcggcagaaggccgaggagctggtgaaggacaatgagctgctgcccccacccagccccagcctgggcagctttgaccccctggccgagctgaccgggaaggacagcaatgtgacagccagccccacagccccagcctgccccagcgacaagccagcccctgtgcagaagccacccagcagcggcaccagcagcgagtttgaggtggtgaccccagaggagcagaacagccctgagagcagcagccacgccaatgccatggccctgggccccctgcccagagaagatggcaacctgatgctgcacctgcagaggctggagaccaccctgtctgtgtgtgccgaggagccagaccacggccagctgttcacccacctgggccgcatggccctggagttcaaccggctggccagcaaggtgcacaagaatgagcagaggaccagcatcctgcagaccctgtgtgagcagctgaggaaagaaaatgaggccctgaaggccaagctggacaagggcctggagcagagggaccaggccgctgagcggctgcgggaggagaacctggagctgaagaagctgctgatgagcaatggaaacaaggagggcgccagcggccggcccggcagccccaagatggagggcaccgggaagaaggctgtggccggccagcagcaggcctctgtgacagctgggaaggtgcctgaggtggtggccctgggcgctgctgagaagaaggtgaagatgctggagcagcagaggtctgagctgctggaggtgaacaagcagtgggaccagcacttccgctccatgaagcagcagtatgagcagaagatcacagagctgcggcagaagctggccgacctgcagaagcaggtgacagacctggaggccgagcgggagcagaagcagagggactttgacaggaagctgctgctggccaagagcaagattgagatggaggagacagacaaggagcagctgacagctgaggccaaggagctgcggcagaaggtgaagtacctgcaggaccagctgagccccctgacccggcagcgggagtaccaggagaaggagatccagaggctgaacaaggccctggaggaggccctgagcatccagaccccacccagcagccccccaacagccttcggcagccctgagggcgctggggccctgctgaggaagcaggagctggtgacccagaatgagctgctgaagcagcaggtgaagatctttgaggaggacttccagcgggagaggagtgaccgggagaggatgaatgaggagaaggaggagctgaagaagcaggtggagaagctgcaggcccaggtgaccctgagcaatgcccagctgaaggccttcaaggatgaggagaaggcccgggaggccctgcggcagcagaagaggaaggccaaggccagcggggagcgctaccacgtggagccccaccctgagcacctgtgtggggcctacccctatgcctacccacccatgcctgccatggtgccccaccacggctttgaggactggagccagatccgctacccacctccacccatggccatggagcaccccccacccctgcccaacagccgcctcttccacctgcctgagtacacctggaggctgccctgtggcggcgtgaggaaccccaaccagagcagccaggtgatggaccccccaacagcccggcccacagagcctgagcctgctgacctgcggctgcccaggaactag

SEQ ID NO: 173395 - DNA, 1479 bp, synthetic construct
  misc_feature 1..1479: note = Description of Artificial Sequence: Synthetic coding sequence
  source 1..1479: mol_type = other DNA
atggaggccacccggctgcggcagaaggccgaggagctggtgaaggacaatgagctgctgcccccacccagccccagcctgggcagctttgaccccctggccgagctgaccgggaaggacagcaatgtgacagccagccccacagccccagcctgccccagcgacaagccagcccctgtgcagaagccacccagcagcggcaccagcagcgagtttgaggtggtgaccccagaggagcagaacagccctgagagcagcagccacgccaatgccatggccctgggccccctgccccgggaggatggcaacctgatgctgcacctgcagaggctggagaccaccctgtctgtgtgtgccgaggagccagaccacggccagctgttcacccacctgggccgcatggccctggagttcaaccggctggccagcaaggtgcacaagaatgagcagaggaccagcatcctgcagaccctgtgtgagcagctgaggaaagaaaatgaggccctgaaggccaagctggacaagggcctggagcagagggaccaggccgctgagcggctgcgggaggagaacctggagctgaagaagctgctgatgagcaatggaaacaaggagggcgccagcggccggcccggcagccccaagatggagggcaccgggaagaaggctgtggccggccagcagcaggcctctgtgacagctgggaaggtgcctgaggtggtggccctgggcgctgctgagaagaaggtgaagatgctggagcagcagaggtctgagctgctggaggtgaacaagcagtgggaccagcacttccgctccatgaagcagcagtatgagcagaagatcacagagctgcggcagaagctggccgacctgcagaagcaggtgacagacctggaggccgagcgggagcagaagcagagggactttgacaggaagctgctgctggccaagagcaagattgagatggaggagacagacaaggagcagctgacagctgaggccaaggagctgcggcagaaggtgaagtacctgcaggaccagctgagccccctgacccggcagcgggagtaccaggagaaggagatccagaggctgaacaaggccctggaggaggccctgagcatccagaccccacccagcagccccccaacagccttcggcagccctgagggcgctggggccctgctgaggaagcaggagctggtgacccagaatgagctgctgaagcagcaggtgaagatctttgaggaggacttccagcgggagaggagtgaccgggagaggatgaatgaggagaaggaggagctgaagaagcaggtggagaagctgcaggcccaggtgaccctgagcaatgcccagctgaaggccttcaaggatgaggagaaggcccgggaggccctgcggcagcagaagaggaaggccaagggcacccaccggggctgccccaggcacctgcctgagaggaaggtgaagtag

SEQ ID NO: 173396 - DNA, 435 bp, synthetic construct
  misc_feature 1..435: note = Description of Artificial Sequence: Synthetic coding sequence
  source 1..435: mol_type = other DNA
atggagggccggggcccctaccgcatctatgaccccggcggctctgtgcccagcggggaggccagcgctgcctttgagcggctggtgaaggagaacagccggctgaaggagaagatgcagggcatcaagatgctgggggagctgctggaggagagccagatggaggccacccggctgcggcagaaggccgaggagctggtgaaggacaatgagctgctgcccccacccagccccagcctgggcagctttgaccccctggccgagctgaccgggaaggacagcaatgtgacagccagccccacagccccagcctgccccagcgacaagccagcccctgtgcagaagccacccagcagcggcaccagcagcgagtttgaggtggtgaccccagaggagcagaacagccctgagagcagcagccacgccaatgcctag

SEQ ID NO: 173397 - DNA, 1752 bp, synthetic construct
  misc_feature 1..1752: note = Description of Artificial Sequence: Synthetic coding sequence
  source 1..1752: mol_type = other DNA
atggaggccacccggctgcggcagaaggccgaggagctggtgaaggacaatgagctgctgcccccacccagccccagcctgggcagctttgaccccctggccgagctgaccgggaaggacagcaatgtgacagccagccccacagccccagcctgccccagcgacaagccagcccctgtgcagaagccacccagcagcggcaccagcagcgagtttgaggtggtgaccccagaggagcagaacagccctgagagcagcagccacgccaatgccatggccctgggccccctgccccgggaggatggcaacctgatgctgcacctgcagaggctggagaccaccctgtctgtgtgtgccgaggagccagaccacggccagctgttcacccacctgggccgcatggccctggagttcaaccggctggccagcaaggtgcacaagaatgagcagaggaccagcatcctgcagaccctgtgtgagcagctgaggaaagaaaatgaggccctgaaggccaagctggacaagggcctggagcagagggaccaggccgctgagcggctgcgggaggagaacctggagctgaagaagctgctgatgagcaatggaaacaaggagggcgccagcggccggcccggcagccccaagatggagggcaccgggaagaaggctgtggccggccagcagcaggcctctgtgacagctgggaaggtgcctgaggtggtggccctgggcgctgctgagaagaaggtgaagatgctggagcagcagaggtctgagctgctggaggtgaacaagcagtgggaccagcacttccgctccatgaagcagcagtatgagcagaagatcacagagctgcggcagaagctggccgacctgcagaagcaggtgacagacctggaggccgagcgggagcagaagcagagggactttgacaggaagctgctgctggccaagagcaagattgagatggaggagacagacaaggagcagctgacagctgaggccaaggagctgcggcagaaggtgaagtacctgcaggaccagctgagccccctgacccggcagcgggagtaccaggagaaggagatccagaggctgaacaaggccctggaggaggccctgagcatccagaccccacccagcagccccccaacagccttcggcagccctgagggcgctggggccctgctgaggaagcaggagctggtgacccagaatgagctgctgaagcagcaggtgaagatctttgaggaggacttccagcgggagaggagtgaccgggagaggatgaatgaggagaaggaggagctgaagaagcaggtggagaagctgcaggcccaggtgaccctgagcaatgcccagctgaaggccttcaaggatgaggagaaggcccgggaggccctgcggcagcagaagaggaaggccaaggccagcggggagcgctaccacgtggagccccaccctgagcacctgtgtggggcctacccctatgcctacccacccatgcctgccatggtgccccaccacggctttgaggactggagccagatccgctacccacctccacccatggccatggagcaccccccacccctgcccaacagccgcctcttccacctgcctgagtacacctggaggctgccctgtggcggcgtgaggaaccccaaccagagcagccaggtgatggaccccccaacagcccggcccacagagcctgagagccccaagaatgaccgggagggcccccagtag

SEQ ID NO: 173398 - DNA, 402 bp, synthetic construct
  misc_feature 1..402: note = Description of Artificial Sequence: Synthetic coding sequence
  source 1..402: mol_type = other DNA
atggagggccggggcccctaccgcatctatgaccccggcggctctgtgcccagcggggaggccagcgctgcctttgagcggctggtgaaggagaacagccggctgaaggagaagatgcagggcatcaagatgctgggggagctgctggaggagagccagatggaggccacccggctgcggcagaaggccgaggagctggtgaaggacaatgagctgctgcccccacccagccccagcctgggcagctttgaccccctggccgagctgaccgggaaggacagcaatgtgacagccagccccacagccccagcctgccccagcgacaagccagcccctgtgcagaagccacccagcagcggcaccagcagcgagtttgaggtggtgaccccagaggagcagtag

SEQ ID NO: 173399 - DNA, 1911 bp, synthetic construct; identical to SEQ ID NO: 173391
  misc_feature 1..1911: note = Description of Artificial Sequence: Synthetic coding sequence
  source 1..1911: mol_type = other DNA

SEQ ID NO: 173400 - DNA, 774 bp, synthetic construct
  misc_feature 1..774: note = Description of Artificial Sequence: Synthetic coding sequence
  source 1..774: mol_type = other DNA
atggaggccacccggctgcggcagaaggccgaggagctggtgaaggacaatgagctgctgcccccacccagccccagcctgggcagctttgaccccctggccgagctgaccgggaaggacagcaatgtgacagccagccccacagccccagcctgccccagcgacaagccagcccctgtgcagaagccacccagcagcggcaccagcagcgagtttgaggtggtgaccccagaggagcagaacagccctgagagcagcagccacgccaatgccatggccctgggccccctgccccgggaggatggcaacctgatgctgcacctgcagaggctggagaccaccctgtctgtgtgtgccgaggagccagaccacggccagctgttcacccacctgggccgcatggccctggagttcaaccggctggccagcaaggtgcacaagaatgagcagaggaccagcatcctgcagaccctgtgtgagcagctgaggaaagaaaatgaggccctgaaggccaagctggacaagggcctggagcagagggaccaggccgctgagcggctgcgggaggagaacctggagctgaagaagctgctgatgagcaatggaaacaaggagggcgccagcggccggcccggcagccccaagatggagggcaccgggaagaaggctgtggccggccagcagcaggcctctgtgacagctgggaaggtgcctgaggtggtggccctgggcgctgctgagaagaaggtgaagatgctggagcagcagaggtag

SEQ ID NO: 173401 - DNA, 1911 bp, synthetic construct; identical to SEQ ID NO: 173391
  misc_feature 1..1911: note = Description of Artificial Sequence: Synthetic coding sequence
  source 1..1911: mol_type = other DNA

SEQ ID NO: 173402 - DNA, 1719 bp, synthetic construct
  misc_feature 1..1719: note = Description of Artificial Sequence: Synthetic coding sequence
  source 1..1719: mol_type = other DNA
atggagggccggggcccctaccgcatctatgaccccggcggctctgtgcccagcggggaggccagcgctgcctttgagcggctggtgaaggagaacagccggctgaaggagaagatgcagggcatcaagatgctgggggagctgctggaggagagccagatggaggccacccggctgcggcagaaggccgaggagctggtgaaggacaatgagctgctgcccccacccagccccagcctgggcagctttgaccccctggccgagctgaccgggaaggacagcaatgtgacagccagccccacagccccagcctgccccagcgacaagccagcccctgtgcagaagccacccagcagcggcaccagcagcgagtttgaggtggtgaccccagaggagcagaacagccctgagagcagcagccacgccaatgccatggccctgggccccctgcccagagaagatggcaacctgatgctgcacctgcagaggctggagaccaccctgtctgtgtgtgccgaggagccagaccacggccagctgttcacccacctgggccgcatggccctggagttcaaccggctggccagcaaggtgcacaagaatgagcagaggaccagcatcctgcagaccctgtgtgagcagctgaggaaagaaaatgaggccctgaaggccaagctggacaagggcctggagcagagggaccaggccgctgagcggctgcgggaggagaacctggagctgaagaagctgctgatgagcaatggaaacaaggagggcgccagcggccggcccggcagccccaagatggagggcaccgggaagaaggctgtggccggccagcagcaggcctctgtgacagctgggaaggtgcctgaggtggtggccctgggcgctgctgagaagaaggtgaagatgctggagcagcagaggtctgagctgctggaggtgaacaagcagtgggaccagcacttccgctccatgaagcagcagtatgagcagaagatcacagagctgcggcagaagctggccgacctgcagaagcaggtgacagacctggaggccgagcgggagcagaagcagagggactttgacaggaagctgctgctggccaagagcaagattgagatggaggagacagacaaggagcagctgacagctgaggccaaggagctgcggcagaaggtgaagtacctgcaggaccagctgagccccctgacccggcagcgggagtaccaggagaaggagatccagaggctgaacaaggccctggaggaggccctgagcatccagaccccacccagcagccccccaacagccttcggcagccctgagggcgctggggccctgctgaggaagcaggagctggtgacccagaatgagctgctgaagcagcaggtgaagatctttgaggaggacttccagcgggagaggagtgaccgggagaggatgaatgaggagaaggaggagctgaagaagcaggtggagaagctgcaggcccaggtgaccctgagcaatgcccagctgaaggccttcaaggatgaggagaaggcccgggaggccctgcggcagcagaagaggaaggccaagccagagtacacctggaggctgccctgtggcggcgtgaggaaccccaaccagagcagccaggtgatggaccccccaacagcccggcccacagagcctgagagccccaagaatgaccgggagggcccccagtag

SEQ ID NO: 173403 - DNA, 1908 bp, synthetic construct; identical to SEQ ID NO: 173394
  misc_feature 1..1908: note = Description of Artificial Sequence: Synthetic coding sequence
  source 1..1908: mol_type = other DNA

SEQ ID NO: 173404 - DNA, 1671 bp, synthetic construct
  misc_feature 1..1671: note = Description of Artificial Sequence: Synthetic coding sequence
  source 1..1671: mol_type = other DNA
atggagggccggggcccctaccgcatctatgaccccggcggctctgtgcccagcggggaggccagcgctgcctttgagcggctggtgaaggagaacagccggctgaaggagaagatgcagggcatcaagatgctgggggagctgctggaggagagccagatggaggccacccggctgcggcagaaggccgaggagctggtgaaggacaatgagctgctgcccccacccagccccagcctgggcagctttgaccccctggccgagctgaccgggaaggacagcaatgtgacagccagccccacagccccagcctgccccagcgacaagccagcccctgtgcagaagccacccagcagcggcaccagcagcgagtttgaggtggtgaccccagaggagcagaacagccctgagagcagcagccacgccaatgccatggccctgggccccctgcccagagaagatggcaacctgatgctgcacctgcagaggctggagaccaccctgtctgtgtgtgccgaggagccagaccacggccagctgttcacccacctgggccgcatggccctggagttcaaccggctggccagcaaggtgcacaagaatgagcagaggaccagcatcctgcagaccctgtgtgagcagctgaggaaagaaaatgaggccctgaaggccaagctggacaagggcctggagcagagggaccaggccgctgagcggctgcgggaggagaacctggagctgaagaagctgctgatgagcaatggaaacaaggagggcgccagcggccggcccggcagccccaagatggagggcaccgggaagaaggctgtggccggccagcagcaggcctctgtgacagctgggaaggtgcctgaggtggtggccctgggcgctgctgagaagaaggtgaagatgctggagcagcagaggtctgagctgctggaggtgaacaagcagtgggaccagcacttccgctccatgaagcagcagtatgagcagaagatcacagagctgcggcagaagctggccgacctgcagaagcaggtgacagacctggaggccgagcgggagcagaagcagagggactttgacaggaagctgctgctggccaagagcaagattgagatggaggagacagacaaggagcagctgacagctgaggccaaggagctgcggcagaaggtgaagtacctgcaggaccagctgagccccctgacccggcagcgggagtaccaggagaaggagatccagaggctgaacaaggccctggaggaggccctgagcatccagaccccacccagcagccccccaacagccttcggcagccctgagggcgctggggccctgctgaggaagcaggagctggtgacccagaatgagctgctgaagcagcaggtgaagatctttgaggaggacttccagcgggagaggagtgaccgggagaggatgaatgaggagaaggaggagctgaagaagcaggtggagaagctgcaggcccaggtgaccctgagcaatgcccagctgaaggccttcaaggatgaggagaaggcccgggaggccctgcggcagcagaagaggaaggccaagagcctgcagaagatgacagtgcggggcctgtctgagacccggctgtgccacctggccccacccagcagctgccgggccagctag

SEQ ID NO: 173405 - DNA, 1797 bp, synthetic construct
  misc_feature 1..1797: note = Description of Artificial Sequence: Synthetic coding sequence
  source 1..1797: mol_type = other DNA
atgcagggcatcaagatgctgggggagctgctggaggagagccagatggaggccacccggctgcggcagaaggccgaggagctggtgaaggacaatgagctgctgcccccacccagccccagcctgggcagctttgaccccctggccgagctgaccgggaaggacagcaatgtgacagccagccccacagccccagcctgccccagcgacaagccagcccctgtgcagaagccacccagcagcggcaccagcagcgagtttgaggtggtgaccccagaggagcagaacagccctgagagcagcagccacgccaatgccatggccctgggccccctgcccagagaagatggcaacctgatgctgcacctgcagaggctggagaccaccctgtctgtgtgtgccgaggagccagaccacggccagctgttcacccacctgggccgcatggccctggagttcaaccggctggccagcaaggtgcacaagaatgagcagaggaccagcatcctgcagaccctgtgtgagcagctgaggaaagaaaatgaggccctgaaggccaagctggacaagggcctggagcagagggaccaggccgctgagcggctgcgggaggagaacctggagctgaagaagctgctgatgagcaatggaaacaaggagggcgccagcggccggcccggcagccccaagatggagggcaccgggaagaaggctgtggccggccagcagcaggcctctgtgacagctgggaaggtgcctgaggtggtggccctgggcgctgctgagaagaaggtgaagatgctggagcagcagaggtctgagctgctggaggtgaacaagcagtgggaccagcacttccgctccatgaagcagcagtatgagcagaagatcacagagctgcggcagaagctggccgacctgcagaagcaggtgacagacctggaggccgagcgggagcagaagcagagggactttgacaggaagctgctgctggccaagagcaagattgagatggaggagacagacaaggagcagctgacagctgaggccaaggagctgcggcagaaggtgaagtacctgcaggaccagctgagccccctgacccggcagcgggagtaccaggagaaggagatccagaggctgaacaaggccctggaggaggccctgagcatccagaccccacccagcagccccccaacagccttcggcagccctgagggcgctggggccctgctgaggaagcaggagctggtgacccagaatgagctgctgaagcagcaggtgaagatctttgaggaggacttccagcgggagaggagtgaccgggagaggatgaatgaggagaaggaggagctgaagaagcaggtggagaagctgcaggcccaggtgaccctgagcaatgcccagctgaaggccttcaaggatgaggagaaggcccgggaggccctgcggcagcagaagaggaaggccaaggccagcggggagcgctaccacgtggagccccaccctgagcacctgtgtggggcctacccctatgcctacccacccatgcctgccatggtgccccaccacggctttgaggactggagccagatccgctacccacctccacccatggccatggagcaccccccacccctgcccaacagccgcctcttccacctgcctgagtacacctggaggctgccctgtggcggcgtgaggaaccccaaccagagcagccaggtgatggaccccccaacagcccggcccacagagcctgagagccccaagaatgaccgggagggcccccagtag

SEQ ID NO: 173406 - DNA, 1542 bp, synthetic construct
  misc_feature 1..1542: note = Description of Artificial Sequence: Synthetic coding sequence
  source 1..1542: mol_type = other DNA
atgctgggggagctgctggaggagagccagatggaggccacccggctgcggcagaaggccgaggagctggtgaaggacaatgagctgctgcccccacccagccccagcctgggcagctttgaccccctggccgagctgaccgggaaggacagcaatgtgacagccagccccacagccccagcctgccccagcgacaagccagcccctgtgcagaagccacccagcagcggcaccagcagcgagtttgaggtggtgaccccagaggagcagaacagccctgagagcagcagccacgccaatgccatggccctgggccccctgccccgggaggatggcaacctgatgctgcacctgcagaggctggagaccaccctgtctgtgtgtgccgaggagccagaccacggccagctgttcacccacctgggccgcatggccctggagttcaaccggctggccagcaaggtgcacaagaatgagcagaggaccagcatcctgcagaccctgtgtgagcagctgaggaaagaaaatgaggccctgaaggccaagctggacaagggcctggagcagagggaccaggccgctgagcggctgcgggaggagaacctggagctgaagaagctgctgatgagcaatggaaacaaggagggcgccagcggccggcccggcagccccaagatggagggcaccgggaagaaggctgtggccggccagcagcaggcctctgtgacagctgggaaggtgcctgaggtggtggccctgggcgctgctgagaagaaggtgaagatgctggagcagcagaggtctgagctgctggaggtgaacaagcagtgggaccagcacttccgctccatgaagcagcagtatgagcagaagatcacagagctgcggcagaagctggccgacctgcagaagcaggtgacagacctggaggccgagcgggagcagaagcagagggactttgacaggaagctgctgctggccaagagcaagattgagatggaggagacagacaaggagcagctgacagctgaggccaaggagctgcggcagaaggtgaagtacctgcaggaccagctgagccccctgacccggcagcgggagtaccaggagaaggagatccagaggctgaacaaggccctggaggaggccctgagcatccagaccccacccagcagccccccaacagccttcggcagccctgagggcgctggggccctgctgaggaagcaggagctggtgacccagaatgagctgctgaagcagcaggtgaagatctttgaggaggacttccagcgggagaggagtgaccgggagaggatgaatgaggagaaggaggagctgaagaagcaggtggagaagctgcaggcccaggtgaccctgagcaatgcccagctgaaggccttcaaggatgaggagaaggcccgggaggccctgcggcagcagaagaggaaggccaagagcctgcagaagatgacagtgcggggcctgtctgagacccggctgtgccacctggccccacccagcagctgccgggccagctag

SEQ ID NO: 173407 - DNA, 1509 bp, synthetic construct
  misc_feature 1..1509: note = Description of Artificial Sequence: Synthetic coding sequence
  source 1..1509: mol_type = other DNA
atgctgggggagctgctggaggagagccagatggaggccacccggctgcggcagaaggccgaggagctggtgaaggacaatgagctgctgcccccacccagccccagcctgggcagctttgaccccctggccgagctgaccgggaaggacagcaatgtgacagccagccccacagccccagcctgccccagcgacaagccagcccctgtgcagaagccacccagcagcggcaccagcagcgagtttgaggtggtgaccccagaggagcagaacagccctgagagcagcagccacgccaatgccatggccctgggccccctgccccgggaggatggcaacctgatgctgcacctgcagaggctggagaccaccctgtctgtgtgtgccgaggagccagaccacggccagctgttcacccacctgggccgcatggccctggagttcaaccggctggccagcaaggtgcacaagaatgagcagaggaccagcatcctgcagaccctgtgtgagcagctgaggaaagaaaatgaggccctgaaggccaagctggacaagggcctggagcagagggaccaggccgctgagcggctgcgggaggagaacctggagctgaagaagctgctgatgagcaatggaaacaaggagggcgccagcggccggcccggcagccccaagatggagggcaccgggaagaaggctgtggccggccagcagcaggcctctgtgacagctgggaaggtgcctgaggtggtggccctgggcgctgctgagaagaaggtgaagatgctggagcagcagaggtctgagctgctggaggtgaacaagcagtgggaccagcacttccgctccatgaagcagcagtatgagcagaagatcacagagctgcggcagaagctggccgacctgcagaagcaggtgacagacctggaggccgagcgggagcagaagcagagggactttgacaggaagctgctgctggccaagagcaagattgagatggaggagacagacaaggagcagctgacagctgaggccaaggagctgcggcagaaggtgaagtacctgcaggaccagctgagccccctgacccggcagcgggagtaccaggagaaggagatccagaggctgaacaaggccctggaggaggccctgagcatccagaccccacccagcagccccccaacagccttcggcagccctgagggcgctggggccctgctgaggaagcaggagctggtgacccagaatgagctgctgaagcagcaggtgaagatctttgaggaggacttccagcgggagaggagtgaccgggagaggatgaatgaggagaaggaggagctgaagaagcaggtggagaagctgcaggcccaggtgaccctgagcaatgcccagctgaaggccttcaaggatgaggagaaggcccgggaggccctgcggcagcagaagaggaaggccaagggcacccaccggggctgccccaggcacctgcctgagaggaaggtgaagtag

SEQ ID NO: 173408 - DNA, 1290 bp, synthetic construct
  misc_feature 1..1290: note = Description of Artificial Sequence: Synthetic coding sequence
  source 1..1290: mol_type = other DNA
atgagccgggaccccggcagcggcggctgggaggaggcccccagggctgctgctgccctgtgcaccctgtaccatgaagctggccagaggctgcggcggctgcaggaccagctggccgccagagatgccctgattgcccggctgcgggcccggctggccgccctggagggagatgctgcccccagcctggtggatgccctgctggagcaggtggcccgcttccgggagcagctgcggcggcaggagggcggcgctgctgaggcccagatgaggcaggagattgaaaggctgacagagcggctggaggagaaggagcgggagatgcagcagctgctgagccagccccagcacgagcgggagaaggaggtggtgctgctgcggcgctccatggccgagggggagcgggcccgggccgccagtgatgtgctgtgccgcagcctggccaatgagacccaccagctgcggaggaccctgacagccacagcccacatgtgccagcacctggccaagtgcctggatgagcggcagcacgcccagagaaatgtgggggagaggagcccagaccagagcgagcacacagatggccacacctctgtgcagagcgtgattgagaagctgcaggaggagaaccggctgctgaagcagaaggtgacccacgtggaggacctgaatgccaagtggcagcgctacaatgccagcagagatgaatatgtgcggggcctgcacgcccagctgcggggcctgcagatcccccatgagcctgagctgatgaggaaggagatcagccggctgaaccggcagctggaggagaagatcaatgactgtgccgaggtgaagcaggagctggccgccagcaggacagccagagatgctgccctggagcgggtgcagatgctggagcagcagatcctggcctacaaggatgacttcatgtctgaaagagctgaccgggagcgggcccagagccgcatccaggagctggaggagaaggtggccagcctgctgcaccaggtgtcctggaggcaggacagccgggagccagatgctggccgcatccacgccggcagcaagacagccaagtacctggccgcagatgccctggagctgatggtgcctgggggctggaggcctggcaccggcagccagcagcctgagcccccagctgagggcggccaccctggagctgcccagaggggccagggcgacctgcagtgcccccactgcctgcagtgcttcagtgatgagcagggcgaggagctgctgcggcacgtggccgagtgctgccagtag

SEQ ID NO: 173409 - DNA, 969 bp, synthetic construct
  misc_feature 1..969: note = Description of Artificial Sequence: Synthetic coding sequence
  source 1..969: mol_type = other DNA
atgcagcagctgctgagccagccccagcacgagcgggagaaggaggtggtgctgctgcggcgctccatggccgagggggagcgggcccgggccgccagtgatgtgctgtgccgcagcctggccaatgagacccaccagctgcggaggaccctgacagccacagcccacatgtgccagcacctggccaagtgcctggatgagcggcagcacgcccagagaaatgtgggggagaggagcccagaccagagcgagcacacagatggccacacctctgtgcagagcgtcatcgagaagctgcaggaggagaaccggctgctgaagcagaaggtgacccacgtggaggacctgaatgccaagtggcagcgctacaatgccagcagagatgaatatgtgcggggcctgcacgcccagctgcggggcctgcagatcccccatgagcctgagctgatgaggaaggagatcagccggctgaaccggcagctggaggagaagatcaatgactgtgccgaggtgaagcaggagctggccgccagcaggacagccagagatgctgccctggagcgggtgcagatgctggagcagcagatcctggcctacaaggatgacttcatgtctgaaagagctgaccgggagcgggcccagagccgcatccaggagctggaggagaaggtggccagcctgctgcaccaggtgtcctggaggcaggacagccgggagccagatgctggccgcatccatgctggcagcaagacagccaagtacctggccgcagatgccctggagctgatggtgcctgggggctggaggcctggcaccggcagccagcagcctgagcccccagctgagggcggccaccctggggccgcccagaggggccagggcgacctgcagtgcccccactgcctgcagtgcttcagtgatgagcagggcgaggagctgctgcggcacgtggccgagtgctgccagtag

SEQ ID NO: 173410 - DNA, 837 bp, synthetic construct
  misc_feature 1..837: note = Description of Artificial Sequence: Synthetic coding sequence
  source 1..837: mol_type = other DNA
atggccgaggcccggagccagcccagcgctggcccccagctgaatgccctgcctgaccacagccccctgctgcagcccggcctggccgccctgcggcggcgggcccgggaggccggcgtgcccctggcccccctgcccctgacagacagcttcctgctgcgcttcctgcgggcccgggactttgacctggacctggcctggaggctgctgaagaactactacaagtggagggcagaatgtcctgagatctctgctgacctgcaccccaggagcatcatcggcctgctgaaggccggctaccatggagtgctgcggagccgggaccccaccggcagcaaggtgctgatctacagaattgcccactgggaccccaaggtgttcaccgcctatgatgtgttccgggtgtccctcatcaccagcgagctgattgtgcaggaggtggagacccagagaaatggcatcaaggccatctttgacctggagggctggcagttcagccacgccttccagatcacccccagcgtggccaagaagattgctgctgtgctgacagacagcttccccctgaaggtgcggggcatccacctgatcaatgagcccgtcatcttccacgctgtgttctccatgatcaagcccttcctgacagagaagatcaaggagcgcatccacatgcacggcaacaactacaagcagagcctgctgcagcacttcccagacatcctgcccctggagtatggaggagaggagttctccatggaggacatctgccaggagtggaccaacttcatcatgaagtctgaggactacctgagcagcatcagcgagagcatccagtag

SEQ ID NO: 173411 - DNA, 2361 bp, synthetic construct
  misc_feature 1..2361: note = Description of Artificial Sequence: Synthetic coding sequence
  source 1..2361: mol_type = other DNA
atgaccagcatcttccactttgccatcatcttcatgctgatcctgcagatccgcatccagctgtctgaggagagcgagttcctggtggacaggagcaagaatggcctcatccacgtgcccaaggacctgagccagaagaccaccatcctgaacatcagccagaactacatcagcgagctgtggaccagtgacatcctgagcctgagcaagctgcgcatcctgatcatcagccacaaccgcatccagtacctggacatctctgtgttcaagttcaaccaggagctggagtacctggacctgagccacaacaagctggtgaagatcagctgccaccccaccgtgaacctgaagcacctggacctgtccttcaatgcctttgatgccctgcccatctgcaaggagtttggaaacatgagccagctgaagttcctgggcctgagcaccacccacctggagaagagctctgtgctgcccatcgcccacctgaacatcagcaaggtgctgctggtgctgggggagacctatggagagaaggaggaccctgagggcctgcaggacttcaacacagagagcctgcacatcgtgttccccaccaacaaggagttccacttcatcctggatgtgtctgtgaagacagtggccaacctggagctgagcaacatcaagtgtgtgctggaggacaacaagtgcagctacttcctgagcatcctggccaagctgcagaccaaccccaagctgagcaacctgaccctgaacaacatcgagaccacctggaacagcttcatccgcatcctgcagctggtgtggcacaccaccgtgtggtacttcagcatcagcaatgtgaagctgcagggccagctggacttccgggactttgactacagcggcaccagcctgaaggccctgagcatccaccaggtggtgtctgatgtgtttggcttcccccagagctacatctatgagatcttcagcaacatgaacatcaagaacttcaccgtgtctggcaccaggatggtgcacatgctgtgccccagcaagatcagccccttcctgcacctggacttcagcaacaacctgctgacagacacagtgtttgagaactgtggccacctgacagagctggagaccctcatcctgcagatgaaccagctgaaggagctgagcaagattgctgagatgaccacccagatgaagagcctgcagcagctggacatcagccagaacagcgtgtcctatgatgagaagaagggggactgctcctggaccaagagcctgctgagcctgaacatgagcagcaacatcctgacagacaccatcttccgctgcctgcccccacgcatcaaggtgctggacctgcacagcaacaagatcaagagcatccccaagcaggtggtgaagctggaggccctgcaggagctgaatgtggccttcaacagcctgacagacctgcccggctgcggcagcttcagcagcctgtctgtgctgatcatcgaccacaacagcgtgagccaccccagcgctgacttcttccagagctgccagaagatgaggagcatcaaggccggggacaaccccttccagtgcacctgtgagctgggggagtttgtgaagaacatcgaccaggtgagcagcgaggtgctggagggctggccagacagctacaagtgtgactacccagagagctaccggggcaccctgctgaaggacttccacatgtctgagctgagctgcaacatcaccctgctgattgtgaccatcgtggccaccatgctggtgctggccgtgacagtgaccagcctgtgcagctacctggacctgccctggtacctgaggatggtgtgccagtggacccagaccaggagaagagccaggaacatccccctggaggagctgcagaggaacctgcagttccacgccttcatctcctacagcggccatgacagcttctgggtgaagaatgagctgctgcccaacctggagaaggagggcatgcagatctgcctgcatgaaagaaactttgtgcctgggaagagcatcgtggagaacatcatcacctgcatcgagaagagctacaagagcatctttgtgctgagccccaactttgtgcagagcgagtggtgccactatgagctgtactttgcccaccacaacctcttccacgagggcagcaacagcctcatcctgatcctgctggagcccatcccccagtacagcatccccagcagctaccacaagctgaagagcctgatggcccggaggacctacctggagtggcccaaggagaagagcaagaggggcctcttctgggccaacctgcgggccgccatcaacatcaagctgacagagcaggccaagaagtag

SEQ ID NO: 173412 - DNA, 2361 bp, synthetic construct; identical to SEQ ID NO: 173411
  misc_feature 1..2361: note = Description of Artificial Sequence: Synthetic coding sequence
  source 1..2361: mol_type = other DNA

SEQ ID NO: 173413 - DNA, 486 bp, synthetic construct
  misc_feature 1..486: note = Description of Artificial Sequence: Synthetic coding sequence
  source 1..486: mol_type = other DNA
atgaccagcatcttccactttgccatcatcttcatgctgatcctgcagatccgcatccagctgtctgaggagagcgagttcctggtggacaggagcaagaatggcctcatccacgtgcccaaggacctgagccagaagaccaccatcctgaacatcagccagaactacatcagcgagctgtggaccagtgacatcctgagcctgagcaagctgcgcatcctgatcatcagccacaaccgcatccagtacctggacatctctgtgttcaagttcaaccaggagctggagtacctggacctgagccacaacaagctggtgaagatcagctgccaccccaccgtgaacctgaagcacctggacctgtccttcaatgcctttgatgccctgcccatctgcaaggagtttggaaacatgagccagctgaagttcctgggcctgagcaccacccacctggagaagagctctgtgctgcccatcgcccactag

SEQ ID NO: 173414 - DNA, 147 bp, synthetic construct
  misc_feature 1..147: note = Description of Artificial Sequence: Synthetic coding sequence
  source 1..147: mol_type = other DNA
atgaccagcatcttccactttgccatcatcttcatgctgatcctgcagatccgcatccagctgtctgaggagagcgagttcctggtggacaggagcaagaatggcctcatccacgtgcccaaggacctgagccagaagaccacctag

SEQ ID NO: 173415 - DNA, 72 bp, synthetic construct
  misc_feature 1..72: note = Description of Artificial Sequence: Synthetic coding sequence
  source 1..72: mol_type = other DNA
atgaccagcatcttccactttgccatcatcttcatgctgatcctgcagatccgcatccagctgtctgagtag

SEQ ID NO: 173416 - DNA, 273 bp, synthetic construct
  misc_feature 1..273: note = Description of Artificial Sequence: Synthetic coding sequence
  source 1..273: mol_type = other DNA
atgaccagcatcttccactttgccatcatcttcatgctgatcctgcagatccgcatccagctgtctgaggagagcgagttcctggtggacaggagcaagaatggcctcatccacgtgcccaaggacctgagccagaagaccaccatcctgaacatcagccagaactacatcagcgagctgtggaccagtgacatcctgagcctgagcaagctgcgcatcctgatcatcagccacaaccgcatccagtacctggacatctctgtgttcaagtag

SEQ ID NO: 173417 - DNA, 2355 bp, synthetic construct
  misc_feature 1..2355: note = Description of Artificial Sequence: Synthetic coding sequence
  source 1..2355: mol_type = other DNA
atgccccacaccctgtggatggtgtgggtgctgggcgtcatcatcagcctgagcaaggaggagagcagcaaccaggccagcctgagctgtgacagaaatggcatctgcaagggcagcagcggcagcctgaacagcatccccagcggcctgacagaagctgtgaagagcctggacctgagcaacaaccgcatcacctacatcagcaacagcgacctgcagagatgtgtgaacctgcaggccctggtgctgaccagcaatggcatcaacaccattgaagaagattccttcagcagcctgggcagcctggagcacctggacctgagctacaactacctgagcaacctgagcagctcctggttcaagcccctgagcagcctgaccttcctgaacctgctgggcaacccctacaagaccctgggggagaccagcctcttcagccacctgaccaagctgcagatcctgcgggtgggcaacatggacaccttcaccaagatccagaggaaggactttgctggcctgaccttcctggaggagctggagattgatgccagtgacctgcagagctatgagcccaagagcctgaagagcatccagaatgtgagccacctgatcctgcacatgaagcagcacatcctgctgctggagatctttgtggatgtgaccagctctgtggagtgcctggagctgcgggacacagacctggacaccttccacttcagcgagctgagcactggagagaccaacagcctcatcaagaagttcaccttcagaaatgtgaagatcacagatgagagcctcttccaggtgatgaagctgctgaaccagatcagcggcctgctggagctggagtttgatgactgcaccctgaatggagtgggcaacttccgggccagtgacaatgacagagtcatcgaccccgggaaggtggagaccctgaccatccggcggctgcacatcccccgcttctacctgttctatgacctgagcaccctgtacagcctgacagagcgggtgaagaggatcaccgtggagaacagcaaggtgttcctggtgccctgcctgctgagccagcacctgaagagcctggagtacctggacctgtctgagaacctgatggtggaggagtacctgaagaacagcgcctgtgaagatgcctggcccagcctgcagaccctcatcctgcggcagaaccacctggccagcctggagaagacaggagagaccctgctgaccctgaagaacctgaccaacatcgacatcagcaagaacagcttccacagcatgcctgagacctgccagtggccagagaagatgaagtacctgaacctgagcagcacccgcatccacagcgtgacaggctgcatccccaagaccctggagatcctggatgtgagcaacaacaacctgaacctcttcagcctgaacctgccccagctgaaggagctgtacatcagcaggaacaagctgatgaccctgcctgatgccagcctgctgcccatgctgctggtgctgaagatcagcagaaatgccatcaccaccttcagcaaggagcagctggacagcttccacaccctgaagaccctggaggccggcggcaacaacttcatctgcagctgtgagttcctgtccttcacccaggagcagcaggccctggccaaggtgctgattgactggccagccaactacctgtgtgacagccccagccacgtgcggggccagcaggtgcaggatgtgcggctgtctgtgtctgagtgccacaggacagccctggtgtctggcatgtgctgtgccctcttcctgctgatcctgctgactggagtgctgtgccaccgcttccacggcctgtggtacatgaagatgatgtgggcctggctgcaggccaagaggaagcccaggaaggcccccagcaggaacatctgctatgatgcctttgtgtcctacagcgagagagatgcctactgggtggagaacctgatggtgcaggagctggagaacttcaacccccccttcaagctgtgcctgcacaagagggacttcatccctgggaagtggatcatcgacaacatcatcgacagcattgagaagagccacaagacagtgtttgtgctgtctgaaaattttgtgaagtctgagtggtgcaagtatgagctggacttcagccacttccggctgtttgatgaaaataatgatgctgccatcctgatcctgctggagcccatcgagaagaaggccatcccccagcgcttctgcaagctgaggaagatcatgaacaccaagacctacctggagtggcccatggatgaggcccagcgggagggcttctgggtgaacctgcgggccgccatcaagagctag

SEQ ID NO: 173418 - DNA, 2715 bp, synthetic construct
  misc_feature 1..2715: note = Description of Artificial Sequence: Synthetic coding sequence
  source 1..2715: mol_type = other DNA
atgaggcagaccctgccctgcatctacttctggggcggcctgctgcccttcggcatgctgtgtgccagcagcaccaccaagtgcaccgtgtcccatgaggtggccgactgcagccacctgaagctgacccaggtgcctgatgacctgcccaccaacatcaccgtgctgaacctgacccacaaccagctgcggcggctgcctgctgccaacttcacccgctacagccagctgaccagcctggatgtgggcttcaacaccatcagcaagctggagcctgagctgtgccagaagctgcccatgctgaaggtgctgaacctgcagcacaatgagctgagccagctgagtgacaagacctttgccttctgcaccaacctgacagagctgcacctgatgagcaacagcatccagaagatcaagaacaacccctttgtgaagcagaagaacctgatcaccctggacctgagccacaacggcctgagcagcaccaagctgggcacccaggtgcagctggagaacctgcaggagctgctgctgagcaacaacaagatccaggccctgaagtctgaggagctggacatctttgccaacagcagcctgaagaagctggagctgagcagcaaccagatcaaggagttcagccctggctgcttccacgccatcggccgcctgtttggcctcttcctgaacaacgtgcagctgggccccagcctgacagagaagctgtgcctggagctggccaacaccagcatccggaacctgagcctgagcaacagccagctgagcaccaccagcaacaccaccttcctgggcctgaagtggaccaacctgaccatgctggacctgagctacaacaacctgaatgtggtgggcaatgacagctttgcctggctgccccagctggagtacttcttcctggagtacaacaacatccagcacctgttcagccacagcctgcacggcctcttcaacgtgcgctacctgaacctgaagaggagcttcaccaagcagagcatcagcctggccagcctgcccaagattgatgacttctccttccagtggctgaagtgcctggagcacctgaacatggaggacaatgacatccctggcatcaagagcaacatgttcaccggcctcatcaacctgaagtacctgagcctgagcaacagcttcaccagcctgcggaccctgaccaatgagacctttgtgtccctggcccacagccccctgcacatcctgaacctgaccaagaacaagatcagcaagattgaaagtgatgccttctcctggctgggccacctggaggtgctggacctgggcctgaatgaaattggccaggagctgaccggccaggagtggaggggcctggagaacatctttgagatctacctgagctacaacaagtacctgcagctgaccagaaattcctttgccctggtgcccagcctgcagaggctgatgctgcggcgggtggccctgaagaatgtggacagcagccccagccccttccagcccctgaggaacctgaccatcctggacctgagcaacaacaacatcgccaacatcaatgatgacatgctggagggcctggagaagctggagatcctggacctgcagcacaacaacctggcccggctgtggaagcacgccaaccctgggggccccatctacttcctgaagggcctgagccacctgcacatcctgaacctggagagcaatggatttgatgagatccctgtggaggtgttcaaggacctgtttgagctgaagatcatcgacctgggcctgaacaacctgaacaccctgcctgccagcgtcttcaacaaccaggtgtccctgaagagcctgaacctgcagaagaacctgatcacctctgtggagaagaaggtgtttggacctgccttcaggaacctgacagagctggacatgaggttcaacccctttgactgcacctgtgagagcatcgcctggtttgtgaactggatcaatgagacccacaccaacatccctgagctgagcagccactacctgtgcaacaccccaccccactaccacggcttccctgtgcggctgtttgacaccagcagctgcaaggacagcgccccctttgagctgttcttcatgatcaacaccagcatcctgctgatcttcatcttcatcgtgctgctgatccactttgagggctggaggatctccttctactggaatgtgtctgtgcaccgggtgctgggcttcaaggagattgaccggcagacagagcagtttgaatatgctgcctacatcatccacgcctacaaggacaaggactgggtgtgggagcacttcagctccatggagaaggaggaccagagcctgaagttctgcctggaggagcgggactttgaagctggggtgtttgagctggaggccatcgtgaacagcatcaagaggagcaggaagatcatctttgtgatcacccaccacctgctgaaggaccccctgtgcaagcgcttcaaggtgcaccacgctgtgcagcaggccatcgagcagaacctggacagcatcatcctggtgttcctggaggagatcccagactacaagctgaaccacgccctgtgcctgcggcggggcatgttcaagagccactgcatcctgaactggcctgtgcagaaggagcgcatcggggccttccgccacaagctgcaggtggccctgggcagcaagaacagcgtgcactag

SEQ ID NO: 173419 - DNA, 1884 bp, synthetic construct
  misc_feature 1..1884: note = Description of Artificial Sequence: Synthetic coding sequence
  source 1..1884: mol_type = other DNA
atgctggacctgagctacaacaacctgaatgtggtgggcaatgacagctttgcctggctgccccagctggagtacttcttcctggagtacaacaacatccagcacctgttcagccacagcctgcacggcctcttcaacgtgcgctacctgaacctgaagaggagcttcaccaagcagagcatcagcctggccagcctgcccaagattgatgacttctccttccagtggctgaagtgcctggagcacctgaacatggaggacaatgacatccctggcatcaagagcaacatgttcaccggcctcatcaacctgaagtacctgagcctgagcaacagcttcaccagcctgcggaccctgaccaatgagacctttgtgtccctggcccacagccccctgcacatcctgaacctgaccaagaacaagatcagcaagattgaaagtgatgccttctcctggctgggccacctggaggtgctggacctgggcctgaatgagatcggccaggagctgaccggccaggagtggaggggcctggagaacatctttgagatctacctgagctacaacaagtacctgcagctgaccaggaacagctttgccctggtgcccagcctgcagaggctgatgctgcggcgggtggccctgaagaatgtggacagcagccccagccccttccagcccctgaggaacctgaccatcctggacctgagcaacaacaacatcgccaacatcaatgatgacatgctggagggcctggagaagctggagatcctggacctgcagcacaacaacctggcccggctgtggaagcacgccaaccctgggggccccatctacttcctgaagggcctgagccacctgcacatcctgaacctggagagcaatggatttgatgagatccctgtggaggtgttcaaggacctgtttgagctgaagatcatcgacctgggcctgaacaacctgaacaccctgcctgcctctgtgttcaacaaccaggtgtccctgaagagcctgaacctgcagaagaacctgatcacctctgtggagaagaaggtgtttggacctgccttcaggaacctgacagagctggacatgaggttcaacccctttgactgcacctgtgagagcatcgcctggtttgtgaactggatcaatgagacccacaccaacatccctgagctgagcagccactacctgtgcaacaccccaccccactaccacggcttccctgtgcggctgtttgacaccagcagctgcaaggacagcgccccctttgagctgttcttcatgatcaacaccagcatcctgctgatcttcatcttcatcgtgctgctgatccactttgagggctggaggatctccttctactggaatgtgtctgtgcaccgggtgctgggcttcaaggagattgaccggcagacagagcagtttgaatatgctgcctacatcatccacgcctacaaggacaaggactgggtgtgggagcacttcagctccatggagaaggaggaccagagcctgaagttctgcctggaggagcgggactttgaggccggcgtgtttgagctggaggccatcgtgaacagcatcaagaggagcaggaagatcatcttcgtcatcacccaccacctgctgaaggaccccctgtgcaagcgcttcaaggtgcaccacgctgtgcagcaggccatcgagcagaacctggacagcatcatcctggtgttcctggaggagatcccagactacaagctgaaccacgccctgtgcctgcggcggggcatgttcaagagccactgcatcctgaactggcctgtgcagaaggagagaattggagccttccgccacaagctgcaggtggccctgggcagcaagaacagcgtgcactag

SEQ ID NO: 173420 - DNA, 2613 bp, synthetic construct
  misc_feature 1..2613: note = Description of Artificial Sequence: Synthetic coding sequence
  source 1..2613: mol_type = other DNA
atgaggcagaccctgccctgcatctacttctggggcggcctgctgcccttcggcatgctgtgtgccagcagcaccaccaagtgcaccgtgtcccatgaggtggccgactgcagccacctgaagctgacccaggtgcctgatgacctgcccaccaacatcaccgtgctgaacctgacccacaaccagctgcggcggctgcctgctgccaacttcacccgctacagccagctgaccagcctggatgtgggcttcaacaccatcagcaagctggagcctgagctgtgccagaagctgcccatgctgaaggtgctgaacctgcagcacaatgagctgagccagctgagtgacaagacctttgccttctgcaccaacctgacagagctgcacctgatgagcaacagcatccagaagatcaagaacaacccctttgtgaagcagaagaacctgatcaccctggacctgagccacaacggcctgagcagcaccaagctgggcacccaggtgcagctggagaacctgcaggagctgctgctgagcaacaacaagatccaggccctgaagtctgaggagctggacatctttgccaacagcagcctgaagaagctggagctgagcagcaaccagatcaaggagttcagccctggctgcttccacgccatcggccgcctgtttggcctcttcctgaacaacgtgcagctgggccccagcctgacagagaagctgtgcctggagctggccaacaccagcatccggaacctgagcctgagcaacagccagctgagcaccaccagcaacaccaccttcctgggcctgaagtggaccaacctgaccatgctggacctgagctacaacaacctgaatgtggtgggcaatgacagctttgcctggctgccccagctggagtacttcttcctggagtacaacaacatccagcacctgttcagccacagcctgcacggcctcttcaacgtgcgctacctgaacctgaagaggagcttcaccaagcagagcatcagcctggccagcctgcccaagattgatgacttctccttccagtggctgaagtgcctggagcacctgaacatggaggacaatgacatccctggcatcaagagcaacatgttcaccggcctcatcaacctgaagtacctgagcctgagcaacagcttcaccagcctgcggaccctgaccaatgagacctttgtgtccctggcccacagccccctgcacatcctgaacctgaccaagaacaagatcagcaagattgaaagtgatgccttctcctggctgggccacctggaggtgctggacctgggcctgaatgaaattggccaggagctgaccggccaggagtggaggggcctggagaacatctttgagatctacctgagctacaacaagtacctgcagctgaccagaaattcctttgccctggtgcccagcctgcagaggctgatgctgcggcgggtggccctgaagaatgtggacagcagccccagccccttccagcccctgaggaacctgaccatcctggacctgagcaacaacaacatcgccaacatcaatgatgacatgctggagggcctggagaagctggagatcctggacctgcagcacaacaacctggcccggctgtggaagcacgccaaccctgggggccccatctacttcctgaagggcctgagccacctgcacatcctgaacctggagagcaatggatttgatgagatccctgtggaggtgttcaaggacctgtttgagctgaagatcatcgacctgggcctgaacaacctgaacaccctgcctgccagcgtcttcaacaaccaggtgtccctgaagagcctgaacctgcagaagaacctgatcacctctgtggagaagaaggtgtttggacctgccttcaggaacctgacagagctggacatgaggttcaacccctttgactgcacctgtgagagcatcgcctggtttgtgaactggatcaatgagacccacaccaacatccctgagctgagcagccactacctgtgcaacaccccaccccactaccacggcttccctgtgcggctgtttgacaccagcagctgcaaggacagcgccccctttgagctgttcttcatgatcaacaccagcatcctgctgatcttcatcttcatcgtgctgctgatccactttgagggctggaggatctccttctactggaatgtgtctgtgcaccgggtgctgggcttcaaggagattgaccggcagacagagcagtttgaatatgctgcctacatcatccacgcctacaaggacaaggactgggtgtgggagcacttcagctccatggagaaggaggaccagagcctgaagttctgcctggaggagcgggactttgaagctggggtgtttgagctggaggccatcgtgaacagcatcaagaggagcaggaagatcatctttgtgatcacccaccacctgctgaaggaccccctgtgcaagcgcttcaaggtgcaccacgctgtgcagcaggccatcgagcagaacctggacagcatcatcctggtgttcctggaggagatcccagactacaagctgaaccacgccctgtgcctgcggcgggccaagtag

SEQ ID NO: 173421 - DNA, 2391 bp, synthetic construct
  misc_feature 1..2391: note = Description of Artificial Sequence: Synthetic coding sequence
  source 1..2391: mol_type = other DNA
atgaccaaggacaaggagcccatcgtgaagagcttccactttgtgtgcctgatgatcatcatcgtgggcacccgcatccagttcagtgatggaaatgaatttgctgtggacaagagcaagaggggcctcatccacgtgcccaaggacctgcccctgaagaccaaggtgctggacatgagccagaactacatcgccgagctgcaggtgtctgacatgtccttcctgtctgagctgactgtgctgcggctgagccacaaccgcatccagctgctggacctgagcgtcttcaagttcaaccaggacctggagtacctggacctgagccacaaccagctgcagaagatcagctgccaccccatcgtgtccttccgccacctggacctgtccttcaatgacttcaaggccctgcccatctgcaaggagtttggaaacctgagccagctgaacttcctgggcctgagcgccatgaagctgcagaagctggacctgctgcccatcgcccacctgcacctgagctacatcctgctggacctgaggaactactacatcaaggaaaatgaaacagagagcctgcagatcctgaatgccaagaccctgcacctggtgttccaccccaccagcctgtttgccatccaggtgaacatctctgtgaacaccctgggctgcctgcagctgaccaacatcaagctgaatgatgacaactgccaggtgttcatcaagttcctgtctgagctgacccggggcagcaccctgctgaacttcaccctgaaccacatcgagaccacctggaagtgcctggtgcgggtcttccagttcctgtggcccaagcctgtggagtacctgaacatctacaacctgaccatcatcgagagcatccgggaggaggacttcacctacagcaagaccaccctgaaggccctgaccatcgagcacatcaccaaccaggtgttcctgttcagccagacagccctgtacaccgtcttcagcgagatgaacatcatgatgctgaccatcagtgacacccccttcatccacatgctgtgcccccacgcccccagcaccttcaagttcctgaacttcacccagaatgtgttcacagacagcatctttgagaagtgcagcaccctggtgaagctggagaccctcatcctgcagaagaatggcctgaaggacctcttcaaggtgggcctgatgaccaaggacatgcccagcctggagatcctggatgtgtcctggaacagcctggagagcggccgccacaaggagaactgcacctgggtggagagcatcgtggtgctgaacctgagcagcaacatgctgacagattctgtgttccgctgcctgcccccacgcatcaaggtgctggacctgcacagcaacaagatcaagtctgtgcccaagcaggtggtgaagctggaggccctgcaggagctgaatgtggccttcaacagcctgacagacctgcccggctgcggcagcttcagcagcctgtctgtgctgatcatcgaccacaacagcgtgagccaccccagcgctgacttcttccagagctgccagaagatgaggagcatcaaggccggggacaaccccttccagtgcacctgtgagctgcgggagtttgtgaagaacatcgaccaggtgtcctctgaggtgctggagggctggccagacagctacaagtgtgactacccagagagctaccggggcagccccctgaaggacttccacatgtctgagctgagctgcaacatcaccctgctgattgtgaccatcggggccaccatgctggtgctggccgtgacagtgaccagcctgtgcatctacctggacctgccctggtacctgaggatggtgtgccagtggacccagacccggcggcgggccaggaacatccccctggaggagctgcagaggaacctgcagttccacgccttcatctcctacagcgagcatgattctgcctgggtgaagtctgagctggtgccctacctggagaaggaggacatccagatctgcctgcacgagaggaactttgtgcctgggaagagcatcgtggagaacatcatcaactgcatcgagaagagctacaagagcatctttgtgctgagccccaactttgtgcagagcgagtggtgccactatgagctgtactttgcccaccacaacctcttccacgagggcagcaacaacctgatcctgatcctgctggagcccatcccccagaacagcatccccaacaagtaccacaagctgaaggccctgatgacccagaggacctacctgcagtggcccaaggagaagagcaagaggggcctcttctgggccaacatccgggccgccttcaacatgaagctgaccctggtgacagagaacaatgatgtgaagagctag

SEQ ID NO: 173422 - DNA, 2391 bp, synthetic construct; identical to SEQ ID NO: 173421
  misc_feature 1..2391: note = Description of Artificial Sequence: Synthetic coding sequence
  source 1..2391: mol_type = other DNA

SEQ ID NO: 173423 - DNA, 453 bp, synthetic construct
  misc_feature 1..453: note = Description of Artificial Sequence: Synthetic coding sequence
  source 1..453: mol_type = other DNA
atgaccaaggacaaggagcccatcgtgaagagcttccactttgtgtgcctgatgatcatcatcgtgggcacccgcatccagttcagtgatggaaatgaatttgctgtggacaagagcaagaggggcctcatccacgtgcccaaggacctgcccctgaagaccaaggtgctggacatgagccagaactacatcgccgagctgcaggtgtctgacatgtccttcctgtctgagctgactgtgctgcggctgagccacaaccgcatccagctgctggacctgagcgtcttcaagttcaaccaggacctggagtacctggacctgagccacaaccagctgcagaagatcagctgccaccccatcgtgtccttccgccacctggacctgtccttcaatgacttcaaggccctgcccatctgcaaggagtttggaaacctgagccagctgaacttctag

SEQ ID NO: 173424 - DNA, 1443 bp, synthetic construct
  misc_feature 1..1443: note = Description of Artificial Sequence: Synthetic coding sequence
  source 1..1443: mol_type = other DNA
atgaccaaggacaaggagcccatcgtgaagagcttccactttgtgtgcctgatgatcatcatcgtgggcacccgcatccagttcagtgatggaaatgaatttgctgtggacaagagcaagaggggcctcatccacgtgcccaaggacctgcccctgaagaccaaggtgctggacatgagccagaactacatcgccgagctgcaggtgtctgacatgtccttcctgtctgagctgactgtgctgcggctgagccacaaccgcatccagctgctggacctgagcgtcttcaagttcaaccaggacctggagtacctggacctgagccacaaccagctgcagaagatcagctgccaccccatcgtgtccttccgccacctggacctgtccttcaatgacttcaaggccctgcccatctgcaaggagtttggaaacctgagccagctgaacttcctgggcctgagcgccatgaagctgcagaagctggacctgctgcccatcgcccacctgcacctgagctacatcctgctggacctgaggaactactacatcaaggaaaatgaaacagagagcctgcagatcctgaatgccaagaccctgcacctggtgttccaccccaccagcctgtttgccatccaggtgaacatctctgtgaacaccctgggctgcctgcagctgaccaacatcaagctgaatgatgacaactgccaggtgttcatcaagttcctgtctgagctgacccggggcagcaccctgctgaacttcaccctgaaccacatcgagaccacctggaagtgcctggtgcgggtcttccagttcctgtggcccaagcctgtggagtacctgaacatctacaacctgaccatcatcgagagcatccgggaggaggacttcacctacagcaagaccaccctgaaggccctgaccatcgagcacatcaccaaccaggtgttcctgttcagccagacagccctgtacaccgtcttcagcgagatgaacatcatgatgctgaccatcagtgacacccccttcatccacatgctgtgcccccacgcccccagcaccttcaagttcctgaacttcacccagaatgtgttcacagacagcatctttgagaagtgcagcaccctggtgaagctggagaccctcatctttgtgctgagccccaactttgtgcagagcgagtggtgccactatgagctgtactttgcccaccacaacctcttccacgagggcagcaacaacctgatcctgatcctgctggagcccatcccccagaacagcatccccaacaagtaccacaagctgaaggccctgatgacccagaggacctacctgcagtggcccaaggagaagagcaagaggggcctcttctgggccaacatccgggccgccttcaacatgaagctgaccctggtgacagagaacaatgatgtgaagagctag

SEQ ID NO: 173425 - DNA, 276 bp, synthetic construct
  misc_feature 1..276: note = Description of Artificial Sequence: Synthetic coding sequence
  source 1..276: mol_type = other DNA
atgaccaaggacaaggagcccatcgtgaagagcttccactttgtgtgcctgatgatcatcatcgtgggcacccgcatccagttcagtgatggaaatgaatttgctgtggacaagagcaagaggggcctcatccacgtgcccaaggacctgcccctgaagaccaaggtgctggacatgagccagaactacatcgccgagctgcaggtgtctgacatgtccttcctgtctgagctgactgtgctgcggctgagccacaaccgcatccagctgctgtag

SEQ ID NO: 173426 - DNA, 3150 bp, synthetic construct
  misc_feature 1..3150: note = Description of Artificial Sequence: Synthetic coding sequence
  source 1..3150: mol_type = other DNA
atggtgttccccatgtggaccctgaagaggcagatcctgatcctcttcaacatcatcctgatcagcaagctgctgggcgcccgctggttccccaagaccctgccctgtgatgtgaccctggatgtgcccaagaaccacgtgattgtggactgcacagacaagcacctgacagagatccctgggggcatccccaccaacaccaccaacctgaccctgaccatcaaccacatcccagacatcagccctgccagcttccaccggctggaccacctggtggagattgacttccgctgcaactgtgtgcccatccccctgggcagcaagaacaacatgtgcatcaagaggctgcagatcaagcccaggagcttcagcggcctgacctacctgaagagcctgtacctggatggcaaccagctgctggagatcccccagggcctgccccccagcctgcagctgctgagcctggaggccaacaacatcttcagcatcaggaaggagaacctgacagagctggccaacatcgagatcctgtacctgggccagaactgctactacagaaacccctgctacgtgtcctacagcattgagaaggatgccttcctgaacctgaccaagctgaaggtgctgagcctgaaggacaacaacgtgacagctgtgcccaccgtgctgcccagcaccctgacagagctgtacctgtacaacaacatgattgccaagatccaggaggatgacttcaacaacctgaaccagctgcagatcctggacctgagcggcaactgcccccgctgctacaatgcccccttcccctgtgccccctgcaagaacaacagccccctgcagatccctgtgaatgcctttgatgccctgacagagctgaaggtgctgcggctgcacagcaacagcctgcagcacgtgcccccacgctggttcaagaacatcaacaagctgcaggagctggacctgagccagaacttcctggccaaggagattggagatgccaagttcctgcacttcctgcccagcctcatccagctggacctgtccttcaactttgagctgcaggtgtaccgggcctccatgaacctgagccaggccttcagcagcctgaagagcctgaagatcctgcgcatccggggctacgtgttcaaggagctgaagagcttcaacctgagccccctgcacaacctgcagaacctggaggtgctggacctgggcaccaacttcatcaagatcgccaacctgtccatgttcaagcagttcaagaggctgaaggtgattgacctgtctgtgaacaagatcagccccagcggggacagcagcgaggtgggcttctgcagcaatgcccggacctctgtggagagctatgagccccaggtgctggagcagctgcactacttccgctatgacaagtatgcccggagctgccgcttcaagaacaaggaggccagcttcatgtctgtgaatgaaagctgctacaagtatggccagaccctggacctgagcaagaacagcatcttctttgtgaagagcagtgacttccagcacctgtccttcctgaagtgcctgaacctgagcggcaacctgatcagccagaccctgaatggcagcgagttccagcccctggccgagctgcgctacctggacttcagcaacaaccggctggacctgctgcacagcacagcctttgaggagctgcacaagctggaggtgctggacatcagcagcaacagccactacttccagagcgagggcatcacccacatgctgaacttcaccaagaacctgaaggtgctgcagaagctgatgatgaatgacaatgacatcagcagcagcaccagcaggaccatggagagcgagagcctgcggaccctggagttccggggcaaccacctggatgtgctgtggagggagggggacaaccgctacctgcagctgttcaagaacctgctgaagctggaggagctggacatcagcaagaacagcctgtccttcctgcccagcggcgtgtttgatggcatgccacccaacctgaagaacctgagcctggccaagaatggcctgaagagcttctcctggaagaagctgcagtgcctgaagaacctggagaccctggacctgagccacaaccagctgaccaccgtgcctgagcggctgagcaactgcagccgcagcctgaagaacctgatcctgaagaacaaccagatccgcagcctgaccaagtacttcctgcaggatgccttccagctgcgctacctggacctgagcagcaacaagatccagatgatccagaagaccagcttcccagaaaatgtgctgaacaacctgaagatgctgctgctgcaccacaaccgcttcctgtgcacctgtgatgctgtgtggtttgtgtggtgggtgaaccacacagaggtgaccatcccctacctggccacagatgtgacctgtgtgggccctggggcccacaagggccagagcgtcatcagcctggacctgtacacctgtgagctggacctgaccaacctgatcctcttcagcctgagcatctctgtgtccctcttcctgatggtgatgatgacagccagccacctgtacttctgggatgtgtggtacatctaccacttctgcaaggccaagatcaagggctaccagaggctcatcagcccagactgctgctatgatgccttcatcgtgtatgacaccaaggaccctgctgtgacagagtgggtgctggccgagctggtggccaagctggaggacccccgggagaagcacttcaacctgtgcctggaggagcgggactggctgcccggccagcctgtgctggagaacctgagccagagcatccagctgagcaagaagacagtgtttgtgatgacagacaagtatgccaagacagagaacttcaagatcgccttctacctgagccaccagaggctgatggatgagaaggtggatgtgatcatcctgatcttcctggagaagcccttccagaagagcaagttcctgcagctgaggaagaggctgtgtggcagctctgtgctggagtggcccaccaacccccaggcccacccctacttctggcagtgcctgaagaatgccctggccacagacaaccacgtggcctacagccaggtgttcaaggagaccgtgtag

SEQ ID NO: 173427 - DNA, 1074 bp, synthetic construct
  misc_feature 1..1074: note = Description of Artificial Sequence: Synthetic coding sequence
  source 1..1074: mol_type = other DNA
atgaggcggcagctgcggagccggcgggcccccagcttcccctacagctaccgctaccgcctggatgatcctgatgaggccaaccagaactacctggctgatgaggaggaggaggccgaggaggaggcccgggtgacagtggtgcccaagtctgaggaggaggaggaggaggaggagaaggaggaggaggaggaggaggagaaggaggaggaggagggccagggccagcccactggaaatgcctggtggcagaagctgcagatcatgtctgagtacctgtgggaccctgagaggaggatgttcctggccaggacaggccagagctggagcctcatcctgctgatctacttcttcttctacgccagcctggccgctgtgatcaccctgtgcatgtacaccctcttcctgaccatcagcccctacatccccaccttcacagagcgggtgaagcccccaggagtgatgatccggccctttgcccacagcctgaacttcaacttcaacgtgtctgagccagacacctggcagcactacgtgatcagcctgaatggcttcctgcagggctacaatgacagcctgcaggaggagatgaatgtggactgccccccaggccagtacttcatccaggatggaaatgaagatgaggacaagaaggcctgccagttcaagaggagcttcctgaagaactgcagcggcctggaggaccccaccttcggctacagcacaggccagccctgcatcctgctgaagatgaaccgcatcgtgggcttccggcctgagctgggggaccctgtgaaggtgtcctgcaaggtgcagagaggagatgaaaatgacatccgcagcatctcctactacccagagagcgccagctttgacctgcgctactacccctactacggcaagctgacccacgtgaactacaccagccccctggtggccatgcacttcacagatgtggtgaagaaccaggccgtgcctgtgcagtgccagctgaagggcaagggcgtcatcaatgatgtgatcaatgacagatttgtgggccgggtcatcttcaccctgaacatcgagacctag

SEQ ID NO: 173428 - DNA, 3180 bp, synthetic construct
  misc_feature 1..3180: note = Description of Artificial Sequence: Synthetic coding sequence
  source 1..3180: mol_type = other DNA
atgaaggagagcagcctgcagaacagcagctgcagcctgggcaaggagaccaagaaggagaacatgttcctgcagagctccatgctgacctgcatcttcctgctgatcagcggcagctgtgagctgtgtgccgaggagaacttcagccgcagctacccctgtgatgagaagaagcagaatgacagcgtgattgctgagtgcagcaacagaaggctgcaggaggtgccccagacagtgggcaagtatgtgacagagctggacctgagtgacaacttcatcacccacatcaccaatgaaagcttccagggcctgcagaacctgaccaagatcaacctgaaccacaaccccaacgtgcagcaccagaatggaaatcctggcatccagagcaatggcctgaacatcacagatggagccttcctgaacctgaagaacctgcgggagctgctgctggaggacaaccagctgccccagatccccagcggcctgcctgagagcctgacagagctgagcctcatccagaacaacatctacaacatcaccaaggagggcatcagccgcctcatcaacctgaagaacctgtacctggcctggaactgctacttcaacaaggtgtgtgagaagaccaacattgaagatggagtgtttgagaccctgaccaacctggagctgctgagcctgtccttcaacagcctgagccacgtgccccccaagctgcccagcagcctgaggaagctgttcctgagcaacacccagatcaagtacatcagcgaggaggacttcaagggcctcatcaacctgaccctgctggacctgagcggcaactgcccccgctgcttcaatgcccccttcccctgtgtgccctgtgatggaggagccagcatcaacatcgacagatttgccttccagaacctgacccagctgcgctacctgaacctgagcagcaccagcctgaggaagatcaatgctgcctggttcaagaacatgccccacctgaaggtgctggacctggagttcaactacctggtgggggagatcgccagcggggccttcctgaccatgctgccccggctggagatcctggacctgtccttcaactacatcaagggcagctacccccagcacatcaacatcagcaggaacttcagcaagctgctgagcctgcgggccctgcacctgcggggctacgtgttccaggagctgcgggaggatgacttccagcccctgatgcagctgcccaacctgagcaccatcaacctgggcatcaacttcatcaagcagattgacttcaagctgttccagaacttcagcaacctggagatcatctacctgtctgaaaatcgcatcagccccctggtgaaggacacccggcagagctatgccaacagcagcagcttccagaggcacatcaggaagaggaggagcacagactttgaatttgacccccacagcaacttctaccacttcacccggcccctcatcaagccccagtgtgccgcctacggcaaggccctggacctgagcctgaacagcatcttcttcatcggccccaaccagtttgagaacctgcctgacatcgcctgcctgaacctgagcgccaacagcaatgcccaggtgctgagcggcacagagttcagcgccatcccccacgtgaagtacctggacctgaccaacaaccggctggactttgacaatgccagcgccctgacagagctgagtgacctggaggtgctggacctgagctacaacagccactacttcagaattgctggggtgacccaccacctggagttcatccagaacttcaccaacctgaaggtgctgaacctgagccacaacaacatctacaccctgacagacaagtacaacctggagagcaagagcctggtggagctggtgttcagcggcaaccggctggacatcctgtggaatgatgatgacaaccgctacatcagcatcttcaagggcctgaagaacctgacccggctggacctgagcctgaaccggctgaagcacatccccaatgaggccttcctgaacctgcctgccagcctgacagagctgcacatcaatgacaacatgctgaagttcttcaactggaccctgctgcagcagttcccccggctggagctgctggacctgcggggcaacaagctgctcttcctgacagacagcctgagtgacttcaccagcagcctgcggaccctgctgctgagccacaaccgcatcagccacctgcccagcggcttcctgtctgaggtgagcagcctgaagcacctggacctgagcagcaacctgctgaagaccatcaacaagagcgccctggagaccaagaccaccaccaagctgtccatgctggagctgcacggcaacccctttgaatgtacctgtgacatcggggacttccgccgctggatggatgagcacctgaatgtgaagatcccccggctggtggatgtgatctgtgccagccctggggaccagaggggcaagagcatcgtgtccctggagctgaccacctgtgtgtctgatgtgacagctgtgatcctcttcttcttcaccttcttcatcaccaccatggtgatgctggccgccctggcccaccacctgttctactgggatgtgtggttcatctacaacgtgtgcctggccaaggtgaagggctaccgcagcctgagcaccagccagaccttctatgatgcctacatctcctatgacaccaaggatgcctctgtgacagactgggtgatcaatgagctgcgctaccacctggaggagagccgggacaagaatgtgctgctgtgcctggaggagcgggactgggaccccggcctggccatcatcgacaacctgatgcagagcatcaaccagagcaagaagacagtgtttgtgctgaccaagaagtatgccaagtcctggaacttcaagacagccttctacctggccctgcagaggctgatggatgagaacatggatgtgatcatcttcatcctgctggagcctgtgctgcagcacagccagtacctgcggctgcggcagaggatctgcaagagcagcatcctgcagtggccagacaaccccaaggccgagggcctcttctggcagaccctgagaaatgtggtgctgacagaaaatgacagccgctacaacaacatgtatgtggacagcatcaagcagtactag

SEQ ID NO: 173429 - DNA, 3099 bp, synthetic construct
  misc_feature 1..3099: note = Description of Artificial Sequence: Synthetic coding sequence
  source 1..3099: mol_type = other DNA
atgggcttctgccgcagcgccctgcaccccctgagcctgctggtgcaggccatcatgctggccatgaccctggccctgggcaccctgcctgccttcctgccctgtgagctgcagccccacggcctggtgaactgcaactggctgttcctgaagtctgtgccccacttctccatggccgcccccagaggaaatgtgaccagcctgagcctgagcagcaaccgcatccaccacctgcatgacagcgactttgcccacctgcccagcctgcggcacctgaacctgaagtggaactgcccccctgtgggcctgagccccatgcacttcccctgccacatgaccatcgagcccagcaccttcctggccgtgcccaccctggaggagctgaacctgagctacaacaacatcatgacagtgcctgccctgcccaagagcctcatcagcctgagcctgagccacaccaacatcctgatgctggacagcgccagcctggccggcctgcacgccctgcgcttcctgttcatggatggcaactgctactacaagaacccctgccggcaggccctggaggtggcccctggggccctgctgggcctgggcaacctgacccacctgagcctgaagtacaacaacctgactgtggtgcccaggaacctgcccagcagcctggagtacctgctgctgagctacaaccgcatcgtgaagctggcccctgaggacctggccaacctgacagccctgcgggtgctggatgtgggcggcaactgccgccgctgtgaccacgcccccaacccctgcatggagtgccccaggcacttcccccagctgcacccagacaccttcagccacctgagccggctggagggcctggtgctgaaggacagcagcctgtcctggctgaatgcctcctggttccggggcctgggcaacctgcgggtgctggacctgtctgagaacttcctgtacaagtgcatcaccaagaccaaggccttccagggcctgacccagctgaggaagctgaacctgtccttcaactaccagaagagggtgtcctttgcccacctgagcctggcccccagctttggcagcctggtggccctgaaggagctggacatgcacggcatcttcttccgcagcctggatgagaccaccctgcggcccctggcccggctgcccatgctgcagaccctgcggctgcagatgaacttcatcaaccaggcccagctgggcatcttccgggccttccctggcctgcgctacgtggacctgagtgacaaccgcatcagcggggccagcgagctgacagccaccatgggagaggctgatggaggagagaaggtgtggctgcagcccggggacctggccccagcccctgtggacacccccagcagcgaggacttccggcccaactgcagcaccctgaacttcaccctggacctgagcaggaacaacctggtgacagtgcagcctgagatgtttgcccagctgagccacctgcagtgcctgcggctgagccacaactgcatcagccaggccgtgaatggcagccagttcctgcccctgaccggcctgcaggtgctggacctgagccacaacaagctggacctgtaccacgagcacagcttcacagagctgccccggctggaggccctggacctgagctacaacagccagcccttcggcatgcagggcgtgggccacaacttctcctttgtggcccacctgcggaccctgcggcacctgagcctggcccacaacaacatccacagccaggtgtcccagcagctgtgcagcaccagcctgcgggccctggacttctctggaaatgccctgggccacatgtgggccgagggggacctgtacctgcacttcttccagggcctgagcggcctcatctggctggacctgagccagaaccggctgcacaccctgctgccccagaccctgaggaacctgcccaagagcctgcaggtgctgcggctgcgggacaactacctggccttcttcaagtggtggagcctgcacttcctgcccaagctggaggtgctggacctggccggcaaccagctgaaggccctgaccaacggcagcctgcctgctggcacccggctgcggcggctggatgtgtcctgcaacagcatcagctttgtggcccctggcttcttcagcaaggccaaggagctgcgggagctgaacctgagcgccaatgccctgaagacagtggaccacagctggtttggccccctggccagcgccctgcagatcctggatgtgtctgccaaccccctgcactgtgcctgtggggccgccttcatggacttcctgctggaggtgcaggccgctgtgcccggcctgcccagccgggtgaagtgtggcagccctggccagctgcagggcctgagcatctttgcccaggacctgcggctgtgcctggatgaggccctgtcctgggactgctttgccctgagcctgctggccgtggccctgggcctgggcgtgcccatgctgcaccacctgtgtggctgggacctgtggtactgcttccacctgtgcctggcctggctgccctggaggggccggcagagcggcagagatgaagatgccctgccctatgatgcctttgtggtgtttgacaagacccagagcgctgtggccgactgggtgtacaatgagctgcggggccagctggaggagtgccggggccgctgggccctgcggctgtgcctggaggagcgggactggctgcccgggaagaccctgtttgagaacctgtgggcctctgtgtatggcagcaggaagaccctgtttgtgctggcccacacagacagagtgtctggcctgctgcgggccagcttcctgctggcccagcagaggctgctggaggacaggaaggatgtggtggtgctggtgatcctgagcccagatggccgccgcagccgctacgtgcggctgcggcagaggctgtgccggcagagcgtgctgctgtggccccaccagcccagcggccagaggagcttctgggcccagctgggcatggccctgacccgggacaaccaccacttctacaacagaaacttctgccagggccccacagctgagtag

SEQ ID NO: 173430 - DNA, 2139 bp, synthetic construct
  misc_feature 1..2139: note = Description of Artificial Sequence: Synthetic coding sequence
  source 1..2139: mol_type = other DNA
atggcctgcaccggccccagcctgcccagcgcctttgacatcctgggcgccgccggccaggacaagctgctgtacctgaagcacaagctgaagacccccaggcctggctgccagggccaggacctgctgcacgccatggtgctgctgaagctgggccaggagacagaggcccgcatcagcctggaggccctgaaggcagatgctgtggcccggctggtggcccggcagtgggccggcgtggacagcacagaggaccctgaggagcccccagatgtgtcctgggccgtggcccggctgtaccacctgctggccgaggagaagctgtgcccagccagcctgagagatgtggcctaccaggaggccgtgaggaccctgagcagcagagatgaccaccggctgggggagctgcaggatgaggccaggaacagatgtggctgggacattgctggggaccccggcagcatccgcaccctgcagagcaacctgggctgcctgccccccagcagcgccctgcccagcggcaccaggagcctgccccggcccattgatggagtgtctgactggagccagggctgcagcctgcggagcacaggcagccctgccagcctggccagcaacctggagatcagccagagccccaccatgcccttcctgagcctgcacaggagcccccacggccccagcaagctgtgtgatgacccccaggccagcctggtgcctgagcctgtgcctgggggctgccaggagcctgaggagatgtcctggccacccagcggggagatcgccagccccccagagctgcccagcagccccccacctggcctgcctgaggtggccccagatgccaccagcacaggcctgcctgacaccccagctgcccctgagaccagcaccaactaccctgtggagtgcacagagggcagcgctggcccccagagcctgcccctgcccatcctggagcctgtgaagaacccctgcagcgtgaaggaccagacccccctgcagctgtctgtggaggacaccaccagccccaacaccaagccctgcccccccacccccaccaccccagagaccagccccccacctcctcctcctccacccagcagcaccccctgcagcgcccacctgacccccagcagcctcttccccagcagcctggagagcagcagcgagcagaagttctacaactttgtgatcctgcacgcccgggcagatgagcacatcgccctgcgggtgcgggagaagctggaggccctgggcgtgcctgatggagccaccttctgtgaggacttccaggtgcccggccgcggggagctgagctgcctgcaggatgccatcgaccacagcgccttcatcatcctgctgctgaccagcaactttgactgccgcctgagcctgcaccaggtgaaccaggccatgatgagcaacctgacccggcagggcagcccagactgtgtgatccccttcctgcccctggagagcagccctgcccagctgagcagtgacacagccagcctgctgagcggcctggtgcggctggatgagcacagccagatctttgccaggaaggtggccaacaccttcaagccccaccggctgcaggccaggaaggccatgtggaggaaggagcaggacacccgggccctgcgggagcagagccagcacctggatggagagaggatgcaggccgccgccctgaatgctgcctacagcgcctacctgcagagctacctgagctaccaggcccagatggagcagctgcaggtggccttcggcagccacatgagctttggaactggagccccctatggagccaggatgccctttggaggccaggtgcccctgggcgcccccccacccttccccacctggccaggctgcccccagcccccacccctgcacgcctggcaggccggcaccccacctccacccagcccccagcctgctgccttcccccagagcctgcccttcccccagagccctgccttccccacagccagccctgccccaccccagagccctggcctgcagcccctcatcatccaccacgcccagatggtgcagctgggcctgaacaaccacatgtggaaccagaggggcagccaggcccctgaggacaagacccaggaggccgagtag

SEQ ID NO: 173431 - DNA, 3042 bp, synthetic construct
  misc_feature 1..3042: note = Description of Artificial Sequence: Synthetic coding sequence
  source 1..3042: mol_type = other DNA
atgggcctgggcaccctgagccccaggatgctggtgtggctggtggccagcggcatcgtgttctacggggagctgtgggtgtgtgccggcctggactatgactacacctttgatggaaatgaggaggacaagacagagaccatcgactacaaggacccctgcaaggctgctgtgttctggggagacatcgccctggatgatgaggacctgaacatcttccagattgacaggaccatcgacctgacccagaaccccttcggcaacctgggccacaccactggaggcctgggggaccacgccatgagcaagaagagaggagccctgtaccagctgattgaccgcatccgccgcatcggcttcggcctggagcagaacaacacagtgaagggcaaggtgcccctgcagttcagcggccagaatgagaagaacagagtgccccgggccgccaccagcaggacagagcgcatctggccaggcggcgtcatcccctacgtgattggaggcaacttcaccggcagccagagggccatgttcaagcaggccatgaggcactgggagaagcacacctgtgtgaccttcatcgagaggagtgatgaggagagctacatcgtgttcacctaccggccctgtggctgctgcagctatgtgggcagaagaggaaatggcccccaggccatcagcatcggcaagaactgtgacaagtttggaattgtggtgcatgagctgggccacgtgattggcttctggcatgagcacaccaggccagaccgggacaaccacgtgaccatcatccgggagaacatccagcccggccaggagtacaacttcctgaagatggagcctggagaggtgaacagcctgggggagagatatgactttgacagcatcatgcactacgccaggaacaccttcagccggggcatgttcctggacaccatcctgcccagcagagatgacaatggcatccggcctgccatcggccagaggacccggctgagcaagggggacatcgcccaggccaggaagctgtaccgctgcccagcctgtggggagaccctgcaggagagcaatggaaacctgagcagccctggcttccccaacggctaccccagctacacccactgcatctggagggtgtctgtgaccccaggagagaagatcgtgctgaacttcaccaccatggacctgtacaagagcagcctgtgctggtatgactacatcgaggtgagagatggctactggaggaagagccccctgctgggccgcttctgtggggacaagctgcctgaggtgctgaccagcacagacagcaggatgtggattgagttccgcagcagcagcaactgggtgggcaagggctttgctgctgtgtatgaggccatctgtggcggggagatcaggaagaatgaaggccagatccagagccccaactacccagatgactaccggcccatgaaggaatgtgtgtggaagatcaccgtgtctgagagctaccacgtgggcctgaccttccagagctttgaaattgaaagacatgacaactgtgcctatgactacctggaggtgagagatggcaccagcgagaacagccccctgattggccgcttctgtggctatgacaagccagaggacatccgcagcaccagcaacaccctgtggatgaagtttgtgtctgatggcaccgtgaacaaggccggctttgctgccaacttcttcaaggaggaggatgaatgtgccaagccagaccggggcggctgtgagcagcgctgcctgaacaccctgggcagctaccagtgtgcctgtgagcccggctatgagctgggccctgacagaagaagctgtgaggccgcctgtggcggcctgctgaccaagctgaatggcaccatcaccaccccaggctggcccaaggagtacccacccaacaagaactgtgtgtggcaggtggtggcccccacccagtaccgcatctctgtgaagtttgagttctttgagctggagggcaatgaggtgtgcaagtatgactatgtggagatctggagcggcctgagcagcgagagcaagctgcacggcaagttctgtggggctgaggtgcctgaggtgatcaccagccagttcaacaacatgagaattgagttcaagagtgacaacacagtgtccaagaagggcttcaaggcccacttcttcagtgacaaggatgaatgttccaaggacaatggaggctgccagcatgaatgtgtgaacaccatgggcagctacatgtgccagtgcagaaatggatttgtgctgcatgacaacaagcatgactgcaaggaggctgaatgtgagcagaagatccacagccccagcggcctcatcaccagccccaactggccagacaagtaccccagcaggaaagaatgtacctgggagatcagcgccaccccaggccaccgcatcaagctggccttcagcgagtttgaaattgagcagcaccaggagtgtgcctatgaccacctggaggtgtttgatggagaaacagagaagagccccatcctgggccgcctgtgtggcaacaagatcccagaccccctggtggccaccggcaacaagatgtttgtgcgctttgtgtctgatgcctctgtgcagaggaagggcttccaggccacccacagcacagaatgtggcggccgcctgaaggccgagagcaagccccgggacctgtacagccacgcccagtttggagacaacaactacccaggccaggtggactgtgagtggctgctggtgtctgagcggggcagccggctggagctgtccttccagacctttgaggtggaggaggaggccgactgtggctatgactatgtggagctgtttgatggcctggacagcacagctgtgggcctgggccgcttctgtggcagcggccccccagaggagatctacagcattggagacagcgtgctgatccacttccacacagatgacaccatcaacaagaagggcttccacatccgctacaagagcatccgctacccagacaccacccacaccaagaagtag

SEQ ID NO: 173432 - DNA, 1179 bp, synthetic construct
  misc_feature 1..1179: note = Description of Artificial Sequence: Synthetic coding sequence
  source 1..1179: mol_type = other DNA
atgggcctgggcaccctgagccccaggatgctggtgtggctggtggccagcggcatcgtgttctacggggagctgtgggtgtgtgccggcctggactatgactacacctttgatggaaatgaggaggacaagacagagaccatcgactacaaggacccctgcaaggctgctgtgttctggggagacatcgccctggatgatgaggacctgaacatcttccagattgacaggaccatcgacctgacccagaaccccttcggcaacctgggccacaccactggaggcctgggggaccacgccatgagcaagaagagaggagccctgtaccagctgattgaccgcatccgccgcatcggcttcggcctggagcagaacaacacagtgaagggcaaggtgcccctgcagttcagcggccagaatgagaagaacagagtgccccgggccgccaccagcaggacagagcgcatctggccaggcggcgtcatcccctacgtgattggaggcaacttcaccggcagccagagggccatgttcaagcaggccatgaggcactgggagaagcacacctgtgtgaccttcatcgagaggagtgatgaggagagctacatcgtgttcacctaccggccctgtggctgctgcagctatgtgggcagaagaggaaatggcccccaggccatcagcatcggcaagaactgtgacaagtttggaattgtggtgcatgagctgggccacgtgattggcttctggcatgagcacaccaggccagaccgggacaaccacgtgaccatcatccgggagaacatccagcccggccaggagtacaacttcctgaagatggagcctggagaggtgaacagcctgggggagagatatgactttgacagcatcatgcactacgccaggaacaccttcagccggggcatgttcctggacaccatcctgcccagcagagatgacaatggcatccggcctgccatcggccagaggacccggctgagcaagggggacatcgcccaggccaggaagctgtaccgctgcccagcctgtggggagaccctgcaggagagcaatggaaacctgagcagccctggcttccccaacggctaccccagctacacccactgcatctggagggtgtctgtgaccccaggagagaaggtggtgttcagcctgtgctag

SEQ ID NO: 173433 - DNA, 3048 bp, synthetic construct
  misc_feature 1..3048: note = Description of Artificial Sequence: Synthetic coding sequence
  source 1..3048: mol_type = other DNA
atgccccgggccacagccctgggcgccctggtgtccctgctgctgctgctgcccctgcccagaggagctgggggcctgggggagaggccagatgccacagctgactacagcgagctggatggagaggagggcacagagcagcagctggagcactaccatgacccctgcaaggctgctgtgttctggggagacatcgccctggatgaagatgacctgaagctgttccacatcgacaaggcccgggactggaccaagcagacagtgggcgccaccggccacagcactggaggcctggaggagcaggccagcgagagcagcccagacaccacagccatggacaccggcaccaaggaggccggcaaggatggaagagagaacaccaccctgctgcacagccctggcaccctgcacgccgccgccaagaccttcagcccccgggtgcggcgggccaccaccagcaggacagagcgcatctggccaggcggcgtcatcccctacgtgattggaggcaacttcaccggcagccagagggccatcttcaagcaggccatgaggcactgggagaagcacacctgtgtgaccttcatcgagaggacagatgaggagagcttcatcgtgttctcctaccgcacctgtggctgctgcagctatgtgggccggcggggcggcggcccccaggccatcagcatcggcaagaactgtgacaagtttggaattgtggcccacgagctgggccacgtggtgggcttctggcatgagcacaccaggccagaccgggaccagcacgtgaccatcatccgggagaacatccagcccggccaggagtacaacttcctgaagatggaggccggggaggtgagcagcctgggggagacctatgactttgacagcatcatgcactacgccaggaacaccttcagcagaggagtcttcctggacaccatcctgccccggcaggatgacaacggggtgcggcccaccatcggccagagggtgcggctgagccagggcgacatcgcccaggccaggaagctgtacaagtgcccagcctgtggggagaccctgcaggacaccactggaaacttcagcgcccctggcttccccaacggctaccccagctacagccactgtgtgtggaggatctctgtgaccccaggagagaagatcgtgctgaacttcacctccatggacctcttcaagagccggctgtgctggtatgactatgtggaggtgagagatggctactggaggaaggcccccctgctgggccgcttctgtggggacaagatccctgagcccctggtgtccacagacagccggctgtgggtggagttccgcagcagcagcaacatcctgggcaagggcttctttgctgcctatgaggccacctgtggcggggacatgaacaaggatgctggccagatccagagccccaactacccagatgactaccggcccagcaaagaatgtgtgtggaggatcaccgtgtctgagggcttccacgtgggcctgaccttccaggcctttgaaattgaaagacatgacagctgtgcctatgactacctggaggtgagagatggccccacagaggagagcgccctgattggccacttctgtggctatgagaagccagaagatgtgaagagcagcagcaaccggctgtggatgaagtttgtgtctgatggcagcatcaacaaggccggctttgctgccaacttcttcaaggaggtggatgaatgttcctggccagaccatggaggctgtgagcaccgctgtgtgaacaccctgggcagctacaagtgtgcctgtgaccccggctatgagctggccgctgacaagaagatgtgtgaggtggcctgtggcggcttcatcaccaagctgaatggcaccatcaccagccctggctggcccaaggagtaccccaccaacaagaactgtgtgtggcaggtggtggccccagcccagtaccgcatcagcctgcagtttgaggtgtttgagctggagggcaatgatgtgtgcaagtatgactttgtggaggtgcgcagcggcctgagcccagatgccaagctgcacggccgcttctgtggcagcgagaccccagaggtgatcaccagccagagcaacaacatgagggtggagttcaagagtgacaacacagtgtccaagaggggcttccgggcccacttcttcagtgacaaggatgaatgtgccaaggacaatggaggctgccagcatgaatgtgtgaacaccttcggcagctacctgtgccgctgcagaaatggctactggctgcatgaaaatggacatgactgcaaggaggccggctgtgcccacaagatcagctctgtggagggcaccctggccagccccaactggccagacaagtaccccagcagaagagaatgtacctggaacatcagcagcacagctggccaccgggtgaagctgaccttcaatgaatttgaaattgagcagcaccaggagtgtgcctatgaccacctggagatgtatgatggccctgacagcctggcccccatcctgggccgcttctgtggcagcaagaagccagaccccaccgtggccagcggcagctccatgttcctgcgcttctacagtgatgcctctgtgcagaggaagggcttccaggccgtgcacagcacagaatgtggcggccgcctgaaggccgaggtgcagaccaaggagctgtacagccacgcccagtttggagacaacaactaccccagcgaggcccgctgtgactgggtgattgtggccgaggatggctatggagtggagctgaccttccgcacctttgaggtggaggaggaggccgactgtggctatgactacatggaggcctatgatggctatgacagcagcgccccccggctgggccgcttctgtggcagcggccccctggaggagatctacagcgctggggacagcctgatgatccgcttcagaacagatgacaccatcaacaagaagggcttccacgcccgctacaccagcaccaagttccaggatgccctgcacatgaagaagtag

SEQ ID NO: 173434 - DNA, 2298 bp, synthetic construct
  misc_feature 1..2298: note = Description of Artificial Sequence: Synthetic coding sequence
  source 1..2298: mol_type = other DNA
atgtctggggaccacctgcacaatgacagccagatcgaggccgacttccggctgaatgacagccacaagcacaaggacaagcacaaggaccgggagcaccgccacaaggagcacaagaaggagaaggaccgggagaagagcaagcacagcaacagcgagcacaaggacagcgagaagaagcacaaggagaaggagaagaccaagcacaaggatggcagcagcgagaagcacaaggacaagcacaaggaccgggacaaggagaagaggaaggaggagaaggtgcgggccagcggagatgccaagatcaagaaggagaaggaaaatggcttcagcagccccccccagatcaaggatgagccagaagatgatggctactttgtgccccccaaggaggacatcaagcccctgaagaggcccagagatgaagatgatgctgactacaagcccaagaagatcaagacagaggacaccaagaaggagaagaagaggaagctggaggaggaggaggatggcaagctgaagaagcccaagaacaaggacaaggacaagaaggtgcctgagccagacaacaagaagaagaagcccaagaaggaggaggagcagaagtggaagtggtgggaggaggagcgctacccagagggcatcaagtggaagttcctggagcacaagggccctgtgtttgccccaccctatgagcccctgcctgaaaatgtgaagttctactatgatggcaaggtgatgaagctgagccccaaggccgaggaggtggccaccttctttgccaagatgctggaccacgagtacaccaccaaggagatcttcaggaagaacttcttcaaggactggaggaaggagatgaccaatgaggagaagaacatcatcaccaacctgagcaaatgtgacttcacccagatgagccagtacttcaaggcccagacagaggccaggaagcagatgagcaaggaggagaagctgaagatcaaggaggagaatgagaagctgctgaaggagtatggcttctgcatcatggacaaccacaaggagcgcatcgccaacttcaagattgagcccccaggcctcttccggggccggggcaaccaccccaagatgggcatgctgaagaggcgcatcatgcctgaggacatcatcatcaactgcagcaaggatgccaaggtgcccagccccccacctggccacaagtggaaggaggtgagacatgacaacaaggtgacctggctggtgtcctggacagagaacatccagggcagcatcaagtacatcatgctgaaccccagcagccgcatcaagggggagaaggactggcagaagtatgaaacagcccggcggctgaagaagtgtgtggacaagatccggaaccagtaccgggaggactggaagagcaaggagatgaaggtgcggcagagagctgtggccctgtacttcatcgacaagctggccctgcgggctggaaatgagaaggaggagggggagacagctgacacagtgggctgctgcagcctgcgggtggagcacatcaacctgcaccctgagctggatggccaggagtatgtggtggagtttgacttcctgggcaaggacagcatccgctactacaacaaggtgcctgtggagaagagggtcttcaagaacctgcagctgttcatggagaacaagcagccagaagatgacctgtttgaccggctgaacacaggcatcctgaacaagcacctgcaggacctgatggagggcctgacagccaaggtgttccgcacctacaatgccagcatcaccctgcagcagcagctgaaggagctgacagccccagatgagaacatcccagccaagatcctgagctacaacagagccaacagagctgtggccatcctgtgcaaccaccagagggccccacccaagacctttgagaagtccatgatgaacctgcagaccaagattgatgccaagaaggagcagctggctgatgcccggcgggacctgaagagcgccaaggcagatgccaaggtgatgaaggatgccaagaccaagaaggtggtggagagcaagaagaaggctgtgcagaggctggaggagcagctgatgaagctggaggtgcaggccacagaccgggaggagaacaagcagatcgccctgggcaccagcaagctgaactacctggacccccgcatcaccgtggcctggtgcaagaagtggggcgtgcccatcgagaagatctacaacaagacccagcgggagaagtttgcctgggccatcgacatggctgatgaagattatgagttctag

SEQ ID NO: 173435 - DNA, 1806 bp, synthetic construct
  misc_feature 1..1806: note = Description of Artificial Sequence: Synthetic coding sequence
  source 1..1806: mol_type = other DNA
atgagggtggtgcggctgctgcggctgcgggccgccctgaccctgctgggggaggtgcccaggaggcctgccagcagaggagtgcccggcagcaggaggacccagaagggcagcggggcccgctgggagaaggagaagcatgaagatggagtgaagtggaggcagctggagcacaagggcccctactttgccccaccctatgagcccctgcctgatggagtgcgcttcttctatgagggccggcctgtgcggctgtctgtggccgctgaggaggtggccaccttctacggccgcatgctggaccacgagtacaccaccaaggaggtgttcaggaagaacttcttcaatgactggaggaaggagatggctgtggaggagcgggaggtgatcaagagcctggacaagtgtgacttcacagagatccaccgctactttgtggacaaggccgccgccaggaaggtgctgagccgggaggagaagcagaagctgaaggaggaggccgagaagctgcagcaggagtttggctactgcatcctggatggccaccaggagaagattggcaacttcaagattgagcccccaggcctcttccggggccgcggggaccaccccaagatgggcatgctgaagaggcgcatcaccccagaagatgtggtgatcaactgcagccgggacagcaagatccctgagcccccagctggccaccagtggaaggaggtgcggagtgacaacacagtgacctggctggccgcctggacagaatctgtgcagaacagcatcaagtacatcatgctgaacccctgcagcaagctgaagggggagacagcctggcagaagtttgaaacagcccggcggctgcggggctttgtggatgagatccgcagccagtacagagctgactggaagagccgggagatgaagacccggcagagagctgtggccctgtacttcatcgacaagctggccctgcgggctggaaatgagaaggaggatggagaggccgctgacacagtgggctgctgcagcctgcgggtggagcacgtgcagctgcaccctgaggctgatggctgccagcacgtggtggagtttgacttcctgggcaaggactgcatccgctactacaacagagtgcctgtggagaagcctgtgtacaagaacctgcagctgttcatggagaacaaggaccccagagatgacctgtttgaccggctgaccaccaccagcctgaacaagcacctgcaggagctgatggatggcctgacagccaaggtgttccgcacctacaatgccagcatcaccctgcaggagcagctgcgggccctgaccagggcagaagattccattgctgccaagatcctgagctacaacagagccaacagagtggtggccatcctgtgcaaccaccagagggccacccccagcacctttgagaagtccatgcagaacctgcagaccaagatccaggccaagaaggagcaggtggccgaggcccgggcagagctgcggcgggcccgggcagagcacaaggcccagggagatggcaagagccgctctgtgctggagaagaagaggcggctgctggagaagctgcaggagcagctggcccagctgtctgtgcaggccacagacaaggaggagaacaagcaggtggccctgggcaccagcaagctgaactacctggacccccgcatcagcatcgcctggtgcaagcgcttccgggtgcctgtggagaagatctacagcaagacccagcgggagagatttgcctgggccctggccatggctggagaagattttgagttctag

SEQ ID NO: 173436 - DNA, 1512 bp, synthetic construct
  misc_feature 1..1512: note = Description of Artificial Sequence: Synthetic coding sequence
  source 1..1512: mol_type = other DNA
atgctggaccacgagtacaccaccaaggaggtgttcaggaagaacttcttcaatgactggaggaaggagatggctgtggaggagcgggaggtgatcaagagcctggacaagtgtgacttcacagagatccaccgctactttgtggacaaggccgccgccaggaaggtgctgagccgggaggagaagcagaagctgaaggaggaggccgagaagctgcagcaggagtttggctactgcatcctggatggccaccaggagaagattggcaacttcaagattgagcccccaggcctcttccggggccgcggggaccaccccaagatgggcatgctgaagaggcgcatcaccccagaagatgtggtgatcaactgcagccgggacagcaagatccctgagcccccagctggccaccagtggaaggaggtgcggagtgacaacacagtgacctggctggccgcctggacagaatctgtgcagaacagcatcaagtacatcatgctgaacccctgcagcaagctgaagggggagacagcctggcagaagtttgaaacagcccggcggctgcggggctttgtggatgagatccgcagccagtacagagctgactggaagagccgggagatgaagacccggcagagagctgtggccctgtacttcatcgacaagctggccctgcgggctggaaatgagaaggaggatggagaggccgctgacacagtgggctgctgcagcctgcgggtggagcacgtgcagctgcaccctgaggctgatggctgccagcacgtggtggagtttgacttcctgggcaaggactgcatccgctactacaacagagtgcctgtggagaagcctgtgtacaagaacctgcagctgttcatggagaacaaggaccccagagatgacctgtttgaccggctgaccaccaccagcctgaacaagcacctgcaggagctgatggatggcctgacagccaaggtgttccgcacctacaatgccagcatcaccctgcaggagcagctgcgggccctgaccagggcagaagattccattgctgccaagatcctgagctacaacagagccaacagagtggtggccatcctgtgcaaccaccagagggccacccccagcacctttgagaagtccatgcagaacctgcagaccaagatccaggccaagaaggagcaggtggccgaggcccgggcagagctgcggcgggcccgggcagagcacaaggcccagggagatggcaagagccgctctgtgctggagaagaagaggcggctgctggagaagctgcaggagcagctggcccagctgtctgtgcaggccacagacaaggaggagaacaagcaggtggccctgggcaccagcaagctgaactacctggacccccgcatcagcatcgcctggtgcaagcgcttccgggtgcctgtggagaagatctacagcaagacccagcgggagagatttgcctgggccctggccatggctggagaagattttgagttctag

SEQ ID NO: 173437 - DNA, 1512 bp, synthetic construct; identical to SEQ ID NO: 173436
  misc_feature 1..1512: note = Description of Artificial Sequence: Synthetic coding sequence
  source 1..1512: mol_type = other DNA

SEQ ID NO: 173438 - DNA, 1512 bp, synthetic construct; identical to SEQ ID NO: 173436
  misc_feature 1..1512: note = Description of Artificial Sequence: Synthetic coding sequence
  source 1..1512: mol_type = other DNA

SEQ ID NO: 173439 - DNA, 4569 bp, synthetic construct
  misc_feature 1..4569: note = Description of Artificial Sequence: Synthetic coding sequence
  source 1..4569: mol_type = other DNA
atgagcagaaatgacaaggagcccttctttgtgaagttcctgaagagcagtgacaacagcaagtgcttcttcaaggccctggagagcatcaaggagttccagagcgaggagtacctgcagatcatcacagaggaggaggccctgaagatcaaggaaaatgacaggagcctgtacatctgtgaccccttcagcggcgtggtgtttgaccacctgaagaagctgggctgccgcatcgtgggcccccaggtggtgatcttctgcatgcaccaccagagatgtgtgcccagggctgagcaccctgtgtacaacatggtgatgtctgatgtgaccatcagctgcaccagcctggagaaggagaagcgggaggaggtgcacaagtatgtgcagatgatgggcggccgggtgtacagagacctgaatgtgtctgtgacccacctgattgctggggaggtgggcagcaagaagtacctggtggccgccaacctgaagaagcccatcctgctgcccagctggatcaagaccctgtgggagaagagccaggagaagaagatcacccgctacacagacatcaacatggaggacttcaagtgccccatcttcctgggctgcatcatctgtgtgacaggcctgtgtggcctggacaggaaggaggtgcagcagctgactgtgaagcatggaggccagtacatgggccagctgaagatgaatgaatgtacccacctgattgtgcaggagcccaagggccagaagtatgaatgtgccaagcgctggaatgtgcactgtgtgaccacccagtggttctttgacagcattgagaagggcttctgccaggatgagagcatctacaagacagagcccaggcctgaggccaagaccatgcccaacagcagcacccccaccagccagatcaacaccatcgacagcaggaccctgagtgatgtgagcaacatcagcaacatcaatgccagctgtgtgtctgagagcatctgcaacagcctgaacagcaagctggagcccaccctggagaacctggagaacctggatgtgtctgccttccaggcccctgaggacctgctggatggctgccgcatctacctgtgtggcttcagcggcaggaagctggacaagctgcggcggctcatcaacagcggcggcggcgtgcgcttcaaccagctgaatgaagatgtgacccacgtgattgtgggggactatgatgatgagctgaagcagttctggaacaagagcgcccaccggccccacgtggtgggcgccaagtggctgctggagtgcttcagcaagggctacatgctgtctgaggagccctacatccacgccaactaccagcctgtggagatccctgtgagccacaagccagagagcaaggccgccctgctgaagaagaagaacagcagcttcagcaagaaggactttgcccccagcgagaagcatgagcaggctgatgaggacctgctgagccagtatgaaaatggcagcagcacagtggtggaggccaagaccagcgaggcccggcccttcaatgacagcacccacgccgagcccctgaatgacagcacccacatcagcctgcaggaggagaaccagagctctgtgagccactgtgtgcctgatgtgtccaccatcacagaggagggcctcttcagccagaagagcttcctggtgctgggcttcagcaatgaaaatgaaagcaacatcgccaacatcatcaaggaaaatgccggcaagatcatgagcctgctgagcaggacagtggccgactatgctgtggtgcccctgctgggctgtgaggtggaggccaccgtgggggaggtggtgaccaacacctggctggtgacctgcatcgactaccagaccctgtttgaccccaagagcaaccccctcttcacccctgtgcctgtgatgacaggcatgacccccctggaggactgtgtgatctccttcagccagtgtgccggggctgagaaggagagcctgaccttcctggccaacctgctgggcgcctctgtgcaggagtactttgtgaggaagagcaatgccaagaagggcatgtttgccagcacccacctgatcctgaaggagcggggcggcagcaaatatgaagctgccaagaagtggaacctgcctgctgtgaccatcgcctggctgctggagacagccaggacaggcaagagagcagatgagagccacttcctgattgagaacagcaccaaggaggagaggagcctggagacagagatcaccaacggcatcaacctgaacagcgacacagctgagcaccctggcacccggctgcagacccacaggaagacagtggtgacccccctggacatgaaccgcttccagagcaaggccttccgggctgtggtgtcccagcacgcccggcaggtggccgccagccctgctgtgggccagcccctgcagaaggagcccagcctgcacctggacacccccagcaagttcctgagcaaggacaagctgttcaagcccagctttgatgtgaaggatgccctggccgccctggagaccccaggccggcccagccagcagaagaggaagcccagcacccccctgtctgaggtgattgtgaagaacctgcagctggccctggccaacagcagcagaaatgctgtggccctgagcgccagcccccagctgaaggaggcccagagcgagaaggaggaggcccccaagcccctgcacaaggtggtggtgtgtgtgtccaagaagctgagcaagaagcagagcgagctgaatggaattgctgccagcctgggcgctgactaccgctggagctttgatgaaacagtgacccacttcatctaccagggccggcccaatgacaccaaccgggagtacaagtctgtgaaggagcggggcgtgcacatcgtgtctgagcactggctgctggactgtgcccaggagtgcaagcacctgcctgagagcctgtacccccacacctacaaccccaagatgagcctggacatctctgctgtgcaggacggccgcctgtgcaacagccggctgctgtctgctgtgagcagcaccaaggatgatgagccagaccccctcatcctggaggagaatgatgtggacaacatggccaccaacaacaaggagagcgcccccagcaatggcagcggcaagaatgacagcaagggcgtgctgacccagaccctggagatgagggagaacttccagaagcagctgcaggagatcatgtctgccaccagcatcgtgaagccccagggccagaggaccagcctgagccgcagcggctgcaacagcgccagcagcaccccagacagcaccaggtctgcccggagcggccgcagccgggtgctggaggccctgcggcagagccggcagacagtgcctgatgtgaacacagagcccagccagaatgagcagatcatctgggatgaccccacagcccgggaggagcgggcccggctggccagcaacctgcagtggcccagctgccccacccagtacagcgagctgcaggtggacatccagaacctggaggacagccccttccagaagcccctgcatgacagcgagatcgccaagcaggccgtgtgtgaccccggcaacatccgggtgacagaggcccccaagcaccccatcagcgaggagctggagacccccatcaaggacagccacctgatccccaccccccaggcccccagcatcgccttccccctggccaacccccctgtggccccccacccccgggagaagatcatcaccatcgaggagacccatgaggagctgaagaagcagtacatcttccagctgagcagcctgaacccccaggagagaattgactactgccacctgattgagaagctgggcggcctggtgattgagaagcagtgctttgaccccacctgcacccacatcgtggtgggccaccccctgagaaatgagaagtacctggcctctgtggccgccggcaagtgggtgctgcacaggagctacctggaggcctgcaggacagctggccactttgtgcaggaggaggactatgagtggggcagcagcagcatcctggatgtgctgaccggcatcaacgtgcagcagaggcggctggccctggccgccatgcgctggaggaagaagatccagcagaggcaggagagcggcatcgtggagggcgccttcagcggctggaaggtgatcctgcacgtggaccagagccgggaggccggcttcaagaggctgctgcagagcggcggggccaaggtgctgcccggccacagcgtgcccctcttcaaggaggccacccacctgttcagtgacctgaacaagctgaagccagatgattctggagtgaacattgctgaggccgccgcccagaatgtgtactgcctgaggacagagtacatcgctgactacctgatgcaggagagccccccccacgtggagaactactgcctgcctgaggccatctccttcatccagaacaacaaggagctgggcaccggcctgagccagaagaggaaggcccccacagagaagaacaagatcaagaggccccgggtgcactag

SEQ ID NO: 173440 - DNA, 3138 bp, synthetic construct
  misc_feature 1..3138: note = Description of Artificial Sequence: Synthetic coding sequence
  source 1..3138: mol_type = other DNA
atgggcagccagccccccctgggcagccccctgagccgggaggagggggaggcccctcctccagccccagccagcgagggcagaagaagaagccggcgggtgcggctgcggggcagctgccgccaccggcccagcttcctgggctgccgggagctggccgccagcgccccagcccggcctgccccagccagcagcgagatcatggccagcgctgccaaggagttcaagatggacaacttcagccccaaggccggcaccagcaagctgcagcagacagtgcctgcagatgccagcccagacagcaagtgccccatctgcctggacagatttgacaacgtgtcctacctggaccgctgcctgcacaagttctgcttccgctgtgtgcaggagtggagcaagaacaaggcagaatgtcccctgtgcaagcagccctttgacagcatcttccacagcgtgcgggcagaagatgacttcaaggagtatgtgctgcggcccagctacaacggcagctttgtgaccccagaccggcgcttccgctaccgcaccaccctgacccgggagagaaatgcctctgtgtacagccccagcggccctgtgaacagaaggaccaccaccccaccagattctggagtgctgtttgagggcctgggcatcagcacccggcccagagatgtggagatcccccagttcatgaggcagattgctgtgagaagacccaccacagcagatgagaggagcctgaggaagatccaggagcaggacatcatcaacttccggaggaccctgtacagagctggggcccgggtgaggaacattgaagatggcggccgctacagagacatctctgctgagttcttcagaagaaatcctgcctgcctgcaccggctggtgccctggctgaagcgggagctgactgtgctgtttggagcccacggcagcctggtgaacatcgtgcagcacatcatcatgagcaatgtgaccaggtatgacctggagagccaggcctttgtgtctgacctgcggcccttcctgctgaacagaacagagcacttcatccacgagttcatcagctttgcccggagccccttcaacatggccgcctttgaccagcacgccaactatgactgcccagcccccagctatgaggagggcagccacagcgacagcagcgtcatcaccatcagcccagatgaagctgagacccaggagctggacatcaacgtggccaccgtgtcccaggccccctgggatgatgagaccccaggccccagctacagcagcagcgagcaggtgcacgtgaccatgagcagcctgctgaacaccagtgacagcagtgatgaggagctggtgactggaggagccaccagccagatccagggcgtgcagaccaatgatgacctgaacaatgacagtgatgacagcagtgacaactgtgtgattgtgggctttgtgaagcccctggccgagaggaccccagagctggtggagctgagcagtgacagcgaggacctgggcagctatgagaagatggagaccgtgaagacccaggagcaggagcagagctacagcagcggggacagtgatgtgagccgctgcagcagcccccacagcgtgctgggcaaggatgagcagatcaacaagggccactgtgacagcagcacccgcatcaagagcaagaaggaggagaagaggagcaccagcctgagcagccccaggaacctgaacagctctgtgcggggggacagagtgtacagcccctacaaccaccgccacaggaagaggggccgcagccgcagcagtgacagccgcagccagagccgcagcggccatgaccagaagaaccacaggaagcaccacggcaagaagaggatgaagagcaagaggagccgcagccgggagagcagccggccccggggccggcgggacaagaagaggagcaggacccgggacagctcctggagcagaagaagccagaccctgagcctgagcagcgagagcaccagccgcagccgcagccgcagcagtgaccacggcaagaggaggagccgcagcaggaacagagaccgctactacctgaggaacaactacggcagccgctacaagtgggagtacacctactacagcaggaacaaggacagagatggctatgagagcagctacagaagaaggaccctgagccgggcccactacagccggcagagcagcagccctgagttccgggtgcagagcttcagcgagaggaccaatgccaggaagaagaacaaccacagcgagaggaagtactactactatgaaagacacaggagccgcagcctgagcagcaacagaagcaggacagccagcactggaacagacagagtgagaaatgagaagccaggcggcaagaggaagtacaagaccaggcacctggagggcaccaatgaggtggcccagcccagccgggagtttgccagcaaggccaaggacagccactaccagaagagcagcagcaagctggatggcaactacaagaatgaaagtgacaccttcagtgacagccgcagcagtgaccgggagaccaagcacaagaggaggaagaggaagaccaggagcctgtctgtggagatcgtgtatgagggcaaggccacagacaccaccaagcaccacaagaagaagaagaagaagcacaagaagaagcacaagaagcaccacggggacaatgccagccgcagccctgtggtgatcaccatcgacagcgacagcgacaaggacagcgaggtgaaggaggacacagaatgtgacaacagcggcccccaggaccccctgcagaatgagttcctggcccccagcctggagccctttgagaccaaggatgtggtgaccattgaagctgagtttggagtgctggacaaggaatgtgacatcgccaccctgagcaacaacctgaacaatgccaacaagacagtggacaacatcccccccctggccgcctctgtggagcagaccctggatgtgcgggaggagagcacctttgtgtctgacctggagaaccagcccagcaacatcgtgtccctgcagacagagcccagccggcagctgcccagccccaggaccagcctgatgtctgtgtgcctgggccgggactgtgacatgtcctag

SEQ ID NO: 173441 - DNA, 2943 bp, synthetic construct
  misc_feature 1..2943: note = Description of Artificial Sequence: Synthetic coding sequence
  source 1..2943: mol_type = other DNA
atgatcatggccagcgctgccaaggagttcaagatggacaacttcagccccaaggccggcaccagcaagctgcagcagacagtgcctgcagatgccagcccagacagcaaatgtcccatctgcctggacagatttgacaacgtgtcctacctggaccgctgcctgcacaagttctgcttccgctgtgtgcaggagtggagcaagaacaaggccgagtgccccctgtgcaagcagccctttgacagcatcttccacagcgtgcgggcagaagatgacttcaaggagtatgtgctgcggcccagctacaacggcagctttgtgaccccagaccggcgcttccgctaccgcaccaccctgacccgggagagaaatgcctctgtgtacagccccagcggccctgtgaacagaaggaccaccaccccaccagacagcggcgtgctgtttgagggcctgggcatcagcacccggcccagagatgtggagatcccccagttcatgaggcagattgctgtgcggcggcccaccacagcagatgagaggagcctgaggaagatccaggagcaggacatcatcaacttccggaggaccctgtaccgggccggggcccgggtgagaaatattgaagatggcggccgctacagagacatctctgctgagttcttcagaagaaatcctgcctgcctgcaccggctggtgccctggctgaagcgggagctgactgtgctgtttggagcccacggcagcctggtgaacatcgtgcagcacatcatcatgagcaatgtgaccaggtatgacctggagagccaggcctttgtgtctgacctgcggcccttcctgctgaacagaacagagcacttcatccacgagttcatcagctttgcccggagccccttcaacatggccgcctttgaccagcacgccaactatgactgcccagcccccagctatgaggagggcagccacagcgacagcagcgtcatcaccatcagcccagatgaggccgagacccaggagctggacatcaacgtggccaccgtgtcccaggccccctgggatgatgagaccccaggccccagctacagcagcagcgagcaggtgcacgtgaccatgagcagcctgctgaacaccagtgacagcagtgatgaggagctggtgactggaggagccaccagccagatccagggcgtgcagaccaatgatgacctgaacaatgacagtgatgacagcagtgacaactgtgtgattgtgggctttgtgaagcccctggccgagaggaccccagagctggtggagctgagcagtgacagcgaggacctgggcagctatgagaagatggagaccgtgaagacccaggagcaggagcagagctacagcagcggggacagtgatgtgagccgctgcagcagcccccacagcgtgctgggcaaggatgagcagatcaacaagggccactgtgacagcagcacccgcatcaagagcaagaaggaggagaagaggagcaccagcctgagcagccccaggaacctgaacagctctgtgcggggggacagagtgtacagcccctacaaccaccgccacaggaagaggggccgcagccgcagcagtgacagccgcagccagagccgcagcggccatgaccagaagaaccacaggaagcaccacggcaagaagaggatgaagagcaagaggagccgcagccgggagagcagccggccccggggcagaagagacaagaagaggagcaggacccgggacagctcctggagccgccgcagccagaccctgagcctgagcagcgagagcaccagccgcagccgcagccgcagcagtgaccacggcaagagaagaagccgcagcaggaacagagaccgctactacctgaggaacaactacggcagccgctacaagtgggagtacacctactacagcaggaacaaggacagagatggctatgagagcagctacagaagaaggaccctgagccgggcccactacagccggcagagcagcagccctgagttccgggtgcagagcttcagcgagaggaccaatgccaggaagaagaacaaccacagcgagaggaagtactactactatgagcggcacaggagccgcagcctgagcagcaacagaagcaggacagccagcactggaacagacagagtgagaaatgagaagccaggcggcaagaggaagtacaagaccaggcacctggagggcaccaatgaggtggcccagcccagccgggagtttgccagcaaggccaaggacagccactaccagaagagcagcagcaagctggatggcaactacaagaatgaaagtgacaccttcagtgacagccgcagcagtgaccgggagaccaagcacaagaggaggaagaggaagaccaggagcctgtctgtggagatcgtgtatgagggcaaggccacagacaccaccaagcaccacaagaagaagaagaagaagcacaagaagaagcacaagaagcaccacggggacaatgccagccgcagccctgtggtgatcaccatcgacagcgacagcgacaaggacagcgaggtgaaggaggacacagaatgtgacaacagcggcccccaggaccccctgcagaatgagttcctggcccccagcctggagccctttgagaccaaggatgtggtgaccatcgaggccgagtttggagtgctggacaaggaatgtgacatcgccaccctgagcaacaacctgaacaatgccaacaagacagtggacaacatcccccccctggccgcctctgtggagcagaccctggatgtgcgggaggagagcacctttgtgtctgacctggagaaccagcccagcaacatcgtgtccctgcagacagagcccagccggcagctgcccagccccaggaccagcctgatgtctgtgtgcctgggccgggactgtgacatgtcctag

SEQ ID NO: 173442 - DNA, 999 bp, synthetic construct
  misc_feature 1..999: note = Description of Artificial Sequence: Synthetic coding sequence
  source 1..999: mol_type = other DNA
atgaagctgggccgggctgtgctgggcctgctgctgctggcccccagcgtggtgcaggccgtggagcccatcagcctgggcctggccctggccggcgtgctgaccggctacatctacccccggctgtactgcctgtttgctgagtgctgcggccagaagaggagcctgagccgggaggccctgcagaaggacctggatgacaacctgtttggccagcacctggccaagaagatcatcctgaatgctgtgtttggcttcatcaacaaccccaagcccaagaagcccctgaccctgagcctgcacggctggacaggcaccgggaagaactttgtgtccaagatcatcgccgagaacatctatgagggcggcctgaacagcgactatgtgcacctgtttgtggccaccctgcacttcccccacgccagcaacatcaccctgtacaaggaccagctgcagctgtggatcagaggaaatgtgtctgcctgtgcccggagcatcttcatctttgatgagatggacaagatgcatgctggcctgattgatgccatcaagcccttcctggactactatgacctggtggatggagtgtcctaccagaaggccatgttcatcttcctgagcaatgctggagctgagcgcatcacagatgtggccctggacttctggaggtctgggaagcagcgggaggacatcaagctgaaggacatcgagcacgccctgtctgtgtctgtgttcaacaacaagaacagcggcttctggcacagcagcctgattgacaggaacctgattgactactttgtgcccttcctgcccctggagtacaagcacctgaagatgtgcatccgggtggagatgcagagccggggctatgaaattgatgaggacatcgtgtcccgggtggccgaggagatgaccttcttccccaaggaggagagggtcttcagtgacaagggctgcaagacagtgttcaccaagctggactactactatgatgactag

SEQ ID NO: 173443 - DNA, 906 bp, synthetic construct
  misc_feature 1..906: note = Description of Artificial Sequence: Synthetic coding sequence
  source 1..906: mol_type = other DNA
atgaagctgggccgggctgtgctgggcctgctgctgctggcccccagcgtggtgcaggccgtggagcccatcagcctgggcctggccctggccggcgtgctgaccggctacatctacccccggctgtactgcctgtttgctgagtgctgcggccagaagaggagcctgagccgggaggccctgcagaaggacctggatgacaacctgtttggccagcacctggccaagaagatcatcctgaatgctgtgtttggcttcatcaacaaccccaagcccaagaagcccctgaccctgagcctgtttgtggccaccctgcacttcccccacgccagcaacatcaccctgtacaaggaccagctgcagctgtggatcagaggaaatgtgtctgcctgtgcccggagcatcttcatctttgatgagatggacaagatgcacgccggcctgattgatgccatcaagcccttcctggactactatgacctggtggatggagtgtcctaccagaaggccatgttcatcttcctgagcaatgctggagctgagcgcatcacagatgtggccctggacttctggaggtctgggaagcagcgggaggacatcaagctgaaggacattgaacatgccctgtctgtgtctgtgttcaacaacaagaacagcggcttctggcacagcagcctgattgacaggaacctgattgactactttgtgcccttcctgcccctggagtacaagcacctgaagatgtgcatccgggtggagatgcagagccggggctatgaaattgatgaagatattgtgtcccgggtggccgaggagatgaccttcttccccaaggaggagagggtcttcagtgacaagggctgcaagacagtgttcaccaagctggactactactatgatgactag

SEQ ID NO: 173444 - DNA, 1011 bp, synthetic construct
  misc_feature 1..1011: note = Description of Artificial Sequence: Synthetic coding sequence
  source 1..1011: mol_type = other DNA
atgctgcgggccggctggctgcggggagctgctgccctggccctgctgctggccgcccgggtggtggccgcctttgagcccatcaccgtgggcctggccatcggggccgccagcgccatcaccggctacctgagctacaatgacatctactgccgctttgctgagtgctgccgggaggagcggcccctgaatgccagcgccctgaagctggacctggaggagaagctgtttggccagcacctggccacagaggtgatcttcaaggccctgaccggcttcaggaacaacaagaaccccaagaagcccctgaccctgagcctgcacggctgggccggcaccgggaagaactttgtgtcccagatcgtggccgagaacctgcaccccaagggcctgaagagcaactttgtgcacctgtttgtgtccaccctgcacttcccccatgagcagaagatcaagctgtaccaggaccagctgcagaagtggatcagaggaaatgtgtctgcctgtgccaacagcgtcttcatctttgatgagatggacaagctgcaccctggcatcattgatgccatcaagcccttcctggactactatgagcaggtggatggagtgtcctacaggaaggccatcttcatcttcctgagcaatgctggaggagacctgatcaccaagacagccctggacttctggagggctggcaggaagcgggaggacatccagctgaaggacctggagcctgtgctgtctgtgggcgtcttcaacaacaagcacagcggcctgtggcacagcggcctgattgacaagaacctgattgactacttcatccccttcctgcccctggagtacagacatgtgaagatgtgtgtgcgggcagagatgagggcccggggcagcgccattgatgaagatattgtgaccagggtggccgaggagatgaccttcttccccagagatgagaagatctacagcgacaagggctgcaagacagtgcagagccggctggacttccactag

SEQ ID NO: 173445 - DNA, 426 bp, synthetic construct
  misc_feature 1..426: note = Description of Artificial Sequence: Synthetic coding sequence
  source 1..426: mol_type = other DNA
tgaagagtggtggccgcctttgagcccatcaccgtgggcctggccatcggggccgccagcgccatcaccggctacctgagctacaatgacatctactgccgctttgctgagtgctgccgggaggagcggcccctgaatgccagcgccctgaagctggacctggaggagaagctgtttggccagcacctggccacagaggtgatcttcaaggccctgaccggcttcaggaacaacaagaaccccaagaagcccctgaccctgagcctgcacggctgggccggcaccgggaagaactttgtgtcccagatcgtggccgagaacctgcaccccaagggcctgaagagcaactttgtgcacctgtttgtgtccaccctgcacttcccccatgagcagaagatcaagctgtaccagagcagcctgacctag

SEQ ID NO: 173446 - DNA, 918 bp, synthetic construct
  misc_feature 1..918: note = Description of Artificial Sequence: Synthetic coding sequence
  source 1..918: mol_type = other DNA
atgctgcgggccggctggctgcggggagctgctgccctggccctgctgctggccgcccgggtggtggccgcctttgagcccatcaccgtgggcctggccatcggggccgccagcgccatcaccggctacctgagctacaatgacatctactgccgctttgctgagtgctgccgggaggagcggcccctgaatgccagcgccctgaagctggacctggaggagaagctgtttggccagcacctggccacagaggtgatcttcaaggccctgaccggcttcaggaacaacaagaaccccaagaagcccctgaccctgagcctgtttgtgtccaccctgcacttcccccatgagcagaagatcaagctgtaccaggaccagctgcagaagtggatcagaggaaatgtgtctgcctgtgccaacagcgtcttcatctttgatgagatggacaagctgcaccctggcatcattgatgccatcaagcccttcctggactactatgagcaggtggatggagtgtcctacaggaaggccatcttcatcttcctgagcaatgccggcggggacctgatcaccaagacagccctggacttctggagggctggcaggaagcgggaggacatccagctgaaggacctggagcctgtgctgtctgtgggcgtcttcaacaacaagcacagcggcctgtggcacagcggcctgattgacaagaacctgattgactacttcatccccttcctgcccctggagtaccgccacgtgaagatgtgtgtgcgggcagagatgagggcccggggcagcgccattgatgaggacatcgtgaccagggtggccgaggagatgaccttcttccccagagatgagaagatctacagcgacaagggctgcaagacagtgcagagccggctggacttccactag

SEQ ID NO: 173447 - DNA, 1011 bp, synthetic construct
  misc_feature 1..1011: note = Description of Artificial Sequence: Synthetic coding sequence
  source 1..1011: mol_type = other DNA
atgctgcggggcccctggaggcagctgtggctgttcttcctgctgctgctgcccggggcccctgagcccaggggggccagccggccctgggagggcacagatgagcccggcagcgcctgggcctggccaggcttccagaggctgcaggagcagctgcgggctgctggggccctgagcaagcgctactggaccctcttcagctgccaggtgtggccagatgactgtgatgaagatgaggaggccgccaccggccccctgggctggaggctgcccctgctgggccagcgctacctggacctgctgaccacctggtactgcagcttcaaggactgctgccccaggggggactgccgcatcagcaacaacttcaccggcctggagtgggacctgaatgtgcggctgcacggccagcacctggtgcagcagctggtgctgaggacagtgcggggctacctggagaccccccagcctgagaaggccctggccctgtccttccacggctggagcggcaccgggaagaactttgtggccaggatgctggtggagaacctgtacagagatggcctgatgtctgactgtgtgaggatgttcatcgccaccttccacttcccccaccccaagtatgtggacctgtacaaggagcagctgatgagccagatccgggagacccagcagctgtgccaccagaccctcttcatctttgatgaagctgagaagctgcaccctggcctgctggaggtgctgggcccccacctggagcggcgggcccctgagggccacagagctgagagcccctggaccatcttcctgttcctgagcaacctgcggggggacatcatcaatgaggtggtgctgaagctgctgaaggccggctggagccgggaggagatcaccatggagcacctggagccccacctgcaggccgagatcgtggagaccatcggcttctccttcctgaccacccgctggccccacctggacctgcccaccagctctgtggcccccacctag

SEQ ID NO: 173448 - DNA, 462 bp, synthetic construct
  misc_feature 1..462: note = Description of Artificial Sequence: Synthetic coding sequence
  source 1..462: mol_type = other DNA
atgctgcggggcccctggaggcagctgtggctgttcttcctgctgctgctgcccggggcccctgagcccaggggggccagccggccctgggagggcacagatgagcccggcagcgcctgggcctggccaggcttccagaggctgcaggagcagctgcgggctgctggggccctgagcaagcgctactggaccctcttcagctgccaggtgtggccagatgactgtgatgaagatgaggaggccgccaccggccccctgggctggaggctgcccctgctgggccagcgctacctggacctgctgaccacctggtactgcagcttcaaggactgctgccccaggggggactgccgcatcagcaacaacttcaccgggaagaactttgtggccaggatgctggtggagaacctgtacagagatggcctgatgtctgactgtgtgaggatgtttattgccacctag

SEQ ID NO: 173449 - DNA, 1194 bp, synthetic construct
  misc_feature 1..1194: note = Description of Artificial Sequence: Synthetic coding sequence
  source 1..1194: mol_type = other DNA
atgctgcggggcccctggaggcagctgtggctgttcttcctgctgctgctgcccggggcccctgagcccaggggggccagccggccctgggagggcacagatgagcccggcagcgcctgggcctggccaggcttccagaggctgcaggagcagctgcgggctgctggggccctgagcaagcgctactggaccctcttcagctgccaggtgtggccagatgactgtgatgaagatgaggaggccgccaccggccccctgggctggaggctgcccctgctgggccagcgctacctggacctgctgaccacctggtactgcagcttcaaggactgctgccccaggggggactgccgcatcagcaacaacttcaccggcctggagtgggacctgaatgtgcggctgcacggccagcacctggtgcagcagctggtgctgaggacagtgcggggctacctggagaccccccagcctgagaaggccctggccctgtccttccacggctggagcggcaccgggaagaactttgtggccaggatgctggtggagaacctgtacagagatggcctgatgtctgactgtgtgaggatgttcatcgccaccttccacttcccccaccccaagtatgtggacctgtacaaggagcagctgatgagccagatccgggagacccagcagctgtgccaccagaccctcttcatctttgatgaagctgagaagctgcaccctggcctgctggaggtgctgggcccccacctggagcggcgggcccctgagggccacagagctgagagcccctggaccatcttcctgttcctgagcaacctgcggggggacatcatcaatgaggtggtgctgaagctgctgaaggccggctggagccgggaggagatcaccatggagcacctggagccccacctgcaggccgagatcgtggagaccatcgacaatggcttcggccacagccggctggtgaaggagaacctgattgactacttcatccccttcctgcccctggagtaccgccacgtgcggctgtgtgccagagatgccttcctgagccaggagctgctgtacaaggaggagaccctggatgagatcgcccagatgatggtgtatgtgcccaaggaggagcagctgttcagcagccagggctgcaagagcatcagccagaggatcaactacttcctgtcctag

SEQ ID NO: 173450 - DNA, 525 bp, synthetic construct
  misc_feature 1..525: note = Description of Artificial Sequence: Synthetic coding sequence
  source 1..525: mol_type = other DNA
atgggcctgtgtgtgccctttgctgtgaccaccagcttcctgagcctgggcctggagtgggacctgaatgtgcggctgcacggccagcacctggtgcagcagctggtgctgaggacagtgcggggctacctggagaccccccagcctgagaaggccctggccctgtccttccacggctggagcggcaccgggaagaactttgtggccaggatgctggtggagaacctgtacagagatggcctgatgtctgactgtgtgaggatgttcatcgccaccttccacttcccccaccccaagtatgtggacctgtacaaggagcagctgatgagccagatccgggagacccagcagctgtgccaccagaccctcttcatctttgatgaagctgagaagctgcaccctggcctgctggaggtgctgggcccccacctggagcggcgggcccctgagggccacagagctgagagcccctggaccatcttcctgttcctgagcaacctgcggggggacatcatcaatgaatag

SEQ ID NO: 173451 - DNA, 1866 bp, synthetic construct
  misc_feature 1..1866: note = Description of Artificial Sequence: Synthetic coding sequence
  source 1..1866: mol_type = other DNA
atggagttccctggaggaaatgacaactacctgaccatcaccggccccagccaccccttcctgagcggggctgagaccttccacacccccagcctgggagatgaggagtttgagatcccccccatcagcctggacagcgaccccagcctggccgtgtctgatgtggtgggccactttgatgacctggccgaccccagcagcagccaggacggcagcttcagcgcccagtatggagtgcagaccctggacatgcctgtgggcatgacccacggcctgatggagcagggcggcggcctgctgagcggcggcctgaccatggacctggaccacagcatcggcacccagtacagcgccaacccccctgtgaccattgatgtgcccatgacagacatgaccagcggcctgatgggccacagccagctgaccaccatcgaccagagcgagctgagcagccagctgggcctgagcctgggcggcggcaccatcctgcccccagcccagagccctgaggaccggctgagcaccacccccagccccaccagcagcctgcatgaagatggagtggaggacttccggcggcagctgcccagccagaagacagtggtggtggaggccggcaagaagcagaaggcccccaagaagaggaagaagaaggaccccaatgagccccagaagcctgtgtctgcctatgccctcttcttccgggacacccaggccgccatcaagggccagaaccccaatgccaccttcggggaggtgtccaagatcgtggcctccatgtgggacagcctgggggaggagcagaagcaggtgtacaagaggaagacagaggccgccaagaaggagtacctgaaggccctggccgcctacaaggacaaccaggagtgccaggccaccgtggagaccgtggagctggaccctgccccacccagccagacccccagccccccacccatggccaccgtggaccctgccagccctgccccagccagcattgagcccccagccctgagccccagcatcgtggtgaacagcaccctgagcagctatgtggccaaccaggccagcagtggagctgggggccagcccaacatcaccaagctgatcatcaccaagcagatgctgcccagcagcatcaccatgagccagggcggcatggtgaccgtcatcccagccaccgtggtgaccagccggggcctgcagctgggccagaccagcacagccaccatccagcccagccagcaggcccagatcgtgaccaggtctgtgctgcaggccgctgctgctgctgctgctgctgcctccatgcagctgcccccaccccggctgcagcccccacccctgcagcagatgccccagccccccacccagcagcaggtgaccatcctgcagcagcccccacccctgcaggccatgcagcagcccccaccccagaaggtgcgcatcaacctgcagcagcagcccccacccctgcagatcaagtctgtgcccctgcccaccctgaagatgcagaccaccctggtgcccccaacagtggagagcagccctgagcggcccatgaacaacagccctgaggcccacacagtggaggcccccagccctgagaccatctgtgagatgatcacagatgtggtgcctgaggtggagagccccagccagatggatgtggagctggtgtctggcagccctgtggccctgagcccccagccccgctgtgtgcgcagcggctgtgagaacccccccatcgtgtccaaggactgggacaatgagtactgcagcaatgaatgtgtggtgaagcactgcagagatgtgttcctggcctgggtggccagcaggaacagcaacacagtggtgtttgtgaagtag

SEQ ID NO: 173452 - DNA, 1866 bp, synthetic construct; identical to SEQ ID NO: 173451
  misc_feature 1..1866: note = Description of Artificial Sequence: Synthetic coding sequence
  source 1..1866: mol_type = other DNA

SEQ ID NO: 173453 - DNA, 1797 bp, synthetic construct
  misc_feature 1..1797: note = Description of Artificial Sequence: Synthetic coding sequence
  source 1..1797: mol_type = other DNA
atggagaccttccacacccccagcctgggagatgaggagtttgagatcccccccatcagcctggacagcgaccccagcctggccgtgtctgatgtggtgggccactttgatgacctggccgaccccagcagcagccaggacggcagcttcagcgcccagtatggagtgcagaccctggacatgcctgtgggcatgacccacggcctgatggagcagggcggcggcctgctgagcggcggcctgaccatggacctggaccacagcatcggcacccagtacagcgccaacccccctgtgaccattgatgtgcccatgacagacatgaccagcggcctgatgggccacagccagctgaccaccatcgaccagagcgagctgagcagccagctgggcctgagcctgggcggcggcaccatcctgcccccagcccagagcccagaagatcggctgagcaccacccccagccccaccagcagcctgcatgaagatggagtggaggacttccggcggcagctgcccagccagaagacagtggtggtggaggccggcaagaagcagaaggcccccaagaagaggaagaagaaggaccccaatgagccccagaagcctgtgtctgcctatgccctcttcttccgggacacccaggccgccatcaagggccagaaccccaatgccacctttggagaggtgtccaagatcgtggcctccatgtgggacagcctgggggaggagcagaagcaggtgtacaagaggaagacagaagctgccaagaaggagtacctgaaggccctggccgcctacaaggacaaccaggagtgccaggccaccgtggagaccgtggagctggaccctgccccacccagccagacccccagccccccacccatggccaccgtggaccctgccagccctgccccagccagcattgagcccccagccctgagccccagcatcgtggtgaacagcaccctgagcagctatgtggccaaccaggccagcagcggggccggcggccagcccaacatcaccaagctgatcatcaccaagcagatgctgcccagcagcatcaccatgagccagggcggcatggtgaccgtcatcccagccaccgtggtgaccagccggggcctgcagctgggccagaccagcacagccaccatccagcccagccagcaggcccagatcgtgaccaggtctgtgctgcaggccgctgctgctgctgctgctgctgcctccatgcagctgcccccaccccggctgcagcccccacccctgcagcagatgccccagccccccacccagcagcaggtgaccatcctgcagcagcccccacccctgcaggccatgcagcagcccccaccccagaaggtgcgcatcaacctgcagcagcagcccccacccctgcagatcaagtctgtgcccctgcccaccctgaagatgcagaccaccctggtgccccccaccgtggagagcagccctgagcggcccatgaacaacagccctgaggcccacacagtggaggcccccagccctgagaccatctgtgagatgatcacagatgtggtgcctgaggtggagagccccagccagatggatgtggagctggtgtctggcagccctgtggccctgagcccccagccccgctgtgtgcgcagcggctgtgaaaatccacccatcgtgtccaaggactgggacaatgagtactgcagcaatgaatgtgtggtgaagcactgcagagatgtgttcctggcctgggtggccagcaggaacagcaacacagtggtgtttgtgaagtag

SEQ ID NO: 173454 - DNA, 1650 bp, synthetic construct
  misc_feature 1..1650: note = Description of Artificial Sequence: Synthetic coding sequence
  source 1..1650: mol_type = other DNA
atgaggaacctgaagagccacctgagcccctggatcctgatcccccactggctgagccagatgtggctggccaccctgatgacctggcagttcttctccccagacctggaccacagcatcggcacccagtacagcgccaacccccctgtgaccattgatgtgcccatgacagacatgaccagcggcctgatgggccacagccagctgaccaccatcgaccagagcgagctgagcagccagctgggcctgagcctgggcggcggcaccatcctgcccccagcccagagccctgaggaccggctgagcaccacccccagccccaccagcagcctgcatgaagatggagtggaggacttccggcggcagctgcccagccagaagacagtggtggtggaggccggcaagaagcagaaggcccccaagaagaggaagaagaaggaccccaatgagccccagaagcctgtgtctgcctatgccctcttcttccgggacacccaggccgccatcaagggccagaaccccaatgccaccttcggggaggtgtccaagatcgtggcctccatgtgggacagcctgggggaggagcagaagcaggtgtacaagaggaagacagaggccgccaagaaggagtacctgaaggccctggccgcctacaaggacaaccaggagtgccaggccaccgtggagaccgtggagctggaccctgccccacccagccagacccccagccccccacccatggccaccgtggaccctgccagccctgccccagccagcattgagcccccagccctgagccccagcatcgtggtgaacagcaccctgagcagctatgtggccaaccaggccagcagtggagctgggggccagcccaacatcaccaagctgatcatcaccaagcagatgctgcccagcagcatcaccatgagccagggcggcatggtgaccgtcatcccagccaccgtggtgaccagccggggcctgcagctgggccagaccagcacagccaccatccagcccagccagcaggcccagatcgtgaccaggtctgtgctgcaggccgctgctgctgctgctgctgctgcctccatgcagctgcccccaccccggctgcagcccccacccctgcagcagatgccccagccccccacccagcagcaggtgaccatcctgcagcagcccccacccctgcaggccatgcagcagcccccaccccagaaggtgcgcatcaacctgcagcagcagcccccacccctgcagatcaagtctgtgcccctgcccaccctgaagatgcagaccaccctggtgcccccaacagtggagagcagccctgagcggcccatgaacaacagccctgaggcccacacagtggaggcccccagccctgagaccatctgtgagatgatcacagatgtggtgcctgaggtggagagccccagccagatggatgtggagctggtgtctggcagccctgtggccctgagcccccagccccgctgtgtgcgcagcggctgtgagaacccccccatcgtgtccaaggactgggacaatgagtactgcagcaatgaatgtgtggtgaagcactgcagagatgtgttcctggcctgggtggccagcaggaacagcaacacagtggtgtttgtgaagtag

SEQ ID NO: 173455 - DNA, 1020 bp, synthetic construct
  misc_feature 1..1020: note = Description of Artificial Sequence: Synthetic coding sequence
  source 1..1020: mol_type = other DNA
atgatgcccttctgccacaacatcatcaacatcagctgtgtgaagaacaactggagcaatgatgtgcgggccagcctgtacagcctgatggtgctgatcatcctgaccaccctggtgggcaacctgattgtgattgtgtccatcagccacttcaagcagctgcacacccccaccaactggctgatccacagcatggccaccgtggacttcctgctgggctgcctggtgatgccctacagcatggtgcgctctgctgagcactgctggtactttggagaggtgttctgcaagatccacaccagcacagacatcatgctgagcagcgccagcatcttccacctgtccttcatcagcattgaccgctactatgctgtgtgtgaccccctgcgctacaaggccaagatgaacatcctggtgatctgtgtgatgatcttcatctcctggagcgtgcctgctgtgtttgccttcggcatgatcttcctggagctgaacttcaagggagctgaggagatctactacaagcacgtgcactgccggggcggctgcagcgtcttcttcagcaagatcagcggcgtgctgaccttcatgaccagcttctacatccctggcagcatcatgctgtgtgtgtactaccgcatctacctgattgccaaggagcaggcccggctcatcagtgatgccaaccagaagctgcagatcggcctggagatgaagaatggcatcagccagagcaaggagaggaaggctgtgaagaccctgggcatcgtgatgggcgtcttcctgatctgctggtgccccttcttcatctgcaccgtgatggaccccttcctgcactacatcatcccccccaccctgaatgatgtgctgatctggtttggctacctgaacagcaccttcaaccccatggtgtatgccttcttctacccctggttcaggaaggccctgaagatgatgctgtttgggaagatcttccagaaggacagcagccgctgcaagctgttcctggagctgagcagctag

SEQ ID NO: 173456 - DNA, 921 bp, synthetic construct
  misc_feature 1..921: note = Description of Artificial Sequence: Synthetic coding sequence
  source 1..921: mol_type = other DNA
atgtacagcttcatggccggcagcatcttcatcaccatcttcggcaacctggccatgatcatcagcatctcctacttcaagcagctgcacacccccaccaacttcctgatcctgtccatggccatcacagacttcctgctgggcttcaccatcatgccctacagcatgatccgctctgtggagaactgctggtacttcggcctgaccttctgcaagatctactacagctttgacctgatgctgagcatcaccagcatcttccacctgtgcagcgtggccatcgaccgcttctacgccatctgctaccccctgctgtacagcaccaagatcaccatccctgtgatcaagaggctgctgctgctgtgctggagcgtgcctggggcctttgcctttggagtggtgttcagcgaggcctatgcagatggcatcgagggctatgacatcctggtggcctgcagcagcagctgccctgtgatgttcaacaagctgtggggcaccaccctcttcatggccggcttcttcaccccaggctccatgatggtgggcatctacggcaagatctttgctgtgtccaggaagcacgcccacgccatcaacaacctgcgggagaaccagaacaaccaggtgaagaaggacaagaaggccgccaagaccctgggcatcgtgattggagtcttcctgctgtgctggttcccctgcttcttcaccatcctgctggaccccttcctgaacttcagcacccctgtggtgctgtttgatgccctgacctggtttggctacttcaacagcacctgcaaccccctcatctacggcttcttctacccctggttccggcgggccctgaagtacatcctgctgggcaagatcttcagcagctgcttccacaacaccatcctgtgcatgcagaaggagagcgagtag

SEQ ID NO: 173457 - DNA, 1056 bp, synthetic construct
  misc_feature 1..1056: note = Description of Artificial Sequence: Synthetic coding sequence
  source 1..1056: mol_type = other DNA
atggctgtgtcctctgagcagcacgagctgagccacttcaagaggacccagaccaagaaggagaagttcaactgcagtgaatatggcaacagaagctgcccagaaaatgaaagaagcctgggcgtgcgggtggccatgtacagcttcatggccggcagcatcttcatcaccatctttggaaacctggccatgatcatcagcatctcctacttcaagcagctgcacacccccaccaacttcctgatcctgtccatggccatcacagacttcctgctgggcttcaccatcatgccctacagcatgatccgctctgtggagaactgctggtacttcggcctgaccttctgcaagatctactacagctttgacctgatgctgagcatcaccagcatcttccacctgtgcagcgtggccatcgaccgcttctacgccatctgctaccccctgctgtacagcaccaagatcaccatccctgtgatcaagaggctgctgctgctgtgctggagcgtgcctggggcctttgccttcggcgtggtgttttctgaggcctatgcagatggcatcgagggctatgacatcctggtggcctgcagcagcagctgccctgtgatgttcaacaagctgtggggcaccaccctcttcatggccggcttcttcaccccaggctccatgatggtgggcatctacggcaagatctttgctgtgtccaggaagcacgcccacgccatcaacaacctgcgggagaaccagaacaaccaggtgaagaaggacaagaaggccgccaagaccctgggcatcgtcatcggggtcttcctgctgtgctggttcccctgcttcttcaccatcctgctggaccccttcctgaacttcagcacccctgtggtgctgtttgatgccctgacctggtttggctacttcaacagcacctgcaaccccctcatctacggcttcttctacccctggttcagaagagccctgaagtacatcctgctgggcaagatcttcagcagctgcttccacaacaccatcctgtgcatgcagaaggagagcgagtag

SEQ ID NO: 173458 - DNA, 921 bp, synthetic construct; identical to SEQ ID NO: 173456
  misc_feature 1..921: note = Description of Artificial Sequence: Synthetic coding sequence
  source 1..921: mol_type = other DNA

SEQ ID NO: 173459 - DNA, 1038 bp, synthetic construct
  misc_feature 1..1038: note = Description of Artificial Sequence: Synthetic coding sequence
  source 1..1038: mol_type = other DNA
atgagcagcaacagcagcctgctggtggccgtgcagctgtgctacgccaacgtgaatggcagctgtgtgaagatccccttcagccctggcagcagggtcatcctgtacatcgtgtttggatttggagctgtgctggccgtgtttggaaacctgctggtgatgatcagcatcctgcacttcaagcagctgcacagccccaccaacttcctggtggccagcctggcctgtgccgacttcctggtgggcgtgacagtgatgcccttctccatggtgaggacagtggagagctgctggtacttcggccgctccttctgcaccttccacacctgctgtgatgtggccttctgctacagcagcctcttccacctgtgcttcatcagcattgaccgctacatcgctgtgacagaccccctggtgtaccccaccaagttcaccgtgtctgtgtctggcatctgcatctctgtgtcctggatcctgcccctgatgtacagcggggctgtgttctacacaggagtgtatgatgatggcctggaggagctgagtgatgccctgaactgcattggaggctgccagacagtggtgaaccagaactgggtgctgacagacttcctgtccttcttcatccccaccttcatcatgatcatcctgtatggcaacatcttcctggtggcccggcggcaggccaagaagattgagaacacaggcagcaagacagagagcagcagcgagagctacaaggcccgggtggcccggcgggagaggaaggccgccaagaccctgggcgtgacagtggtggccttcatgatctcctggctgccctacagcattgacagcctgattgatgccttcatgggcttcatcaccccagcctgcatctatgagatctgctgctggtgtgcctactacaacagcgccatgaaccccctcatctatgccctcttctacccctggttcaggaaggccatcaaggtgattgtgacaggccaggtgctgaagaacagcagcgccaccatgaacctcttcagcgagcacatctag

SEQ ID NO: 173460 - DNA, 957 bp, synthetic construct
  misc_feature 1..957: note = Description of Artificial Sequence: Synthetic coding sequence
  source 1..957: mol_type = other DNA
gtgaatggcagctgtgtgaagatccccttcagccctggcagcagggtcatcctgtacatcgtgtttggatttggagctgtgctggccgtgtttggaaacctgctggtgatgatcagcatcctgcacttcaagcagctgcacagccccaccaacttcctggtggccagcctggcctgtgccgacttcctggtgggcgtgacagtgatgcccttctccatggtgaggacagtggagagctgctggtacttcggccgctccttctgcaccttccacacctgctgtgatgtggccttctgctacagcagcctcttccacctgtgcttcatcagcattgaccgctacatcgctgtgacagaccccctggtgtaccccaccaagttcaccgtgtctgtgtctggcatctgcatctctgtgtcctggatcctgcccctgatgtacagcggggctgtgttctacacaggagtgtatgatgatggcctggaggagctgagtgatgccctgaactgcatcggcggctgccagacagtggtgaaccagaactgggtgctgacagacttcctgtccttcttcatccccaccttcatcatgatcatcctgtatggcaacatcttcctggtggcccggcggcaggccaagaagattgaaaatacagagagctacaaggcccgggtggcccggcgggagaggaaggccgccaagaccctgggcgtgacagtggtggccttcatgatctcctggctgccctacagcattgacagcctgattgatgccttcatgggcttcatcaccccagcctgcatctatgagatctgctgctggtgtgcctactacaacagcgccatgaaccccctcatctatgccctcttctacccctggttcaggaaggccatcaaggtgattgtgacaggccaggtgctgaagaacagcagcgccaccatgaacctcttcagcgagtag

SEQ ID NO: 173461 - DNA, 1410 bp, synthetic construct
  misc_feature 1..1410: note = Description of Artificial Sequence: Synthetic coding sequence
  source 1..1410: mol_type = other DNA
atgcccatccgggccctgtgcaccatctgcagcgacttctttgaccacagcagagatgtggccgccatccactgcggccacaccttccacctgcagtgcctgatccagtggtttgaaacagcccccagcaggacctgcccccagtgccgcatccaggtgggcaagaggaccatcatcaacaagctgttctttgacctggcccaggaggaggagaatgtgctggatgctgagttcctgaagaatgagctggacaacgtgcgggcccagctgagccagaaggacaaggagaagagggacagccaggtgatcatcgacaccctgcgggacaccctggaggagagaaatgccaccgtggtgtccctgcagcaggccctgggcaaggccgagatgctgtgcagcaccctgaagaagcagatgaagtacctggagcagcagcaggatgagaccaagcaggcccaggaggaggcccggcggctgcggagcaagatgaagaccatggagcagatcgagctgctgctgcagagccagaggcctgaggtggaggagatgatccgggacatgggcgtgggccagagcgctgtggagcagctggccgtgtactgtgtgtccctgaagaaggagtatgagaacctgaaggaggccaggaaggccagcggggaggtggccgacaagctgaggaaggacctcttcagcagccgcagcaagctgcagacagtgtacagcgagctggaccaggccaagctggagctgaagagcgcccagaaggacctgcagagcgctgacaaggagatcatgagcctgaagaagaagctgaccatgctgcaggagaccctgaacctgccccctgtggccagcgagaccgtggaccggctggtgctggagagccctgcccctgtggaggtgaacctgaagctgcggcggcccagcttcagagatgacatcgacctgaatgccacctttgatgtggacaccccaccagcccggcccagcagcagccagcacggctactatgagaagctgtgcctggagaagagccacagccccatccaggatgtgcccaagaagatctgcaagggccccaggaaggagagccagctgagcctgggcggccagagctgtgccggggagccagatgaggagctggtgggcgccttccccatctttgtgagaaatgccatcctgggccagaagcagcccaagaggcccaggtctgagagcagctgcagcaaggatgtggtgaggactggatttgatggcctgggcggccgcaccaagttcatccagcccacagacacagtgatgatccggcccctgcctgtgaagcccaagaccaaggtgaagcagagggtgcgggtgaagacagtgcccagcctcttccaggccaagctggacaccttcctgtggagctag

SEQ ID NO: 173462 - DNA, 4059 bp, synthetic construct
  misc_feature 1..4059: note = Description of Artificial Sequence: Synthetic coding sequence
  source 1..4059: mol_type = other DNA
atggccagtgacagccctgcccggagcctggatgaaattgacctgagcgccctgcgggaccctgctggcatctttgagctggtggagctggtgggcaatggcacctacggccaggtgtacaagggccgccacgtgaagacaggccagctggccgccatcaaggtgatggatgtgactggagatgaggaggaggagatcaagcaggagatcaacatgctgaagaagtacagccaccacaggaacatcgccacctactacggggccttcatcaagaagaaccccccaggcatggatgaccagctgtggctggtgatggagttctgtggggccggctctgtgacagacctgatcaagaacaccaagggcaacaccctgaaggaggagtggatcgcctacatctgccgggagatcctgcggggcctgagccacctgcaccagcacaaggtgatccaccgggacatcaagggccagaatgtgctgctgacagaaaatgctgaggtgaagctggtggactttggagtgtctgcccagctggacagaacagtgggcagaagaaacaccttcatcggcaccccctactggatggcccctgaggtgattgcctgtgatgagaacccagatgccacctatgacttcaagagtgacctgtggagcctgggcatcacagccatcgagatggccgagggcgccccacccctgtgtgacatgcaccccatgagggccctcttcctgatccccagaaatcctgccccccggctgaagagcaagaagtggagcaagaagttccagagcttcatcgagagctgcctggtgaagaaccacagccagaggcctgccacagagcagctgatgaagcaccccttcatccgggaccagcccaatgaaaggcaggtgcgcatccagctgaaggaccacatcgacaggaccaagaagaagagaggagagaaggatgaaacagaatatgagtacagcggcagcgaggaggaggaggaggagaatgattctggagagcccagcagcatcctgaacctgcctggagagagcaccctgcggcgggacttcctgcggctgcagctggccaacaaggagaggtctgaggccctgcggcggcagcagctggagcagcagcagagagaaaatgaggagcacaagaggcagctgctggccgagcggcagaagagaattgaggagcagaaggagcagaggcggcggctggaggagcagcagaggcgggagaaggagctgaggaagcagcaggagcgggagcagaggaggcactatgaggagcagatgaggcgggaggaggagcggcggcgggcagagcacgagcaggagtacatccggcggcagctggaggaggagcagaggcagctggagatcctgcagcagcagctgctgcacgagcaggccctgctgctggagtacaagaggaagcagctggaggagcagaggcaggccgagcggctgcagaggcagctgaagcaggagcgggactacctggtgtccctgcagcaccagaggcaggagcagaggcctgtggagaagaagcccctgtaccactacaaggagggcatgagccccagcgagaagccagcctgggccaaggaggtggaggagaggagccggctgaaccggcagagcagccctgccatgccccacaaggtggccaaccgcatcagtgaccccaacctgcccccaagaagtgagagcttcagcatcagcggcgtgcagcctgcccggaccccacccatgctgcggcctgtggacccccagatcccccacctggtggccgtgaagagccagggccctgccctgacagccagccagagcgtgcatgagcagcccaccaagggcctgagcggcttccaggaggccctgaatgtgaccagccaccgggtggagatgccccggcagaacagcgaccccaccagtgaaaatccacccctgcccaccagaattgagaagtttgacaggagctcctggctgcggcaggaggaggacatcccccccaaggtgccccagaggaccaccagcatcagccctgccctggccaggaagaacagccctggaaatggaagtgccctgggcccccggctgggcagccagcccatccgggccagcaacccagacctgcggaggacagagcccatcctggagagccccctgcagaggaccagcagcggcagcagcagcagcagcagcacccccagcagccagcccagcagccagggcggcagccagcccggcagccaggccggcagcagcgagaggaccagggtgcgggccaacagcaagtctgagggcagccctgtgctgccccatgagcccgccaaggtgaagccagaggagagccgggacatcacccggcccagcaggcctgctgacctgacagccctggccaaggagctgcgggagctgcgcatcgaggagaccaaccggcccatgaagaaggtgacagactacagcagcagcagcgaggagagcgagagcagcgaggaggaggaggaggatggagagagcgagacccatgatggcaccgtggccgtgtctgacatccccaggctcatccccaccggggcccctggcagcaatgagcagtacaacgtgggcatggtgggcacccacggcctggagaccagccacgccgacagcttcagcggcagcatcagccgggagggcaccctgatgatccgggagaccagcggggagaagaagaggagcggccacagcgacagcaatggatttgctggccacatcaacctgcctgacctggtgcagcagagccacagccctgctggcacccccacagagggcctgggccgggtgtccacccacagccaggagatggattctggaacagaatatggcatgggcagcagcaccaaggccagcttcaccccatttgtggacccccgggtgtaccagaccagccccacagatgaagatgaggaggatgaggagagcagcgctgctgccctcttcaccagcgagctgctgcggcaggagcaggccaagctgaatgaggccaggaagatctctgtggtgaatgtgaaccccaccaacatccggccccacagcgacaccccagagatcaggaagtacaagaagcgcttcaacagcgagatcctgtgtgccgccctgtggggcgtgaacctgctggtgggcacagaaaatggcctgatgctgctggacaggagcggccagggcaaggtgtacaacctgatcaacagaagacgcttccagcagatggatgtgctggagggcctgaatgtgctggtgaccatcagcggcaagaagaacaagctgcgggtgtactacctgtcctggctgaggaaccgcatcctgcacaatgaccctgaggtggagaagaagcagggctggatcaccgtgggggacctggagggctgcatccactacaaggtggtgaagtatgaaagaatcaagttcctggtgattgccctgaagaatgctgtggagatctatgcctgggcccccaagccctaccacaagttcatggccttcaagagctttgctgacctgcagcacaagcccctgctggtggacctgactgtggaggagggccagaggctgaaggtgatcttcggcagccacacaggcttccacgtgattgatgtggacagcggcaacagctatgacatctacatccccagccacatccagggcaacatcacccctcatgccatcgtcatcctgcccaagacagatggcatggagatgctggtgtgctatgaagatgagggcgtgtatgtgaacacctacggccgcatcaccaaggatgtggtgctgcagtggggcgagatgcccacctctgtggcctacatccacagcaaccagatcatgggctggggcgagaaggccatcgagatccgctctgtggagaccggccacctggatggagtcttcatgcacaagagggcccagaggctgaagttcctgtgtgaaagaaatgacaaggtgttctttgcctctgtgcgcagcggcggcagcagccaggtgttcttcatgaccctgaacagaaacagcatgatgaactggtag

SEQ ID NO: 173463 - DNA, 3831 bp, synthetic construct
  misc_feature 1..3831: note = Description of Artificial Sequence: Synthetic coding sequence
  source 1..3831: mol_type = other DNA
atggccagtgacagccctgcccggagcctggatgaaattgacctgagcgccctgcgggaccctgctggcatctttgagctggtggagctggtgggcaatggcacctacggccaggtgtacaagggccgccacgtgaagacaggccagctggccgccatcaaggtgatggatgtgactggagatgaggaggaggagatcaagcaggagatcaacatgctgaagaagtacagccaccacaggaacatcgccacctactacggggccttcatcaagaagaaccccccaggcatggatgaccagctgtggctggtgatggagttctgtggggccggctctgtgacagacctgatcaagaacaccaagggcaacaccctgaaggaggagtggatcgcctacatctgccgggagatcctgcggggcctgagccacctgcaccagcacaaggtgatccaccgggacatcaagggccagaatgtgctgctgacagaaaatgctgaggtgaagctggtggactttggagtgtctgcccagctggacagaacagtgggcagaagaaacaccttcatcggcaccccctactggatggcccctgaggtgattgcctgtgatgagaacccagatgccacctatgacttcaagagtgacctgtggagcctgggcatcacagccatcgagatggccgagggcgccccacccctgtgtgacatgcaccccatgagggccctcttcctgatccccagaaatcctgccccccggctgaagagcaagaagtggagcaagaagttccagagcttcatcgagagctgcctggtgaagaaccacagccagaggcctgccacagagcagctgatgaagcaccccttcatccgggaccagcccaatgaaaggcaggtgcgcatccagctgaaggaccacatcgacaggaccaagaagaagagaggagagaaggatgaaacagaatatgagtacagcggcagcgaggaggaggaggaggagaatgattctggagagcccagcagcatcctgaacctgcctggagagagcaccctgcggcgggacttcctgcggctgcagctggccaacaaggagaggtctgaggccctgcggcggcagcagctggagcagcagcagagagaaaatgaggagcacaagaggcagctgctggccgagcggcagaagagaattgaggagcagaaggagcagaggcggcggctggaggagcagcagaggcgggagaaggagctgaggaagcagcaggagcgggagcagaggaggcactatgaggagcagatgaggcgggaggaggagcggcggcgggcagagcacgagcaggagtacaagaggaagcagctggaggagcagaggcaggccgagcggctgcagaggcagctgaagcaggagcgggactacctggtgtccctgcagcaccagaggcaggagcagaggcctgtggagaagaagcccctgtaccactacaaggagggcatgagccccagcgagaagccagcctgggccaaggagatcccccacctggtggccgtgaagagccagggccctgccctgacagccagccagagcgtgcatgagcagcccaccaagggcctgagcggcttccaggaggccctgaatgtgaccagccaccgggtggagatgccccggcagaacagcgaccccaccagtgaaaatccacccctgcccaccagaattgagaagtttgacaggagctcctggctgcggcaggaggaggacatcccccccaaggtgccccagaggaccaccagcatcagccctgccctggccaggaagaacagccctggaaatggaagtgccctgggcccccggctgggcagccagcccatccgggccagcaacccagacctgcggaggacagagcccatcctggagagccccctgcagaggaccagcagcggcagcagcagcagcagcagcacccccagcagccagcccagcagccagggcggcagccagcccggcagccaggccggcagcagcgagaggaccagggtgcgggccaacagcaagtctgagggcagccctgtgctgccccatgagcccgccaaggtgaagccagaggagagccgggacatcacccggcccagcaggcctgccagctacaagaaggccattgatgaggacctgacagccctggccaaggagctgcgggagctgcgcatcgaggagaccaaccggcccatgaagaaggtgacagactacagcagcagcagcgaggagagcgagagcagcgaggaggaggaggaggatggagagagcgagacccatgatggcaccgtggccgtgtctgacatccccaggctcatccccaccggggcccctggcagcaatgagcagtacaacgtgggcatggtgggcacccacggcctggagaccagccacgccgacagcttcagcggcagcatcagccgggagggcaccctgatgatccgggagaccagcggggagaagaagaggagcggccacagcgacagcaatggatttgctggccacatcaacctgcctgacctggtgcagcagagccacagccctgctggcacccccacagagggcctgggccgggtgtccacccacagccaggagatggattctggaacagaatatggcatgggcagcagcaccaaggccagcttcaccccatttgtggacccccgggtgtaccagaccagccccacagatgaagatgaggaggatgaggagagcagcgctgctgccctcttcaccagcgagctgctgcggcaggagcaggccaagctgaatgaggccaggaagatctctgtggtgaatgtgaaccccaccaacatccggccccacagcgacaccccagagatcaggaagtacaagaagcgcttcaacagcgagatcctgtgtgccgccctgtggggcgtgaacctgctggtgggcacagaaaatggcctgatgctgctggacaggagcggccagggcaaggtgtacaacctgatcaacagaagacgcttccagcagatggatgtgctggagggcctgaatgtgctggtgaccatcagcggcaagaagaacaagctgcgggtgtactacctgtcctggctgaggaaccgcatcctgcacaatgaccctgaggtggagaagaagcagggctggatcaccgtgggggacctggagggctgcatccactacaaggtggtgaagtatgaaagaatcaagttcctggtgattgccctgaagaatgctgtggagatctatgcctgggcccccaagccctaccacaagttcatggccttcaagagctttgctgacctgcagcacaagcccctgctggtggacctgactgtggaggagggccagaggctgaaggtgatcttcggcagccacacaggcttccacgtgattgatgtggacagcggcaacagctatgacatctacatccccagccacatccagggcaacatcacccctcatgccatcgtcatcctgcccaagacagatggcatggagatgctggtgtgctatgaagatgagggcgtgtatgtgaacacctacggccgcatcaccaaggatgtggtgctgcagtggggcgagatgcccacctctgtggcctacatccacagcaaccagatcatgggctggggcgagaaggccatcgagatccgctctgtggagaccggccacctggatggagtcttcatgcacaagagggcccagaggctgaagttcctgtgtgaaagaaatgacaaggtgttctttgcctctgtgcgcagcggcggcagcagccaggtgttcttcatgaccctgaacagaaacagcatgatgaactggtag

SEQ ID NO: 173464 - DNA, 3996 bp, synthetic construct
  misc_feature 1..3996: note = Description of Artificial Sequence: Synthetic coding sequence
  source 1..3996: mol_type = other DNA
atggccagtgacagccctgcccggagcctggatgaaattgacctgagcgccctgcgggaccctgctggcatctttgagctggtggagctggtgggcaatggcacctacggccaggtgtacaagggccgccacgtgaagacaggccagctggccgccatcaaggtgatggatgtgactggagatgaggaggaggagatcaagcaggagatcaacatgctgaagaagtacagccaccacaggaacatcgccacctactacggggccttcatcaagaagaaccccccaggcatggatgaccagctgtggctggtgatggagttctgtggggccggctctgtgacagacctgatcaagaacaccaagggcaacaccctgaaggaggagtggatcgcctacatctgccgggagatcctgcggggcctgagccacctgcaccagcacaaggtgatccaccgggacatcaagggccagaatgtgctgctgacagaaaatgctgaggtgaagctggtggactttggagtgtctgcccagctggacagaacagtgggcagaagaaacaccttcatcggcaccccctactggatggcccctgaggtgattgcctgtgatgagaacccagatgccacctatgacttcaagagtgacctgtggagcctgggcatcacagccatcgagatggccgagggcgccccacccctgtgtgacatgcaccccatgagggccctcttcctgatccccagaaatcctgccccccggctgaagagcaagaagtggagcaagaagttccagagcttcatcgagagctgcctggtgaagaaccacagccagaggcctgccacagagcagctgatgaagcaccccttcatccgggaccagcccaatgaaaggcaggtgcgcatccagctgaaggaccacatcgacaggaccaagaagaagagaggagagaaggatgaaacagaatatgagtacagcggcagcgaggaggaggaggaggagaatgattctggagagcccagcagcatcctgaacctgcctggagagagcaccctgcggcgggacttcctgcggctgcagctggccaacaaggagaggtctgaggccctgcggcggcagcagctggagcagcagcagagagaaaatgaggagcacaagaggcagctgctggccgagcggcagaagagaattgaggagcagaaggagcagaggcggcggctggaggagcagcagaggcgggagaaggagctgaggaagcagcaggagcgggagcagaggaggcactatgaggagcagatgaggcgggaggaggagcggcggcgggcagagcacgagcaggagtacaagaggaagcagctggaggagcagaggcaggccgagcggctgcagaggcagctgaagcaggagcgggactacctggtgtccctgcagcaccagaggcaggagcagaggcctgtggagaagaagcccctgtaccactacaaggagggcatgagccccagcgagaagccagcctgggccaaggaggtggaggagaggagccggctgaaccggcagagcagccctgccatgccccacaaggtggccaaccgcatcagtgaccccaacctgccccccaggtctgagagcttcagcatctctggagtgcagcctgcccggaccccacccatgctgcggcctgtggacccccagatcccccacctggtggccgtgaagagccagggccctgccctgacagccagccagagcgtgcatgagcagcccaccaagggcctgagcggcttccaggaggccctgaatgtgaccagccaccgggtggagatgccccggcagaacagcgaccccaccagcgagaacccccccctgcccacccgcatcgagaagtttgacaggagctcctggctgcggcaggaggaggacatcccccccaaggtgccccagaggaccaccagcatcagccctgccctggccaggaagaacagccctggaaatggcagcgccctgggcccccggctgggcagccagcccatccgggccagcaacccagacctgcggaggacagagcccatcctggagagccccctgcagaggaccagcagcggcagcagcagcagcagcagcacccccagcagccagcccagcagccagggcggcagccagcccggcagccaggccggcagcagcgagaggaccagggtgcgggccaacagcaagtctgagggcagccctgtgctgccccatgagcccgccaaggtgaagccagaggagagccgggacatcacccggcccagcaggcctgccagctacaagaaggccattgatgaggacctgacagccctggccaaggagctgcgggagctgagaattgaggagaccaaccggcccatgaagaaggtgacagactacagcagcagcagcgaggagagcgagagcagcgaggaggaggaggaggatggagagagcgagacccatgatggcaccgtggccgtgtctgacatccccaggctcatccccactggagcccctggcagcaatgagcagtacaacgtgggcatggtgggcacccacggcctggagaccagccatgctgacagcttcagcggcagcatcagccgggagggcaccctgatgatccgggagaccagcggggagaagaagaggagcggccacagcgacagcaatggatttgctggccacatcaacctgcctgacctggtgcagcagagccacagccctgctggcacccccacagagggcctgggccgggtgtccacccacagccaggagatggacagcggcacagaatatggcatgggcagcagcaccaaggccagcttcaccccatttgtggacccccgggtgtaccagaccagccccacagatgaagatgaagaagatgaggagagcagcgctgctgccctcttcaccagcgagctgctgcggcaggagcaggccaagctgaatgaggccaggaagatctctgtggtgaatgtgaaccccaccaacatccggccccacagcgacaccccagagatcaggaagtacaagaagcgcttcaacagcgagatcctgtgtgccgccctgtggggcgtgaacctgctggtgggcacagaaaatggcctgatgctgctggacagaagtggccagggcaaggtgtacaacctgatcaacagaagacgcttccagcagatggatgtgctggagggcctgaatgtgctggtgaccatcagcggcaagaagaacaagctgcgggtgtactacctgtcctggctgaggaaccgcatcctgcacaatgaccctgaggtggagaagaagcagggctggatcaccgtgggggacctggagggctgcatccactacaaggtggtgaagtatgagcgcatcaagttcctggtgattgccctgaagaatgctgtggagatctatgcctgggcccccaagccctaccacaagttcatggccttcaagagctttgctgacctgcagcacaagcccctgctggtggacctgactgtggaggagggccagaggctgaaggtgatcttcggcagccacacaggcttccacgtgattgatgtggacagcggcaacagctatgacatctacatccccagccacatccagggcaacatcaccccccacgccatcgtcatcctgcccaagacagatggcatggagatgctggtgtgctatgaagatgaaggagtgtatgtgaacacctacggccgcatcaccaaggatgtggtgctgcagtggggcgagatgcccacctctgtggcctacatccacagcaaccagatcatgggctggggcgagaaggccatcgagatccgctctgtggagaccggccacctggatggagtcttcatgcacaagagggcccagaggctgaagttcctgtgtgaaagaaatgacaaggtgttctttgcctctgtgcgcagcggcggcagcagccaggtgttcttcatgaccctgaacagaaattccatgatgaactggtag

SEQ ID NO: 173465 - DNA, 4017 bp, synthetic construct
  misc_feature 1..4017: note = Description of Artificial Sequence: Synthetic coding sequence
  source 1..4017: mol_type = other DNA
atggccagtgacagccctgcccggagcctggatgaaattgacctgagcgccctgcgggaccctgctggcatctttgagctggtggagctggtgggcaatggcacctacggccaggtgtacaagggccgccacgtgaagacaggccagctggccgccatcaaggtgatggatgtgactggagatgaggaggaggagatcaagcaggagatcaacatgctgaagaagtacagccaccacaggaacatcgccacctactacggggccttcatcaagaagaaccccccaggcatggatgaccagctgtggctggtgatggagttctgtggggccggctctgtgacagacctgatcaagaacaccaagggcaacaccctgaaggaggagtggatcgcctacatctgccgggagatcctgcggggcctgagccacctgcaccagcacaaggtgatccaccgggacatcaagggccagaatgtgctgctgacagaaaatgctgaggtgaagatcgtggactttggagtgtctgcccagctggacagaacagtgggcagaagaaacaccttcatcggcaccccctactggatggcccctgaggtgattgcctgtgatgagaacccagatgccacctatgacttcaagagtgacctgtggagcctgggcatcacagccatcgagatggccgagggcgccccacccctgtgtgacatgcaccccatgagggccctcttcctgatccccagaaatcctgccccccggctgaagagcaagaagtggagcaagaagttccagagcttcatcgagagctgcctggtgaagaaccacagccagaggcctgccacagagcagctgatgaagcaccccttcatccgggaccagcccaatgaaaggcaggtgcgcatccagctgaaggaccacatcgacaggaccaagaagaagagaggagagaaggatgaaacagaatatgagtacagcggcagcgaggaggaggaggaggagaatgattctggagagcccagcagcatcctgaacctgcctggagagagcaccctgcggcgggacttcctgcggctgcagctggccaacaaggagaggtctgaggccctgcggcggcagcagctggagcagcagcagagagaaaatgaggagcacaagaggcagctgctggccgagcggcagaagagaattgaggagcagaaggagcagaggcggcggctggaggagcagcagaggcgggagaaggagctgaggaagcagcaggagcgggagcagaggaggcactatgaggagcagatgaggcgggaggaggagcggcggcgggcagagcacgagcaggagtacaagaggaagcagctggaggagcagaggcaggccgagcggctgcagaggcagctgaagcaggagcgggactacctggtgtccctgcagcaccagaggcaggagcagaggcctgtggagaagaagcccctgtaccactacaaggagggcatgagccccagcgagaagccagcctgggccaaggaggtggaggagaggagccggctgaaccggcagagcagccctgccatgccccacaaggtggccaaccgcatcagtgaccccaacctgccccccaggtctgagagcttcagcatctctggagtgcagcctgcccggaccccacccatgctgcggcctgtggacccccagatcccccacctggtggccgtgaagagccagggccctgccctgacagccagccagagcgtgcatgagcagcccaccaagggcctgagcggcttccaggaggccctgaatgtgaccagccaccgggtggagatgccccggcagaacagcgaccccaccagcgagaacccccccctgcccacccgcatcgagaagtttgacaggagctcctggctgcggcaggaggaggacatcccccccaaggtgccccagaggaccaccagcatcagccctgccctggccaggaagaacagccctggaaatggcagcgccctgggcccccggctgggcagccagcccatccgggccagcaacccagacctgcggaggacagagcccatcctggagagccccctgcagaggaccagcagcggcagcagcagcagcagcagcacccccagcagccagcccagcagccagggcggcagccagcccggcagccaggccggcagcagcgagaggaccagggtgcgggccaacagcaagtctgagggcagccctgtgctgccccatgagcccgccaaggtgaagccagaggagagccgggacatcacccggcccagcaggcctgctgtgtctgccttcctgagcaagagctttgagctgctgatctaccaggacctgacagccctggccaaggagctgcgggagctgcgcatcgaggagaccaaccggcccatgaagaaggtgacagactacagcagcagcagcgaggagagcgagagcagcgaggaggaggaggaggatggagagagcgagacccatgatggcaccgtggccgtgtctgacatccccaggctcatccccaccggggcccctggcagcaatgagcagtacaacgtgggcatggtgggcacccacggcctggagaccagccacgccgacagcttcagcggcagcatcagccgggagggcaccctgatgatccgggagaccagcggggagaagaagaggagcggccacagcgacagcaatggatttgctggccacatcaacctgcctgacctggtgcagcagagccacagccctgctggcacccccacagagggcctgggccgggtgtccacccacagccaggagatggattctggaacagaatatggcatgggcagcagcaccaaggccagcttcaccccatttgtggacccccgggtgtaccagaccagccccacagatgaagatgaggaggatgaggagagcagcgctgctgccctcttcaccagcgagctgctgcggcaggagcaggccaagctgaatgaggccaggaagatctctgtggtgaatgtgaaccccaccaacatccggccccacagcgacaccccagagatcaggaagtacaagaagcgcttcaacagcgagatcctgtgtgccgccctgtggggcgtgaacctgctggtgggcacagaaaatggcctgatgctgctggacaggagcggccagggcaaggtgtacaacctgatcaacagaagacgcttccagcagatggatgtgctggagggcctgaatgtgctggtgaccatcagcggcaagaagaacaagctgcgggtgtactacctgtcctggctgaggaaccgcatcctgcacaatgaccctgaggtggagaagaagcagggctggatcaccgtgggggacctggagggctgcatccactacaaggtggtgaagtatgaaagaatcaagttcctggtgattgccctgaagaatgctgtggagatctatgcctgggcccccaagccctaccacaagttcatggccttcaagagctttgctgacctgcagcacaagcccctgctggtggacctgactgtggaggagggccagaggctgaaggtgatcttcggcagccacacaggcttccacgtgattgatgtggacagcggcaacagctatgacatctacatccccagccacatccagggcaacatcacccctcatgccatcgtcatcctgcccaagacagatggcatggagatgctggtgtgctatgaagatgagggcgtgtatgtgaacacctacggccgcatcaccaaggatgtggtgctgcagtggggcgagatgcccacctctgtggcctacatccacagcaaccagatcatgggctggggcgagaaggccatcgagatccgctctgtggagaccggccacctggatggagtcttcatgcacaagagggcccagaggctgaagttcctgtgtgaaagaaatgacaaggtgttctttgcctctgtgcgcagcggcggcagcagccaggtgttcttcatgaccctgaacagaaacagcatgatgaactggtag

SEQ ID NO: 173466 - DNA, 4083 bp, synthetic construct
  misc_feature 1..4083: note = Description of Artificial Sequence: Synthetic coding sequence
  source 1..4083: mol_type = other DNA
atggccagtgacagccctgcccggagcctggatgaaattgacctgagcgccctgcgggaccctgctggcatctttgagctggtggagctggtgggcaatggcacctacggccaggtgtacaagggccgccacgtgaagacaggccagctggccgccatcaaggtgatggatgtgactggagatgaggaggaggagatcaagcaggagatcaacatgctgaagaagtacagccaccacaggaacatcgccacctactacggggccttcatcaagaagaaccccccaggcatggatgaccagctgtggctggtgatggagttctgtggggccggctctgtgacagacctgatcaagaacaccaagggcaacaccctgaaggaggagtggatcgcctacatctgccgggagatcctgcggggcctgagccacctgcaccagcacaaggtgatccaccgggacatcaagggccagaatgtgctgctgacagaaaatgctgaggtgaagctggtggactttggagtgtctgcccagctggacagaacagtgggcagaagaaacaccttcatcggcaccccctactggatggcccctgaggtgattgcctgtgatgagaacccagatgccacctatgacttcaagagtgacctgtggagcctgggcatcacagccatcgagatggccgagggcgccccacccctgtgtgacatgcaccccatgagggccctcttcctgatccccagaaatcctgccccccggctgaagagcaagaagtggagcaagaagttccagagcttcatcgagagctgcctggtgaagaaccacagccagaggcctgccacagagcagctgatgaagcaccccttcatccgggaccagcccaatgaaaggcaggtgcgcatccagctgaaggaccacatcgacaggaccaagaagaagagaggagagaaggatgaaacagaatatgagtacagcggcagcgaggaggaggaggaggagaatgattctggagagcccagcagcatcctgaacctgcctggagagagcaccctgcggcgggacttcctgcggctgcagctggccaacaaggagaggtctgaggccctgcggcggcagcagctggagcagcagcagagagaaaatgaggagcacaagaggcagctgctggccgagcggcagaagagaattgaggagcagaaggagcagaggcggcggctggaggagcagcagaggcgggagaaggagctgaggaagcagcaggagcgggagcagaggaggcactatgaggagcagatgaggcgggaggaggagcggcggcgggcagagcacgagcaggagtacatccggcggcagctggaggaggagcagaggcagctggagatcctgcagcagcagctgctgcacgagcaggccctgctgctggagtacaagaggaagcagctggaggagcagaggcaggccgagcggctgcagaggcagctgaagcaggagcgggactacctggtgtccctgcagcaccagaggcaggagcagaggcctgtggagaagaagcccctgtaccactacaaggagggcatgagccccagcgagaagccagcctgggccaaggaggtggaggagaggagccggctgaaccggcagagcagccctgccatgccccacaaggtggccaaccgcatcagtgaccccaacctgcccccaagaagtgagagcttcagcatcagcggcgtgcagcctgcccggaccccacccatgctgcggcctgtggacccccagatcccccacctggtggccgtgaagagccagggccctgccctgacagccagccagagcgtgcatgagcagcccaccaagggcctgagcggcttccaggaggccctgaatgtgaccagccaccgggtggagatgccccggcagaacagcgaccccaccagtgaaaatccacccctgcccaccagaattgagaagtttgacaggagctcctggctgcggcaggaggaggacatcccccccaaggtgccccagaggaccaccagcatcagccctgccctggccaggaagaacagccctggaaatggaagtgccctgggcccccggctgggcagccagcccatccgggccagcaacccagacctgcggaggacagagcccatcctggagagccccctgcagaggaccagcagcggcagcagcagcagcagcagcacccccagcagccagcccagcagccagggcggcagccagcccggcagccaggccggcagcagcgagaggaccagggtgcgggccaacagcaagtctgagggcagccctgtgctgccccatgagcccgccaaggtgaagccagaggagagccgggacatcacccggcccagcaggcctgccagctacaagaaggccattgatgaggacctgacagccctggccaaggagctgcgggagctgcgcatcgaggagaccaaccggcccatgaagaaggtgacagactacagcagcagcagcgaggagagcgagagcagcgaggaggaggaggaggatggagagagcgagacccatgatggcaccgtggccgtgtctgacatccccaggctcatccccaccggggcccctggcagcaatgagcagtacaacgtgggcatggtgggcacccacggcctggagaccagccacgccgacagcttcagcggcagcatcagccgggagggcaccctgatgatccgggagaccagcggggagaagaagaggagcggccacagcgacagcaatggatttgctggccacatcaacctgcctgacctggtgcagcagagccacagccctgctggcacccccacagagggcctgggccgggtgtccacccacagccaggagatggattctggaacagaatatggcatgggcagcagcaccaaggccagcttcaccccatttgtggacccccgggtgtaccagaccagccccacagatgaagatgaggaggatgaggagagcagcgctgctgccctcttcaccagcgagctgctgcggcaggagcaggccaagctgaatgaggccaggaagatctctgtggtgaatgtgaaccccaccaacatccggccccacagcgacaccccagagatcaggaagtacaagaagcgcttcaacagcgagatcctgtgtgccgccctgtggggcgtgaacctgctggtgggcacagaaaatggcctgatgctgctggacaggagcggccagggcaaggtgtacaacctgatcaacagaagacgcttccagcagatggatgtgctggagggcctgaatgtgctggtgaccatcagcggcaagaagaacaagctgcgggtgtactacctgtcctggctgaggaaccgcatcctgcacaatgaccctgaggtggagaagaagcagggctggatcaccgtgggggacctggagggctgcatccactacaaggtggtgaagtatgaaagaatcaagttcctggtgattgccctgaagaatgctgtggagatctatgcctgggcccccaagccctaccacaagttcatggccttcaagagctttgctgacctgcagcacaagcccctgctggtggacctgactgtggaggagggccagaggctgaaggtgatcttcggcagccacacaggcttccacgtgattgatgtggacagcggcaacagctatgacatctacatccccagccacatccagggcaacatcacccctcatgccatcgtcatcctgcccaagacagatggcatggagatgctggtgtgctatgaagatgagggcgtgtatgtgaacacctacggccgcatcaccaaggatgtggtgctgcagtggggcgagatgcccacctctgtggcctacatccacagcaaccagatcatgggctggggcgagaaggccatcgagatccgctctgtggagaccggccacctggatggagtcttcatgcacaagagggcccagaggctgaagttcctgtgtgaaagaaatgacaaggtgttctttgcctctgtgcgcagcggcggcagcagccaggtgttcttcatgaccctgaacagaaacagcatgatgaactggtag

SEQ ID NO: 173467 - DNA, 3894 bp, synthetic construct
  misc_feature 1..3894: note = Description of Artificial Sequence: Synthetic coding sequence
  source 1..3894: mol_type = other DNA
atggccagtgacagccctgcccggagcctggatgaaattgacctgagcgccctgcgggaccctgctggcatctttgagctggtggagctggtgggcaatggcacctacggccaggtgtacaagggccgccacgtgaagacaggccagctggccgccatcaaggtgatggatgtgactggagatgaggaggaggagatcaagcaggagatcaacatgctgaagaagtacagccaccacaggaacatcgccacctactacggggccttcatcaagaagaaccccccaggcatggatgaccagctgtggctggtgatggagttctgtggggccggctctgtgacagacctgatcaagaacaccaagggcaacaccctgaaggaggagtggatcgcctacatctgccgggagatcctgcggggcctgagccacctgcaccagcacaaggtgatccaccgggacatcaagggccagaatgtgctgctgacagaaaatgctgaggtgaagctggtggactttggagtgtctgcccagctggacagaacagtgggcagaagaaacaccttcatcggcaccccctactggatggcccctgaggtgattgcctgtgatgagaacccagatgccacctatgacttcaagagtgacctgtggagcctgggcatcacagccatcgagatggccgagggcgccccacccctgtgtgacatgcaccccatgagggccctcttcctgatccccagaaatcctgccccccggctgaagagcaagaagtggagcaagaagttccagagcttcatcgagagctgcctggtgaagaaccacagccagaggcctgccacagagcagctgatgaagcaccccttcatccgggaccagcccaatgaaaggcaggtgcgcatccagctgaaggaccacatcgacaggaccaagaagaagagaggagagaaggatgaaacagaatatgagtacagcggcagcgaggaggaggaggaggagaatgattctggagagcccagcagcatcctgaacctgcctggagagagcaccctgcggcgggacttcctgcggctgcagctggccaacaaggagaggtctgaggccctgcggcggcagcagctggagcagcagcagagagaaaatgaggagcacaagaggcagctgctggccgagcggcagaagagaattgaggagcagaaggagcagaggcggcggctggaggagcagcagaggcgggagaaggagctgaggaagcagcaggagcgggagcagaggaggcactatgaggagcagatgaggcgggaggaggagcggcggcgggcagagcacgagcaggagtacatccggcggcagctggaggaggagcagaggcagctggagatcctgcagcagcagctgctgcacgagcaggccctgctgctggagtacaagaggaagcagctggaggagcagaggcaggccgagcggctgcagaggcagctgaagcaggagcgggactacctggtgtccctgcagcaccagaggcaggagcagaggcctgtggagaagaagcccctgtaccactacaaggagggcatgagccccagcgagaagccagcctgggccaaggagatcccccacctggtggccgtgaagagccagggccctgccctgacagccagccagagcgtgcatgagcagcccaccaagggcctgagcggcttccaggaggccctgaatgtgaccagccaccgggtggagatgccccggcagaacagcgaccccaccagcgagaacccccccctgcccacccgcatcgagaagtttgacaggagctcctggctgcggcaggaggaggacatcccccccaaggtgccccagaggaccaccagcatcagccctgccctggccaggaagaacagccctggaaatggcagcgccctgggcccccggctgggcagccagcccatccgggccagcaacccagacctgcggaggacagagcccatcctggagagccccctgcagaggaccagcagcggcagcagcagcagcagcagcacccccagcagccagcccagcagccagggcggcagccagcccggcagccaggccggcagcagcgagaggaccagggtgcgggccaacagcaagtctgagggcagccctgtgctgccccatgagcccgccaaggtgaagccagaggagagccgggacatcacccggcccagcaggcctgctgacctgacagccctggccaaggagctgcgggagctgagaattgaggagaccaaccggcccatgaagaaggtgacagactacagcagcagcagcgaggagagcgagagcagcgaggaggaggaggaggatggagagagcgagacccatgatggcaccgtggccgtgtctgacatccccaggctcatccccactggagcccctggcagcaatgagcagtacaacgtgggcatggtgggcacccacggcctggagaccagccatgctgacagcttcagcggcagcatcagccgggagggcaccctgatgatccgggagaccagcggggagaagaagaggagcggccacagcgacagcaatggatttgctggccacatcaacctgcctgacctggtgcagcagagccacagccctgctggcacccccacagagggcctgggccgggtgtccacccacagccaggagatggacagcggcacagaatatggcatgggcagcagcaccaaggccagcttcaccccatttgtggacccccgggtgtaccagaccagccccacagatgaagatgaagaagatgaggagagcagcgctgctgccctcttcaccagcgagctgctgcggcaggagcaggccaagctgaatgaggccaggaagatctctgtggtgaatgtgaaccccaccaacatccggccccacagcgacaccccagagatcaggaagtacaagaagcgcttcaacagcgagatcctgtgtgccgccctgtggggcgtgaacctgctggtgggcacagaaaatggcctgatgctgctggacagaagtggccagggcaaggtgtacaacctgatcaacagaagacgcttccagcagatggatgtgctggagggcctgaatgtgctggtgaccatcagcggcaagaagaacaagctgcgggtgtactacctgtcctggctgaggaaccgcatcctgcacaatgaccctgaggtggagaagaagcagggctggatcaccgtgggggacctggagggctgcatccactacaaggtggtgaagtatgagcgcatcaagttcctggtgattgccctgaagaatgctgtggagatctatgcctgggcccccaagccctaccacaagttcatggccttcaagagctttgctgacctgcagcacaagcccctgctggtggacctgactgtggaggagggccagaggctgaaggtgatcttcggcagccacacaggcttccacgtgattgatgtggacagcggcaacagctatgacatctacatccccagccacatccagggcaacatcaccccccacgccatcgtcatcctgcccaagacagatggcatggagatgctggtgtgctatgaagatgaaggagtgtatgtgaacacctacggccgcatcaccaaggatgtggtgctgcagtggggcgagatgcccacctctgtggcctacatccacagcaaccagatcatgggctggggcgagaaggccatcgagatccgctctgtggagaccggccacctggatggagtcttcatgcacaagagggcccagaggctgaagttcctgtgtgaaagaaatgacaaggtgttctttgcctctgtgcgcagcggcggcagcagccaggtgttcttcatgaccctgaacagaaattccatgatgaactggtag

SEQ ID NO: 173468 - DNA, 3972 bp, synthetic construct
  misc_feature 1..3972: note = Description of Artificial Sequence: Synthetic coding sequence
  source 1..3972: mol_type = other DNA
atggccagtgacagccctgcccggagcctggatgaaattgacctgagcgccctgcgggaccctgctggcatctttgagctggtggagctggtgggcaatggcacctacggccaggtgtacaagggccgccacgtgaagacaggccagctggccgccatcaaggtgatggatgtgactggagatgaggaggaggagatcaagcaggagatcaacatgctgaagaagtacagccaccacaggaacatcgccacctactacggggccttcatcaagaagaaccccccaggcatggatgaccagctgtggctggtgatggagttctgtggggccggctctgtgacagacctgatcaagaacaccaagggcaacaccctgaaggaggagtggatcgcctacatctgccgggagatcctgcggggcctgagccacctgcaccagcacaaggtgatccaccgggacatcaagggccagaatgtgctgctgacagaaaatgctgaggtgaagctggtggactttggagtgtctgcccagctggacagaacagtgggcagaagaaacaccttcatcggcaccccctactggatggcccctgaggtgattgcctgtgatgagaacccagatgccacctatgacttcaagagtgacctgtggagcctgggcatcacagccatcgagatggccgagggcgccccacccctgtgtgacatgcaccccatgagggccctcttcctgatccccagaaatcctgccccccggctgaagagcaagaagtggagcaagaagttccagagcttcatcgagagctgcctggtgaagaaccacagccagaggcctgccacagagcagctgatgaagcaccccttcatccgggaccagcccaatgaaaggcaggtgcgcatccagctgaaggaccacatcgacaggaccaagaagaagagaggagagaaggatgaaacagaatatgagtacagcggcagcgaggaggaggaggaggagaatgattctggagagcccagcagcatcctgaacctgcctggagagagcaccctgcggcgggacttcctgcggctgcagctggccaacaaggagaggtctgaggccctgcggcggcagcagctggagcagcagcagagagaaaatgaggagcacaagaggcagctgctggccgagcggcagaagagaattgaggagcagaaggagcagaggcggcggctggaggagcagcagaggcgggagaaggagctgaggaagcagcaggagcgggagcagaggaggcactatgaggagcagatgaggcgggaggaggagcggcggcgggcagagcacgagcaggagtacaagaggaagcagctggaggagcagaggcaggccgagcggctgcagaggcagctgaagcaggagcgggactacctggtgtccctgcagcaccagaggcaggagcagaggcctgtggagaagaagcccctgtaccactacaaggagggcatgagccccagcgagaagccagcctgggccaaggaggtggaggagaggagccggctgaaccggcagagcagccctgccatgccccacaaggtggccaaccgcatcagtgaccccaacctgccccccaggtctgagagcttcagcatctctggagtgcagcctgcccggaccccacccatgctgcggcctgtggacccccagatcccccacctggtggccgtgaagagccagggccctgccctgacagccagccagagcgtgcatgagcagcccaccaagggcctgagcggcttccaggaggccctgaatgtgaccagccaccgggtggagatgccccggcagaacagcgaccccaccagcgagaacccccccctgcccacccgcatcgagaagtttgacaggagctcctggctgcggcaggaggaggacatcccccccaaggtgccccagaggaccaccagcatcagccctgccctggccaggaagaacagccctggaaatggcagcgccctgggcccccggctgggcagccagcccatccgggccagcaacccagacctgcggaggacagagcccatcctggagagccccctgcagaggaccagcagcggcagcagcagcagcagcagcacccccagcagccagcccagcagccagggcggcagccagcccggcagccaggccggcagcagcgagaggaccagggtgcgggccaacagcaagtctgagggcagccctgtgctgccccatgagcccgccaaggtgaagccagaggagagccgggacatcacccggcccagcaggcctgctgacctgacagccctggccaaggagctgcgggagctgagaattgaggagaccaaccggcccatgaagaaggtgacagactacagcagcagcagcgaggagagcgagagcagcgaggaggaggaggaggatggagagagcgagacccatgatggcaccgtggccgtgtctgacatccccaggctcatccccactggagcccctggcagcaatgagcagtacaacgtgggcatggtgggcacccacggcctggagaccagccatgctgacagcttcagcggcagcatcagccgggagggcaccctgatgatccgggagaccagcggggagaagaagaggagcggccacagcgacagcaatggatttgctggccacatcaacctgcctgacctggtgcagcagagccacagccctgctggcacccccacagagggcctgggccgggtgtccacccacagccaggagatggacagcggcacagaatatggcatgggcagcagcaccaaggccagcttcaccccatttgtggacccccgggtgtaccagaccagccccacagatgaagatgaagaagatgaggagagcagcgctgctgccctcttcaccagcgagctgctgcggcaggagcaggccaagctgaatgaggccaggaagatctctgtggtgaatgtgaaccccaccaacatccggccccacagcgacaccccagagatcaggaagtacaagaagcgcttcaacagcgagatcctgtgtgccgccctgtggggcgtgaacctgctggtgggcacagaaaatggcctgatgctgctggacagaagtggccagggcaaggtgtacaacctgatcaacagaagacgcttccagcagatggatgtgctggagggcctgaatgtgctggtgaccatcagcggcaagaagaacaagctgcgggtgtactacctgtcctggctgaggaaccgcatcctgcacaatgaccctgaggtggagaagaagcagggctggatcaccgtgggggacctggagggctgcatccactacaaggtggtgaagtatgagcgcatcaagttcctggtgattgccctgaagaatgctgtggagatctatgcctgggcccccaagccctaccacaagttcatggccttcaagagctttgctgacctgcagcacaagcccctgctggtggacctgactgtggaggagggccagaggctgaaggtgatcttcggcagccacacaggcttccacgtgattgatgtggacagcggcaacagctatgacatctacatccccagccacatccagggcaacatcaccccccacgccatcgtcatcctgcccaagacagatggcatggagatgctggtgtgctatgaagatgaaggagtgtatgtgaacacctacggccgcatcaccaaggatgtggtgctgcagtggggcgagatgcccacctctgtggcctacatccacagcaaccagatcatgggctggggcgagaaggccatcgagatccgctctgtggagaccggccacctggatggagtcttcatgcacaagagggcccagaggctgaagttcctgtgtgaaagaaatgacaaggtgttctttgcctctgtgcgcagcggcggcagcagccaggtgttcttcatgaccctgaacagaaattccatgatgaactggtag

SEQ ID NO: 173469 - DNA, 3807 bp, synthetic construct
  misc_feature 1..3807: note = Description of Artificial Sequence: Synthetic coding sequence
  source 1..3807: mol_type = other DNA
atggccagtgacagccctgcccggagcctggatgaaattgacctgagcgccctgcgggaccctgctggcatctttgagctggtggagctggtgggcaatggcacctacggccaggtgtacaagggccgccacgtgaagacaggccagctggccgccatcaaggtgatggatgtgactggagatgaggaggaggagatcaagcaggagatcaacatgctgaagaagtacagccaccacaggaacatcgccacctactacggggccttcatcaagaagaaccccccaggcatggatgaccagctgtggctggtgatggagttctgtggggccggctctgtgacagacctgatcaagaacaccaagggcaacaccctgaaggaggagtggatcgcctacatctgccgggagatcctgcggggcctgagccacctgcaccagcacaaggtgatccaccgggacatcaagggccagaatgtgctgctgacagaaaatgctgaggtgaagctggtggactttggagtgtctgcccagctggacagaacagtgggcagaagaaacaccttcatcggcaccccctactggatggcccctgaggtgattgcctgtgatgagaacccagatgccacctatgacttcaagagtgacctgtggagcctgggcatcacagccatcgagatggccgagggcgccccacccctgtgtgacatgcaccccatgagggccctcttcctgatccccagaaatcctgccccccggctgaagagcaagaagtggagcaagaagttccagagcttcatcgagagctgcctggtgaagaaccacagccagaggcctgccacagagcagctgatgaagcaccccttcatccgggaccagcccaatgaaaggcaggtgcgcatccagctgaaggaccacatcgacaggaccaagaagaagagaggagagaaggatgaaacagaatatgagtacagcggcagcgaggaggaggaggaggagaatgattctggagagcccagcagcatcctgaacctgcctggagagagcaccctgcggcgggacttcctgcggctgcagctggccaacaaggagaggtctgaggccctgcggcggcagcagctggagcagcagcagagagaaaatgaggagcacaagaggcagctgctggccgagcggcagaagagaattgaggagcagaaggagcagaggcggcggctggaggagcagcagaggcgggagaaggagctgaggaagcagcaggagcgggagcagaggaggcactatgaggagcagatgaggcgggaggaggagcggcggcgggcagagcacgagcaggagtacaagaggaagcagctggaggagcagaggcaggccgagcggctgcagaggcagctgaagcaggagcgggactacctggtgtccctgcagcaccagaggcaggagcagaggcctgtggagaagaagcccctgtaccactacaaggagggcatgagccccagcgagaagccagcctgggccaaggagatcccccacctggtggccgtgaagagccagggccctgccctgacagccagccagagcgtgcatgagcagcccaccaagggcctgagcggcttccaggaggccctgaatgtgaccagccaccgggtggagatgccccggcagaacagcgaccccaccagtgaaaatccacccctgcccaccagaattgagaagtttgacaggagctcctggctgcggcaggaggaggacatcccccccaaggtgccccagaggaccaccagcatcagccctgccctggccaggaagaacagccctggaaatggaagtgccctgggcccccggctgggcagccagcccatccgggccagcaacccagacctgcggaggacagagcccatcctggagagccccctgcagaggaccagcagcggcagcagcagcagcagcagcacccccagcagccagcccagcagccagggcggcagccagcccggcagccaggccggcagcagcgagaggaccagggtgcgggccaacagcaagtctgagggcagccctgtgctgccccatgagcccgccaaggtgaagccagaggagagccgggacatcacccggcccagcaggcctgctgacctgacagccctggccaaggagctgcgggagctgcgcatcgaggagaccaaccggcccatgaagaaggtgacagactacagcagcagcagcgaggagagcgagagcagcgaggaggaggaggaggatggagagagcgagacccatgatggcaccgtggccgtgtctgacatccccaggctcatccccaccggggcccctggcagcaatgagcagtacaacgtgggcatggtgggcacccacggcctggagaccagccacgccgacagcttcagcggcagcatcagccgggagggcaccctgatgatccgggagaccagcggggagaagaagaggagcggccacagcgacagcaatggatttgctggccacatcaacctgcctgacctggtgcagcagagccacagccctgctggcacccccacagagggcctgggccgggtgtccacccacagccaggagatggattctggaacagaatatggcatgggcagcagcaccaaggccagcttcaccccatttgtggacccccgggtgtaccagaccagccccacagatgaagatgaggaggatgaggagagcagcgctgctgccctcttcaccagcgagctgctgcggcaggagcaggccaagctgaatgaggccaggaagatctctgtggtgaatgtgaaccccaccaacatccggccccacagcgacaccccagagatcaggaagtacaagaagcgcttcaacagcgagatcctgtgtgccgccctgtggggcgtgaacctgctggtgggcacagaaaatggcctgatgctgctggacaggagcggccagggcaaggtgtacaacctgatcaacagaagacgcttccagcagatggatgtgctggagggcctgaatgtgctggtgaccatcagcggcaagaagaacaagctgcgggtgtactacctgtcctggctgaggaaccgcatcctgcacaatgaccctgaggtggagaagaagcagggctggatcaccgtgggggacctggagggctgcatccactacaaggtggtgaagtatgaaagaatcaagttcctggtgattgccctgaagaatgctgtggagatctatgcctgggcccccaagccctaccacaagttcatggccttcaagagctttgctgacctgcagcacaagcccctgctggtggacctgactgtggaggagggccagaggctgaaggtgatcttcggcagccacacaggcttccacgtgattgatgtggacagcggcaacagctatgacatctacatccccagccacatccagggcaacatcacccctcatgccatcgtcatcctgcccaagacagatggcatggagatgctggtgtgctatgaagatgagggcgtgtatgtgaacacctacggccgcatcaccaaggatgtggtgctgcagtggggcgagatgcccacctctgtggcctacatccacagcaaccagatcatgggctggggcgagaaggccatcgagatccgctctgtggagaccggccacctggatggagtcttcatgcacaagagggcccagaggctgaagttcctgtgtgaaagaaatgacaaggtgttctttgcctctgtgcgcagcggcggcagcagccaggtgttcttcatgaccctgaacagaaacagcatgatgaactggtag

SEQ ID NO: 173470 - DNA, 3918 bp, synthetic construct
  misc_feature 1..3918: note = Description of Artificial Sequence: Synthetic coding sequence
  source 1..3918: mol_type = other DNA
atggccagtgacagccctgcccggagcctggatgaaattgacctgagcgccctgcgggaccctgctggcatctttgagctggtggagctggtgggcaatggcacctacggccaggtgtacaagggccgccacgtgaagacaggccagctggccgccatcaaggtgatggatgtgactggagatgaggaggaggagatcaagcaggagatcaacatgctgaagaagtacagccaccacaggaacatcgccacctactacggggccttcatcaagaagaaccccccaggcatggatgaccagctgtggctggtgatggagttctgtggggccggctctgtgacagacctgatcaagaacaccaagggcaacaccctgaaggaggagtggatcgcctacatctgccgggagatcctgcggggcctgagccacctgcaccagcacaaggtgatccaccgggacatcaagggccagaatgtgctgctgacagaaaatgctgaggtgaagctggtggactttggagtgtctgcccagctggacagaacagtgggcagaagaaacaccttcatcggcaccccctactggatggcccctgaggtgattgcctgtgatgagaacccagatgccacctatgacttcaagagtgacctgtggagcctgggcatcacagccatcgagatggccgagggcgccccacccctgtgtgacatgcaccccatgagggccctcttcctgatccccagaaatcctgccccccggctgaagagcaagaagtggagcaagaagttccagagcttcatcgagagctgcctggtgaagaaccacagccagaggcctgccacagagcagctgatgaagcaccccttcatccgggaccagcccaatgaaaggcaggtgcgcatccagctgaaggaccacatcgacaggaccaagaagaagagaggagagaaggatgaaacagaatatgagtacagcggcagcgaggaggaggaggaggagaatgattctggagagcccagcagcatcctgaacctgcctggagagagcaccctgcggcgggacttcctgcggctgcagctggccaacaaggagaggtctgaggccctgcggcggcagcagctggagcagcagcagagagaaaatgaggagcacaagaggcagctgctggccgagcggcagaagagaattgaggagcagaaggagcagaggcggcggctggaggagcagcagaggcgggagaaggagctgaggaagcagcaggagcgggagcagaggaggcactatgaggagcagatgaggcgggaggaggagcggcggcgggcagagcacgagcaggagtacatccggcggcagctggaggaggagcagaggcagctggagatcctgcagcagcagctgctgcacgagcaggccctgctgctggagtacaagaggaagcagctggaggagcagaggcaggccgagcggctgcagaggcagctgaagcaggagcgggactacctggtgtccctgcagcaccagaggcaggagcagaggcctgtggagaagaagcccctgtaccactacaaggagggcatgagccccagcgagaagccagcctgggccaaggagatcccccacctggtggccgtgaagagccagggccctgccctgacagccagccagagcgtgcatgagcagcccaccaagggcctgagcggcttccaggaggccctgaatgtgaccagccaccgggtggagatgccccggcagaacagcgaccccaccagcgagaacccccccctgcccacccgcatcgagaagtttgacaggagctcctggctgcggcaggaggaggacatcccccccaaggtgccccagaggaccaccagcatcagccctgccctggccaggaagaacagccctggaaatggcagcgccctgggcccccggctgggcagccagcccatccgggccagcaacccagacctgcggaggacagagcccatcctggagagccccctgcagaggaccagcagcggcagcagcagcagcagcagcacccccagcagccagcccagcagccagggcggcagccagcccggcagccaggccggcagcagcgagaggaccagggtgcgggccaacagcaagtctgagggcagccctgtgctgccccatgagcccgccaaggtgaagccagaggagagccgggacatcacccggcccagcaggcctgccagctacaagaaggccattgatgaggacctgacagccctggccaaggagctgcgggagctgagaattgaggagaccaaccggcccatgaagaaggtgacagactacagcagcagcagcgaggagagcgagagcagcgaggaggaggaggaggatggagagagcgagacccatgatggcaccgtggccgtgtctgacatccccaggctcatccccactggagcccctggcagcaatgagcagtacaacgtgggcatggtgggcacccacggcctggagaccagccatgctgacagcttcagcggcagcatcagccgggagggcaccctgatgatccgggagaccagcggggagaagaagaggagcggccacagcgacagcaatggatttgctggccacatcaacctgcctgacctggtgcagcagagccacagccctgctggcacccccacagagggcctgggccgggtgtccacccacagccaggagatggacagcggcacagaatatggcatgggcagcagcaccaaggccagcttcaccccatttgtggacccccgggtgtaccagaccagccccacagatgaagatgaagaagatgaggagagcagcgctgctgccctcttcaccagcgagctgctgcggcaggagcaggccaagctgaatgaggccaggaagatctctgtggtgaatgtgaaccccaccaacatccggccccacagcgacaccccagagatcaggaagtacaagaagcgcttcaacagcgagatcctgtgtgccgccctgtggggcgtgaacctgctggtgggcacagaaaatggcctgatgctgctggacagaagtggccagggcaaggtgtacaacctgatcaacagaagacgcttccagcagatggatgtgctggagggcctgaatgtgctggtgaccatcagcggcaagaagaacaagctgcgggtgtactacctgtcctggctgaggaaccgcatcctgcacaatgaccctgaggtggagaagaagcagggctggatcaccgtgggggacctggagggctgcatccactacaaggtggtgaagtatgagcgcatcaagttcctggtgattgccctgaagaatgctgtggagatctatgcctgggcccccaagccctaccacaagttcatggccttcaagagctttgctgacctgcagcacaagcccctgctggtggacctgactgtggaggagggccagaggctgaaggtgatcttcggcagccacacaggcttccacgtgattgatgtggacagcggcaacagctatgacatctacatccccagccacatccagggcaacatcaccccccacgccatcgtcatcctgcccaagacagatggcatggagatgctggtgtgctatgaagatgaaggagtgtatgtgaacacctacggccgcatcaccaaggatgtggtgctgcagtggggcgagatgcccacctctgtggcctacatccacagcaaccagatcatgggctggggcgagaaggccatcgagatccgctctgtggagaccggccacctggatggagtcttcatgcacaagagggcccagaggctgaagttcctgtgtgaaagaaatgacaaggtgttctttgcctctgtgcgcagcggcggcagcagccaggtgttcttcatgaccctgaacagaaattccatgatgaactggtag

SEQ ID NO: 173471 - DNA, 3939 bp, synthetic construct
  misc_feature 1..3939: note = Description of Artificial Sequence: Synthetic coding sequence
  source 1..3939: mol_type = other DNA
atggccagtgacagccctgcccggagcctggatgaaattgacctgagcgccctgcgggaccctgctggcatctttgagctggtggagctggtgggcaatggcacctacggccaggtgtacaagggccgccacgtgaagacaggccagctggccgccatcaaggtgatggatgtgactggagatgaggaggaggagatcaagcaggagatcaacatgctgaagaagtacagccaccacaggaacatcgccacctactacggggccttcatcaagaagaaccccccaggcatggatgaccagctgtggctggtgatggagttctgtggggccggctctgtgacagacctgatcaagaacaccaagggcaacaccctgaaggaggagtggatcgcctacatctgccgggagatcctgcggggcctgagccacctgcaccagcacaaggtgatccaccgggacatcaagggccagaatgtgctgctgacagaaaatgctgaggtgaagatcgtggactttggagtgtctgcccagctggacagaacagtgggcagaagaaacaccttcatcggcaccccctactggatggcccctgaggtgattgcctgtgatgagaacccagatgccacctatgacttcaagagtgacctgtggagcctgggcatcacagccatcgagatggccgagggcgccccacccctgtgtgacatgcaccccatgagggccctcttcctgatccccagaaatcctgccccccggctgaagagcaagaagtggagcaagaagttccagagcttcatcgagagctgcctggtgaagaaccacagccagaggcctgccacagagcagctgatgaagcaccccttcatccgggaccagcccaatgaaaggcaggtgcgcatccagctgaaggaccacatcgacaggaccaagaagaagagaggagagaaggatgaaacagaatatgagtacagcggcagcgaggaggaggaggaggagaatgattctggagagcccagcagcatcctgaacctgcctggagagagcaccctgcggcgggacttcctgcggctgcagctggccaacaaggagaggtctgaggccctgcggcggcagcagctggagcagcagcagagagaaaatgaggagcacaagaggcagctgctggccgagcggcagaagagaattgaggagcagaaggagcagaggcggcggctggaggagcagcagaggcgggagaaggagctgaggaagcagcaggagcgggagcagaggaggcactatgaggagcagatgaggcgggaggaggagcggcggcgggcagagcacgagcaggagtacatccggcggcagctggaggaggagcagaggcagctggagatcctgcagcagcagctgctgcacgagcaggccctgctgctggagtacaagaggaagcagctggaggagcagaggcaggccgagcggctgcagaggcagctgaagcaggagcgggactacctggtgtccctgcagcaccagaggcaggagcagaggcctgtggagaagaagcccctgtaccactacaaggagggcatgagccccagcgagaagccagcctgggccaaggagatcccccacctggtggccgtgaagagccagggccctgccctgacagccagccagagcgtgcatgagcagcccaccaagggcctgagcggcttccaggaggccctgaatgtgaccagccaccgggtggagatgccccggcagaacagcgaccccaccagcgagaacccccccctgcccacccgcatcgagaagtttgacaggagctcctggctgcggcaggaggaggacatcccccccaaggtgccccagaggaccaccagcatcagccctgccctggccaggaagaacagccctggaaatggcagcgccctgggcccccggctgggcagccagcccatccgggccagcaacccagacctgcggaggacagagcccatcctggagagccccctgcagaggaccagcagcggcagcagcagcagcagcagcacccccagcagccagcccagcagccagggcggcagccagcccggcagccaggccggcagcagcgagaggaccagggtgcgggccaacagcaagtctgagggcagccctgtgctgccccatgagcccgccaaggtgaagccagaggagagccgggacatcacccggcccagcaggcctgctgtgtctgccttcctgagcaagagctttgagctgctgatctaccaggacctgacagccctggccaaggagctgcgggagctgcgcatcgaggagaccaaccggcccatgaagaaggtgacagactacagcagcagcagcgaggagagcgagagcagcgaggaggaggaggaggatggagagagcgagacccatgatggcaccgtggccgtgtctgacatccccaggctcatccccaccggggcccctggcagcaatgagcagtacaacgtgggcatggtgggcacccacggcctggagaccagccacgccgacagcttcagcggcagcatcagccgggagggcaccctgatgatccgggagaccagcggggagaagaagaggagcggccacagcgacagcaatggatttgctggccacatcaacctgcctgacctggtgcagcagagccacagccctgctggcacccccacagagggcctgggccgggtgtccacccacagccaggagatggattctggaacagaatatggcatgggcagcagcaccaaggccagcttcaccccatttgtggacccccgggtgtaccagaccagccccacagatgaagatgaggaggatgaggagagcagcgctgctgccctcttcaccagcgagctgctgcggcaggagcaggccaagctgaatgaggccaggaagatctctgtggtgaatgtgaaccccaccaacatccggccccacagcgacaccccagagatcaggaagtacaagaagcgcttcaacagcgagatcctgtgtgccgccctgtggggcgtgaacctgctggtgggcacagaaaatggcctgatgctgctggacaggagcggccagggcaaggtgtacaacctgatcaacagaagacgcttccagcagatggatgtgctggagggcctgaatgtgctggtgaccatcagcggcaagaagaacaagctgcgggtgtactacctgtcctggctgaggaaccgcatcctgcacaatgaccctgaggtggagaagaagcagggctggatcaccgtgggggacctggagggctgcatccactacaaggtggtgaagtatgaaagaatcaagttcctggtgattgccctgaagaatgctgtggagatctatgcctgggcccccaagccctaccacaagttcatggccttcaagagctttgctgacctgcagcacaagcccctgctggtggacctgactgtggaggagggccagaggctgaaggtgatcttcggcagccacacaggcttccacgtgattgatgtggacagcggcaacagctatgacatctacatccccagccacatccagggcaacatcacccctcatgccatcgtcatcctgcccaagacagatggcatggagatgctggtgtgctatgaagatgagggcgtgtatgtgaacacctacggccgcatcaccaaggatgtggtgctgcagtggggcgagatgcccacctctgtggcctacatccacagcaaccagatcatgggctggggcgagaaggccatcgagatccgctctgtggagaccggccacctggatggagtcttcatgcacaagagggcccagaggctgaagttcctgtgtgaaagaaatgacaaggtgttctttgcctctgtgcgcagcggcggcagcagccaggtgttcttcatgaccctgaacagaaacagcatgatgaactggtag

SEQ ID NO: 173472 - DNA, 1725 bp, synthetic construct
  misc_feature 1..1725: note = Description of Artificial Sequence: Synthetic coding sequence
  source 1..1725: mol_type = other DNA
atgccaccccagctgcaggagaccaggatgaacagaagcatccctgtggaggtggatgaaagtgagccctaccccagccagctgctgaagcccatccctgagtacagccctgaggaggagagcgagcccccagcccccaacatccggaacatggcccccaacagcctgagcgcccccaccatgctgcacaacagcagcggggacttcagccaggcccacagcaccctgaagctggccaaccaccagaggcctgtgtcccggcaggtgacctgcctgcggacccaggtgctggaggacagtgaagattccttctgccgccgccaccctggcctgggcaaggccttccccagcggctgcagcgctgtgtctgagcccgccagcgagagcgtggtgggcgccctgcctgctgagcaccagttctccttcatggagaagaggaaccagtggctggtgtcccagctgtctgctgccagcccagacaccggccatgacagcgacaagagtgaccagagcctgcccaatgccagcgctgacagcctgggcggcagccaggagatggtgcagaggccccagccccacaggaacagagctggcctggacctgcccaccatcgacaccggctatgacagccagccccaggatgtgctgggcatccggcagctggagcggcccctgcccctgacctctgtgtgctacccccaggacctgccccggcccctgcggagccgggagttcccccagtttgagccccagcgctacccagcctgtgcccagatgctgccccccaacctgagcccccacgccccctggaactaccactaccactgccccggcagcccagaccaccaggtgccctacggccatgactaccccagggctgcctaccagcaggtgatccagcctgccctgcccggccagcccctgcccggggcctctgtgcggggcctgcaccctgtgcagaaggtgatcctgaactaccccagcccctgggaccacgaggagaggcctgcccagagggactgcagcttccctggcctgcccaggcaccaggaccagccccaccaccagccccccaacagagctggggcccctggagagagcctggagtgcccagctgagctgcggccccaggtgccccagccccccagccctgctgctgtgccccggccccccagcaaccccccagcccggggcaccctgaagaccagcaacctgcctgaggagctgaggaaggtgttcatcacctacagcatggacacagccatggaggtggtgaagtttgtgaacttcctgctggtgaatggcttccagacagccatcgacatctttgaggaccgcatccggggcatcgacatcatcaagtggatggagcgctacctgcgggacaagacagtgatgatcatcgtggccatcagccccaagtacaagcaggatgtggagggcgctgagagccagctggatgaagatgaacatggcctgcacaccaagtacatccacaggatgatgcagatcgagttcatcaagcagggctccatgaacttccgcttcatccctgtgctcttccccaatgccaagaaggagcacgtgcccacctggctgcagaacacccacgtgtacagctggcccaagaacaagaagaacatcctgctgcggctgctgcgggaggaggagtatgtggccccaccccggggccccctgcccaccctgcaggtggtgcccctgtag

SEQ ID NO: 173473 - DNA, 1695 bp, synthetic construct
  misc_feature 1..1695: note = Description of Artificial Sequence: Synthetic coding sequence
  source 1..1695: mol_type = other DNA
atgaacagaagcatccctgtggaggtggatgagagcgagccctaccccagccagctgctgaagcccatccctgagtacagccctgaggaggagagcgagcccccagcccccaacatccggaacatggcccccaacagcctgagcgcccccaccatgctgcacaacagcagcggggacttcagccaggcccacagcaccctgaagctggccaaccaccagaggcctgtgtcccggcaggtgacctgcctgcggacccaggtgctggaggacagcgaggacagcttctgcagaagacaccctggcctgggcaaggccttccccagcggctgcagcgctgtgtctgagcccgccagcgagagcgtggtgggcgccctgcctgctgagcaccagttctccttcatggagaagaggaaccagtggctggtgtcccagctgtctgctgccagcccagacaccggccatgacagcgacaagagtgaccagagcctgcccaatgccagcgctgacagcctgggcggcagccaggagatggtgcagaggccccagccccacaggaacagagctggcctggacctgcccaccatcgacaccggctatgacagccagccccaggatgtgctgggcatccggcagctggagcggcccctgcccctgacctctgtgtgctacccccaggacctgccccggcccctgcggagccgggagttcccccagtttgagccccagcgctacccagcctgtgcccagatgctgccccccaacctgagcccccacgccccctggaactaccactaccactgccccggcagcccagaccaccaggtgccctacggccatgactacccccgggccgcctaccagcaggtgatccagcctgccctgcccggccagcccctgcccggggcctctgtgcggggcctgcaccctgtgcagaaggtgatcctgaactaccccagcccctgggaccacgaggagaggcctgcccagagggactgcagcttccctggcctgcccaggcaccaggaccagccccaccaccagccccccaacagagctggggcccctggagagagcctggagtgcccagctgagctgcggccccaggtgccccagccccccagccctgctgctgtgcccaggcctcccagcaaccccccagcccggggcaccctgaagaccagcaacctgcctgaggagctgaggaaggtgttcatcacctacagcatggacacagccatggaggtggtgaagtttgtgaacttcctgctggtgaatggcttccagacagccatcgacatctttgaagatcgcatccggggcatcgacatcatcaagtggatggagcgctacctgcgggacacagtgatgatcatcgtggccatcagccccaagtacaagcaggatgtggagggcgctgagagccagctggatgaagatgaacatggcctgcacaccaagtacatccacaggatgatgcagatcgagttcatcaagcagggctccatgaacttccgcttcatccctgtgctcttccccaatgccaagaaggagcacgtgcccacctggctgcagaacacccacgtgtacagctggcccaagaacaagaagaacatcctgctgcggctgctgcgggaggaggagtatgtggccccaccccggggccccctgcccaccctgcaggtggtgcccctgtag

SEQ ID NO: 173474 - DNA, 1698 bp, synthetic construct
  misc_feature 1..1698: note = Description of Artificial Sequence: Synthetic coding sequence
  source 1..1698: mol_type = other DNA
atgaacagaagcatccctgtggaggtggatgagagcgagccctaccccagccagctgctgaagcccatccctgagtacagccctgaggaggagagcgagcccccagcccccaacatccggaacatggcccccaacagcctgagcgcccccaccatgctgcacaacagcagcggggacttcagccaggcccacagcaccctgaagctggccaaccaccagaggcctgtgtcccggcaggtgacctgcctgcggacccaggtgctggaggacagcgaggacagcttctgcagaagacaccctggcctgggcaaggccttccccagcggctgcagcgctgtgtctgagcccgccagcgagagcgtggtgggcgccctgcctgctgagcaccagttctccttcatggagaagaggaaccagtggctggtgtcccagctgtctgctgccagcccagacaccggccatgacagcgacaagagtgaccagagcctgcccaatgccagcgctgacagcctgggcggcagccaggagatggtgcagaggccccagccccacaggaacagagctggcctggacctgcccaccatcgacaccggctatgacagccagccccaggatgtgctgggcatccggcagctggagcggcccctgcccctgacctctgtgtgctacccccaggacctgccccggcccctgcggagccgggagttcccccagtttgagccccagcgctacccagcctgtgcccagatgctgccccccaacctgagcccccacgccccctggaactaccactaccactgccccggcagcccagaccaccaggtgccctacggccatgactacccccgggccgcctaccagcaggtgatccagcctgccctgcccggccagcccctgcccggggcctctgtgcggggcctgcaccctgtgcagaaggtgatcctgaactaccccagcccctgggaccacgaggagaggcctgcccagagggactgcagcttccctggcctgcccaggcaccaggaccagccccaccaccagccccccaacagagctggggcccctggagagagcctggagtgcccagctgagctgcggccccaggtgccccagccccccagccctgctgctgtgcccaggcctcccagcaaccccccagcccggggcaccctgaagaccagcaacctgcctgaggagctgaggaaggtgttcatcacctacagcatggacacagccatggaggtggtgaagtttgtgaacttcctgctggtgaatggcttccagacagccatcgacatctttgaagatcgcatccggggcatcgacatcatcaagtggatggagcgctacctgcgggacaagacagtgatgatcatcgtggccatcagccccaagtacaagcaggatgtggagggcgctgagagccagctggatgaagatgagcacggcctgcacaccaagtacatccacaggatgatgcagatcgagttcatcaagcagggctccatgaacttccgcttcatccctgtgctcttccccaatgccaagaaggagcacgtgcccacctggctgcagaacacccacgtgtacagctggcccaagaacaagaagaacatcctgctgcggctgctgcgggaggaggagtatgtggccccaccccggggccccctgcccaccctgcaggtggtgcccctgtag

SEQ ID NO: 173475 - DNA, 1725 bp, synthetic construct
  misc_feature 1..1725: note = Description of Artificial Sequence: Synthetic coding sequence
  source 1..1725: mol_type = other DNA
atggccccccagctggaggagaccaggatgaacagaagcatccctgtggaggtggatgaaagtgagccctaccccagccagctgctgaagcccatccctgagtacagccctgaggaggagagcgagcccccagcccccaacatccggaacatggcccccaacagcctgagcgcccccaccatgctgcacaacagcagcggggacttcagccaggcccacagcaccctgaagctggccaaccaccagaggcctgtgtcccggcaggtgacctgcctgcggacccaggtgctggaggacagtgaagattccttctgccgccgccaccctggcctgggcaaggccttccccagcggctgcagcgctgtgtctgagcccgccagcgagagcgtggtgggcgccctgcctgctgagcaccagttctccttcatggagaagaggaaccagtggctggtgtcccagctgtctgctgccagcccagacaccggccatgacagcgacaagagtgaccagagcctgcccaatgccagcgctgacagcctgggcggcagccaggagatggtgcagaggccccagccccacaggaacagagctggcctggacctgcccaccatcgacaccggctatgacagccagccccaggatgtgctgggcatccggcagctggagcggcccctgcccctgacctctgtgtgctacccccaggacctgccccggcccctgcggagccgggagttcccccagtttgagccccagcgctacccagcctgtgcccagatgctgccccccaacctgagcccccacgccccctggaactaccactaccactgccccggcagcccagaccaccaggtgccctacggccatgactaccccagggctgcctaccagcaggtgatccagcctgccctgcccggccagcccctgcccggggcctctgtgcggggcctgcaccctgtgcagaaggtgatcctgaactaccccagcccctgggaccacgaggagaggcctgcccagagggactgcagcttccctggcctgcccaggcaccaggaccagccccaccaccagccccccaacagagctggggcccctggagagagcctggagtgcccagctgagctgcggccccaggtgccccagccccccagccctgctgctgtgccccggccccccagcaaccccccagcccggggcaccctgaagaccagcaacctgcctgaggagctgaggaaggtgttcatcacctacagcatggacacagccatggaggtggtgaagtttgtgaacttcctgctggtgaatggcttccagacagccatcgacatctttgaggaccgcatccggggcatcgacatcatcaagtggatggagcgctacctgcgggacaagacagtgatgatcatcgtggccatcagccccaagtacaagcaggatgtggagggcgctgagagccagctggatgaagatgaacatggcctgcacaccaagtacatccacaggatgatgcagatcgagttcatcaagcagggctccatgaacttccgcttcatccctgtgctcttccccaatgccaagaaggagcacgtgcccacctggctgcagaacacccacgtgtacagctggcccaagaacaagaagaacatcctgctgcggctgctgcgggaggaggagtatgtggccccaccccggggccccctgcccaccctgcaggtggtgcccctgtag

SEQ ID NO: 173476 - DNA, 462 bp, synthetic construct
  misc_feature 1..462: note = Description of Artificial Sequence: Synthetic coding sequence
  source 1..462: mol_type = other DNA
atggaggtggtgaagtttgtgaacttcctgctggtgaatggcttccagacagccatcgacatctttgaagatcgcatccggggcatcgacatcatcaagtggatggagcgctacctgcgggacaagacagtgatgatcatcgtggccatcagccccaagtacaagcaggatgtggagggcgctgagagccagctggatgaagatgagcacggcctgcacaccaagtacatccacaggatgatgcagatcgagttcatcaagcagggctccatgaacttccgcttcatccctgtgctcttccccaatgccaagaaggagcacgtgcccacctggctgcagaacacccacgtgtacagctggcccaagaacaagaagaacatcctgctgcggctgctgcgggaggaggagtatgtggccccaccccggggccccctgcccaccctgcaggtggtgcccctgtag

SEQ ID NO: 173477 - DNA, 330 bp, synthetic construct
  misc_feature 1..330: note = Description of Artificial Sequence: Synthetic coding sequence
  source 1..330: mol_type = other DNA
atgatcatcgtggccatcagccccaagtacaagcaggatgtggagggcgctgagagccagctggatgaagatgagcacggcctgcacaccaagtacatccacaggatgatgcagatcgagttcatcaagcagggctccatgaacttccgcttcatccctgtgctcttccccaatgccaagaaggagcacgtgcccacctggctgcagaacacccacgtgtacagctggcccaagaacaagaagaacatcctgctgcggctgctgcgggaggaggagtatgtggccccaccccggggccccctgcccaccctgcaggtggtgcccctgtag

SEQ ID NO: 173478 - DNA, 1596 bp, synthetic construct
  misc_feature 1..1596: note = Description of Artificial Sequence: Synthetic coding sequence
  source 1..1596: mol_type = other DNA
atgatcagcccagacccccggcccagccctggcctggcccgctgggccgagagctatgaggccaagtgtgaaagacggcaggagatccgggagagccgccgctgccggcccaacgtgaccacctgccggcaggtgggcaagaccctgcgcatccagcagcgggagcagctgcagagggcccggctgcagcagttcttcagaagaagaaacctggagctggaggagaagggcaaggcccagcacccccaggcccgggagcagggccccagcagaagacctggccaggtgacaggcaccagcagcgaggtgtttcctgcccagcaccccccacccagcggcatctgccgggacctgagtgaccacctgagcagccaggccggcggcctgcccccccaggacacccccatcaagaagccacccaagcaccaccggggcacccagaccaaggccgagggccccaccatcaagaatgatgccagccagcagaccaactatggagtggccgtgctggacaaggagatcatccagctgagtgactacctgaaggaggccctgcagcgggagctggtgctgaagcagaagatggtgatcctgcaggacctgctgagcaccctcatccaggccagtgacagctcctggaagggccagctgaatgaagacaagctgaagggcaagctgcggagcctggagaaccagctgtacacctgcacccagaagtacagcccctggggcatgaagaaggtgctgctggagatggaggaccagaagaacagctatgagcagaaggccaaggagagcctgcagaaggtgctggaggagaagatgaatgctgagcagcagctgcagagcacccagaggagcctggccctggccgagcagaagtgtgaggagtggaggagccagtatgaggccctgaaggaggactggaggaccctgggcacccagcaccgggagctggagagccagctgcacgtgctgcagagcaagctgcagggcgctgacagccgggacctgcagatgaaccaggccctgcgcttcctggagaatgagcaccagcagctgcaggccaagattgaatgtctgcagggcgaccgggacctgtgcagcctggacacccaggacctgcaggaccagctgaagaggtctgaggccgagaagctgaccctggtgaccagggtgcagcagctgcagggcctgctgcagaaccagagcctgcagctgcaggagcaggagaagctgctgaccaagaaggaccaggccctgcctgtgtggagccccaagagcttccccaatgaggtggagcctgagggcaccgggaaggagaaggactgggacctgcgggaccagctgcagaagaagaccctgcagctgcaggccaaggagaaggaatgtcgggagctgcacagcgagctggacaacctgagtgatgagtacctgagctgcctgaggaagctgcagcactgccgggaggagctgaaccagagccagcagctgcccccccggcggcagtgtggccgctggctgcctgtgctgatggtggtgattgctgctgccctggccgtgttcctggccaacaaggacaacctgatgatctag

SEQ ID NO: 173479 - DNA, 549 bp, synthetic construct
  misc_feature 1..549: note = Description of Artificial Sequence: Synthetic coding sequence
  source 1..549: mol_type = other DNA
atgaagaaggtgctgctggagatggaggaccagaagaacagctatgagcagaaggccaaggagagcctgcagaaggtgctggaggagaagatgaatgctgagcagcagctgcagagcacccagaggagcctggccctggccgagcagaagtgtgaggagtggaggagccagtatgaggccctgaaggaggactggaggaccctgggcacccagcaccgggagctggagagccagctgcacgtgctgcagagcaagctgcagggcgctgacagccgggacctgcagatgaaccaggccctgcgcttcctggagaatgagcaccagcagctgcaggccaagattgaatgtctgcagggcgaccgggacctgtgcagcctggacacccaggacctgcaggaccagctgaagaggtctgaggccgagaagctgaccctggtgaccagggtgcagcagctgcagggcctgctgcagaaccagagcctgcagctgcaggagcaggagaagctgctgaccaagaagggccagcagatctactaccacaagttctag

SEQ ID NO: 173480 - DNA, 1656 bp, synthetic construct
  misc_feature 1..1656: note = Description of Artificial Sequence: Synthetic coding sequence
  source 1..1656: mol_type = other DNA
atgatcagcccagacccccggcccagccctggcctggcccgctgggccgagagctatgaggccaagtgtgaaagacggcaggagatccgggagagccgccgctgccggcccaacgtgaccacctgccggcaggtgggcaagaccctgcgcatccagcagcgggagcagctgcagagggcccggctgcagcagttcttcagaagaagaaacctggagctggaggagaagggcaaggcccagcacccccaggcccgggagcagggccccagcagaagacctggccaggtgacagtgctgaaggagcccctgagctgtgcccggcgcatcagcagcccccgggagcaggtgacaggcaccagcagcgaggtgtttcctgcccagcaccccccacccagcggcatctgccgggacctgagtgaccacctgagcagccaggccggcggcctgcccccccaggacacccccatcaagaagccacccaagcaccaccggggcacccagaccaaggccgagggccccaccatcaagaatgatgccagccagcagaccaactatggagtggccgtgctggacaaggagatcatccagctgagtgactacctgaaggaggccctgcagcgggagctggtgctgaagcagaagatggtgatcctgcaggacctgctgagcaccctcatccaggccagtgacagctcctggaagggccagctgaatgaagacaagctgaagggcaagctgcggagcctggagaaccagctgtacacctgcacccagaagtacagcccctggggcatgaagaaggtgctgctggagatggaggaccagaagaacagctatgagcagaaggccaaggagagcctgcagaaggtgctggaggagaagatgaatgctgagcagcagctgcagagcacccagaggagcctggccctggccgagcagaagtgtgaggagtggaggagccagtatgaggccctgaaggaggactggaggaccctgggcacccagcaccgggagctggagagccagctgcacgtgctgcagagcaagctgcagggcgctgacagccgggacctgcagatgaaccaggccctgcgcttcctggagaatgagcaccagcagctgcaggccaagattgaatgtctgcagggcgaccgggacctgtgcagcctggacacccaggacctgcaggaccagctgaagaggtctgaggccgagaagctgaccctggtgaccagggtgcagcagctgcagggcctgctgcagaaccagagcctgcagctgcaggagcaggagaagctgctgaccaagaaggaccaggccctgcctgtgtggagccccaagagcttccccaatgaggtggagcctgagggcaccgggaaggagaaggactgggacctgcgggaccagctgcagaagaagaccctgcagctgcaggccaaggagaaggaatgtcgggagctgcacagcgagctggacaacctgagtgatgagtacctgagctgcctgaggaagctgcagcactgccgggaggagctgaaccagagccagcagctgcccccccggcggcagtgtggccgctggctgcctgtgctgatggtggtgattgctgctgccctggccgtgttcctggccaacaaggacaacctgatgatctag

SEQ ID NO: 173481 - DNA, 1656 bp, synthetic construct; identical to SEQ ID NO: 173480
  misc_feature 1..1656: note = Description of Artificial Sequence: Synthetic coding sequence
  source 1..1656: mol_type = other DNA

SEQ ID NO: 173482 - DNA, 1596 bp, synthetic construct; identical to SEQ ID NO: 173478
  misc_feature 1..1596: note = Description of Artificial Sequence: Synthetic coding sequence
  source 1..1596: mol_type = other DNA

SEQ ID NO: 173483 - DNA, 1215 bp, synthetic construct
  misc_feature 1..1215: note = Description of Artificial Sequence: Synthetic coding sequence
  source 1..1215: mol_type = other DNA
atgatcagcccagacccccggcccagccctggcctggcccgctgggccgagagctatgaggccaagtgtgaaagacggcaggagatccgggagagccgccgctgccggcccaacgtgaccacctgccggcaggtgggcaagaccctgcgcatccagcagcgggagcagctgcagagggcccggctgcagcagttcttcagaagaagaaacctggagctggaggagaagggcaaggcccagcacccccaggcccgggagcagggccccagcagaagacctggccaggtgacaggcaccagcagcgaggtgtttcctgcccagcaccccccacccagcggcatctgccgggacctgagtgaccacctgagcagccaggccggcggcctgcccccccaggacacccccatcaagaagccacccaagcaccaccggggcacccagaccaaggccgagggccccaccatcaagaatgatgccagccagcagaccaactatggagtggccgtgctggacaaggagatcatccagctgagtgactacctgaaggaggccctgcagcgggagctggtgctgaagcagaagatggtgatcctgcaggacctgctgagcaccctcatccaggccagtgacagctcctggaagggccagctgaatgaagacaagctgaagggcaagctgcggagcctggagaaccagctgtacacctgcacccagaagtacagcccctggggcatgaagaaggtgctgctggagatggaggaccagaagaacagctatgagcagaaggccaaggagagcctgcagaaggtgctggaggagaagatgaatgctgagcagcagctgcagagcacccagaggagcctggccctggccgagcagaagtgtgaggagtggaggagccagtatgaggccctgaaggaggactggaggaccctgggcacccagcaccgggagctggagagccagctgcacgtgctgcagagcaagctgcagggcgctgacagccgggacctgcagatgaaccaggccctgcgcttcctggagaatgagcaccagcagctgcaggccaagattgaatgtctgcagggcgaccgggacctgtgcagcctggacacccaggacctgcaggaccagctgaagaggtctgaggccgagaagctgaccctggtgaccagggtgcagcagctgcaggaggccgccggctggaccacctag

SEQ ID NO: 173484 - DNA, 963 bp, synthetic construct
  misc_feature 1..963: note = Description of Artificial Sequence: Synthetic coding sequence
  source 1..963: mol_type = other DNA
atgatcagcccagacccccggcccagccctggcctggcccgctgggccgagagctatgaggccaagtgtgaaagacggcaggagatccgggagagccgccgctgccggcccaacgtgaccacctgccggcaggtgggcaagaccctgcgcatccagcagcgggagctggaggagaagggcaaggcccagcacccccaggcccgggagcagggccccagccggcggcccggccaggtgacagtgctgaaggagcccctgagctgtgcccggcgcatcagcagcccccgggagcaggtgacaggcaccagcagcgaggtgtttcctgcccagcaccccccaccttctggcatctgccgggacctgagtgaccacctgagcagccaggccggcggcctgcccccccaggacacccccatcaagaagccacccaagcaccaccggggcacccagaccaaggccgagggccccaccatcaagaatgatgccagccagcagaccaactacggcgtggccgtgctggacaaggagatcatccagctgagtgactacctgaaggaggccctgcagcgggagctggtgctgaagcagaagatggtgatcctgcaggacctgctgagcaccctcatccaggccagtgacagctcctggaagggccagctgaatgaagacaagctgaagggcaagctgcggagcctggagaaccagctgtacacctgcacccagaagtacagcccctggggcatgaagaaggtgctgctggagatggaggaccagaagaacagctatgagcagaaggccaaggagagcctgcagaaggtgctggaggagaagatgaatgctgagcagcagctgcagagcacccaggtgtggggctgccacatcgacatgggcctgggcaccccaggcagcctgggcaacaagggcagccagctgcacaacagcctggagcccagccccctgtag

SEQ ID NO: 173485 - DNA, 81 bp, synthetic construct
  misc_feature 1..81: note = Description of Artificial Sequence: Synthetic coding sequence
  source 1..81: mol_type = other DNA
atgatcagcccagacccccggcccagccctggcctggcccgctgggccgagagctatgaggccaagtgtgaaagaagatag

SEQ ID NO: 173486 - DNA, 1671 bp, synthetic construct
  misc_feature 1..1671: note = Description of Artificial Sequence: Synthetic coding sequence
  source 1..1671: mol_type = other DNA
atgcagaagttcattgaagctgactactatgagctggactggtactatgaggagtgcagtgatgtgctgtgtgccgagcgggtgggccagatgaccaagacctacaatgacattgatgctgtgacccggctgctggaggagaaggagcgggacctggagctggccgcccgcatcggccagagcctgctgaagaagaacaagaccctgacagaaagaaatgagctgctggaggagcaggtggagcacatccgggaggaggtgtcccagctgcggcatgagctgtccatgaaggatgagctgctgcagttctacaccagcgctgctgaggagagcgagcctgagagcgtgtgcagcacccccctgaagagaaatgaaagcagcagctctgtgcagaactacttccacctggacagcctgcagaagaagctgaaggacctggaggaggagaatgtggtgctgcggtctgaggccagccagctgaagacagagaccatcacctatgaggagaaggagcagcagctggtgaatgactgtgtgaaggagctgagagatgccaacgtgcagatcgccagcatcagcgaggagctggccaagaagacagaagatgctgcccggcagcaggaggagatcacccacctgctgagccagatcgtggacctgcagaagaaggccaaggcctgtgctgtggagaatgaggagctggtgcagcacctgggcgccgccaaggatgcccagaggcagctgacagctgagctgcgggagctggaggacaagtatgcagagtgcatggagatgctgcacgaggcccaggaggagctgaagaacctgaggaacaagaccatgcccaacaccaccagccgccgctaccacagcctgggcctcttccccatggacagcctggccgctgagattgagggcaccatgaggaaggagctgcagctggaggaggccgagagcccagacatcacccaccagaagagggtgtttgaaacagtgaggaacatcaaccaggtggtgaagcagaggagcctgacccccagccccatgaacatccctggcagcaaccagagcagcgccatgaacagcctgctgagcagctgtgtgtccacccccaggagcagcttctacggcagtgacattggaaatgtggtgctggacaacaagaccaacagcatcatcctggagacagaggccgctgacctgggcaatgatgagaggagcaagaagccaggcaccccaggcaccccaggcagccatgacctggagacagccctgcggcggctgagcctgcggcgggagaactacctgtctgaaagacgcttctttgaggaggagcaggagaggaagctgcaggagctggccgagaagggggagctgcggagcggcagcctgacccccacagagagcatcatgagcctgggcacccacagccgcttcagcgagttcaccggcttcagcggcatgtccttcagcagccgcagctacctgcctgagaagctgcagatcgtgaagcccctggagggggaccatgctggcccccggcccctgtctgtgctgctgggggacagcctgtggagcctcatccacctgaggaaggccggccacctgtgccacgcctacagcttcttcttccgggacagccacccccgctgctggtttgagttcctgtag

SEQ ID NO: 173487 - DNA, 438 bp, synthetic construct
  misc_feature 1..438: note = Description of Artificial Sequence: Synthetic coding sequence
  source 1..438: mol_type = other DNA
atgacagtgcacaacctgtacctgtttgacagaaatggagtgtgcctgcactacagcgagtggcacaggaagaagcaggccggcatccccaaggaggaggagtacaagctgatgtatggcatgctgttcagcatccgcagctttgtgtccaagatgagccccctggacatgaaggatggcttcctggccttccagaccagccgctacaagctgcactactatgagacccccaccggcatcaaggtggtgatgaacacagacctgggcgtgggccccatcagagatgtgctgcaccacatctacagcgccctgtatgtggagctggtggtgaagaaccccctgtgccccctgggccagacagtgcagagcgagctgttccgcagccggctggacagctatgtgcgcagcctgcccttcttcagcgcccgggccggctag

SEQ ID NO: 173488 - DNA, 438 bp, synthetic construct; identical to SEQ ID NO: 173487
  misc_feature 1..438: note = Description of Artificial Sequence: Synthetic coding sequence
  source 1..438: mol_type = other DNA

SEQ ID NO: 173489 - DNA, 3402 bp, synthetic construct
  misc_feature 1..3402: note = Description of Artificial Sequence: Synthetic coding sequence
  source 1..3402: mol_type = other DNA
atgagccccacccagtgggacttccctgtggagctgtgctgccggcccatggcctttgtgaccctgaccggcctggatgtggtgtacaatgctgtgcacagagctgtgtgggatgccttctgtgccaacagaagagctgacagagtgcccatctccttcaaggtgctgcccggggaccacgagtaccccaagtgccggcccaagaggaccagctatgagtggtacatccccaagggcatcctgaagacaggctggatgaacaagcacctgaacctggtgcctgccctggtggtggtgttctatgagctggactgggatgagccccagtggaaggagaagcagagtgaatgtgccaccagggtggagatcgtgcggcagagcctgcagggcaggaacaccaaggtggccgtggtgctgatccagaagaagacccccctgcccccaggagaagatgtgattgccagcgagagagctgctgccctgtgcaatgcctgtgagctgagcggcaagagcctgtttgtgctgccccacacagaccacctggtgggctacatcatccggctggagaatgccttctatgaacatgcccagacctactactacacagagatcagaagagtgaagagccacaaggagttcctgaacaagaccacccaccagctgctgtttgtgcgccaccagttcaagatcgccttcttcagcgagctgaagcaggacacccagaatgccctgaagaactacagaacagcctacaacctggtgcatgagctgcgggcccacgagaccaacatcctggagatcaagaccatggccggcttcatcaactacaagatctgccgcctgtgcttccagcacaacacccccctggatgccatcgcccagttcaggaagcacatcgacctgtgcaagaagaagattggcagcgctgagctgagctttgaacatgatgcctggatgagcaagcagttccaggccttcggggacctgtttgatgaggccatcaagctgggcctgacagccatccagacccagaaccctggcttctactaccagcaggccgcctactatgcccaggagaggaagcagctggccaagaccctgtgcaaccacgaggcctctgtgatgtaccccaacccagaccccctggagacccagacaggagtgctggacttctacggccagaggtcctggaggcagggcatcctgagctttgacctgagtgaccctgagaaggagaaggtgggcatcctggccatccagctgaaggagagaaatgtggtgcacagcgagatcatcatcaccctgctgagcaatgctgtggcccagttcaagaagtacaagtgccccaggatgaagagccacctgatggtgcagatgggagaggagtactactatgccaaggactacaccaaggccctgaagctgctggactatgtgatgtgtgactacagaagtgagggctggtggaccctgctgacctctgtgctgaccacagccctgaagtgcagctacctgatggcccagctgaaggactacatcacctacagcctggagctgctgggccgggccagcaccctgaaggatgaccagaagagccgcatcgagaagaacctgatcaacgtgctgatgaatgaatctccagaccctgagccagactgtgacatcctggccgtgaagacagcccagaagctgtgggccgaccgcatcagcctggccggcagcaacatcttcaccatcggcgtgcaggactttgtgccctttgtgcagtgcaaggccaagttccacgcccccagcttccacgtggatgtgcctgtgcagtttgacatctacctgaaggctgactgcccccaccccatccgcttcagcaagctgtgtgtgtccttcaacaaccaggagtacaaccagttctgtgtgattgaggaggccagcaaggccaatgaggtgctggagaacctgacccagggcaagatgtgcctggtgcctgggaagaccaggaagctgctcttcaagtttgtggccaagacagaagatgtgggcaagaagattgagatcacctctgtggacctggccctgggcaatgaaacaggccgctgtgtggtgctgaactggcagggcggcggcggagatgctgccagcagccaggaggccctgcaggccgcccggagcttcaagagaagacccaagctgcctgacaatgaggtgcactgggacagcatcatcatccaggccagcaccatgatcatcagccgggtgcccaacatctctgtgcacctgctgcacgagcccccagccctgaccaatgagatgtactgcctggtggtgacagtgcagagccatgagaagacccagatcagagatgtgaagctgacagctggcctgaagccaggccaggatgccaacctgacccagaagacccacgtgaccctgcacggcacagagctgtgtgatgagagctacccagccctgctgacagacatccctgtgggggacctgcaccctggagagcagctggagaagatgctgtatgtgcgctgtggcaccgtgggcagcaggatgttcctggtgtatgtgtcctacctgatcaacaccaccgtggaggagaaggagatcgtgtgcaagtgccacaaggatgaaacagtgaccatcgagaccgtcttcccctttgatgtggccgtgaagtttgtgtccaccaagtttgagcacctggagcgggtgtatgctgacatccccttcctgctgatgacagacctgctgagcgccagcccctgggccctgaccatcgtgagcagcgagctgcagctggcccccagcatgaccaccgtggaccagctggagagccaggtggacaacgtcatcctgcagacaggagagagcgccagcgagtgcttctgcctgcagtgccccagcctgggcaacattgaaggaggagtggccaccggccactacatcatctcctggaagaggaccagcgccatggagaacatccccatcatcaccaccgtcatcaccctgccccacgtgattgtggagaacatccccctgcacgtgaatgctgacctgcccagctttggccgggtgcgggagagcctgcctgtgaagtaccacctgcagaacaagacagacctggtgcaggatgtggagatctctgtggagcccagtgatgccttcatgttttctggcctgaagcagatccggctgcgcatcctgcccggcacagagcaggagatgctgtacaacttctaccccctgatggccggctaccagcagctgcccagcctgaacatcaacctgctgcgcttccccaacttcaccaaccagctgctgcggcgcttcatccccaccagcatctttgtgaagccccagggccgcctgatggatgacaccagcattgctgctgcctag

SEQ ID NO: 173490 - DNA, 3261 bp, synthetic construct
  misc_feature 1..3261: note = Description of Artificial Sequence: Synthetic coding sequence
  source 1..3261: mol_type = other DNA
atgagccccacccagtgggacttccctgtggagctgtgctgccggcccatggcctttgtgaccctgaccggcctggatgtggtgtacaatgctgtgcacagagctgtgtgggatgccttctgtgccaacagaagagctgacagagtgcccatctccttcaaggtgctgcccggggaccacgagtaccccaagtgccggcccaagaggaccagctatgagtggtacatccccaagggcatcctgaagacaggctggatgaacaagcacctgaacctggtgcctgccctggtggtggtgttctatgagctggactgggatgagccccagtggaaggagaagcagagtgaatgtgccaccagggtggagatcgtgcggcagagcctgcagggcaggaacaccaaggtggccgtggtgctgatccagaagaagacccccctgcccccaggagaagatgtgattgccagcgagagagctgctgccctgtgcaatgcctgtgagctgagcggcaagagcctgtttgtgctgccccacacagaccacctggtgggctacatcatccggctggagaatgccttctatgaacatgcccagacctactactacacagagatcagaagagtgaagagccacaaggagttcctgaacaagaccacccaccagctgctgtttgtgcgccaccagttcaagatcgccttcttcagcgagctgaagcaggacacccagaatgccctgaagaactacagaacagcctacaacctggtgcatgagctgcgggcccacgagaccaacatcctggagatcaagaccatggccggcttcatcaactacaagatctgccgcctgtgcttccagcacaacacccccctggatgccatcgcccagttcaggaagcacatcgacctgtgcaagaagaagattggcagcgctgagctgagctttgaacatgatgcctggatgagcaagcagttccaggccttcggggacctgtttgatgaggccatcaagctgggcctgacagccatccagacccagaaccctggcttctactaccagcaggccgcctactatgcccaggagaggaagcagctggccaagaccctgtgcaaccacgaggcctctgtgatgtaccccaacccagaccccctggagacccagacaggagtgctggacttctacggccagaggtcctggaggcagggcatcctgagctttgacctgagtgaccctgagaaggagaaggtgggcatcctggccatccagctgaaggagagaaatgtggtgcacagcgagatcatcatcaccctgctgagcaatgctgtggcccagttcaagaagtacaagtgccccaggatgaagagccacctgatggtgcagatgggagaggagtactactatgccaaggactacaccaaggccctgaagctgctggactatgtgatgtgtgactacagaagtgagggctggtggaccctgctgacctctgtgctgaccacagccctgaagtgcagctacctgatggcccagctgaaggactacatcacctacagcctggagctgctgggccgggccagcaccctgaaggatgaccagaagagccgcatcgagaagaacctgatcaacgtgctgatgaatgaatctccagaccctgagccagactgtgacatcctggccgtgaagacagcccagaagctgtgggccgaccgcatcagcctggccggcagcaacatcttcaccatcggcgtgcaggactttgtgccctttgtgcagtgcaaggccaagttccacgcccccagcttccacgtggatgtgcctgtgcagtttgacatctacctgaaggctgactgcccccaccccatccgcttcagcaagctgtgtgtgtccttcaacaaccaggagtacaaccagttctgtgtgattgaggaggccagcaaggccaatgaggtgctggagaacctgacccagggcaagatgtgcctggtgcctgggaagaccaggaagctgctcttcaagtttgtggccaagacagaagatgtgggcaagaagattgagatcacctctgtggacctggccctgggcaatgaaacaggccgctgtgtggtgctgaactggcagggcggcggcggagatgctgccagcagccaggaggccctgcaggccgcccggagcttcaagagaagacccaagctgcctgacaatgaggtgcactgggacagcatcatcatccaggccagcaccatgatcatcagccgggtgcccaacatctctgtgcacctgctgcacgagcccccagccctgaccaatgagatgtactgcctggtggtgacagtgcagagccatgagaagacccagatcagagatgtgaagctgacagctggcctgaagccaggccaggatgccaacctgacccagaagacccacgtgaccctgcacggcacagagctgtgtgatgagagctacccagccctgctgacagacatccctgtgggggacctgcaccctggagagcagctggagaagatgctgtatgtgcgctgtggcaccgtgggcagcaggatgttcctggtgtatgtgtcctacctgatcaacaccaccgtggaggagaaggagatcgtgtgcaagtgccacaaggatgaaacagtgaccatcgagaccgtcttcccctttgatgtggccgtgaagtttgtgtccaccaagtttgagcacctggagcgggtgtatgctgacatccccttcctgctgatgacagacctgctgagcgccagcccctgggccctgaccatcgtgagcagcgagctgcagctggcccccagcatgaccaccgtggaccagctggagagccaggtggacaacgtcatcctgcagacaggagagagcgccagcgagtgcttctgcctgcagtgccccagcctgggcaacattgaaggaggagtggccaccggccactacatcatctcctggaagaggaccagcgccatggagaacatccccatcatcaccaccgtcatcaccctgccccacgtgattgtggagaacatccccctgcacgtgaatgctgacctgcccagctttggccgggtgcgggagagcctgcctgtgaagtaccacctgcagaacaagacagacctggtgcaggatgtggagatctctgtggagcccagtgatgccttcatgttttctggcctgaagcagatccggctgcctgcccaggccttctacacctaccagtacttctgccaggccaccggcagcacccatggatag

SEQ ID NO: 173491 - DNA, 3057 bp, synthetic construct
  misc_feature 1..3057: note = Description of Artificial Sequence: Synthetic coding sequence
  source 1..3057: mol_type = other DNA
atgagccccacccagtgggacttccctgtggagctgtgctgccggcccatggcctttgtgaccctgaccggcctggatgtggtgtacaatgctgtgcacagagctgtgtgggatgccttctgtgccaacagaagagctgacagagtgcccatctccttcaaggtgctgcccggggaccacgagtaccccaagtgccggcccaagaggaccagctatgagtggtacatccccaagggcatcctgaagacaggctggatgaacaagcacctgaacctggtgcctgccctggtggtggtgttctatgagctggactgggatgagccccagtggaaggagaagcagagtgaatgtgccaccagggtggagatcgtgcggcagagcctgcagggcaggaacaccaaggtggccgtggtgctgatccagaagaagacccccctgcccccaggagaagatgtgattgccagcgagagagctgctgccctgtgcaatgcctgtgagctgagcggcaagagcctgtttgtgctgccccacacagaccacctggtgggctacatcatccggctggagaatgccttctatgaacatgcccagacctactactacacagagatcagaagagtgaagagccacaaggagttcctgaacaagaccacccaccagctgctgtttgtgcgccaccagttcaagatcgccttcttcagcgagctgaagcaggacacccagaatgccctgaagaactacagaacagcctacaacctggtgcatgagctgcgggcccacgagaccaacatcctggagatcaagaccatggccggcttcatcaactacaagatctgccgcctgtgcttccagcacaacacccccctggatgccatcgcccagttcaggaagcacatcgacctgtgcaagaagaagattggcagcgctgagctgagctttgaacatgatgcctggatgagcaagcagttccaggccttcggggacctgtttgatgaggccatcaagctgggcctgacagccatccagacccagaaccctggcttctactaccagcaggccgcctactatgcccaggagaggaagcagctggccaagaccctgtgcaaccacgaggcctctgtgatgtaccccaacccagaccccctggagacccagacaggagtgctggacttctacggccagaggtcctggaggcagggcatcctgagctttgacctgagtgaccctgagaaggagaaggtgggcatcctggccatccagctgaaggagagaaatgtggtgcacagcgagatcatcatcaccctgctgagcaatgctgtggcccagttcaagaagtacaagtgccccaggatgaagagccacctgatggtgcagatgggagaggagtactactatgccaaggactacaccaaggccctgaagctgctggactatgtgatgtgtgactacagaagtgagggctggtggaccctgctgacctctgtgctgaccacagccctgaagtgcagctacctgatggcccagctgaaggactacatcacctacagcctggagctgctgggccgggccagcaccctgaaggatgaccagaagagccgcatcgagaagaacctgatcaacgtgctgatgaatgaatctccagaccctgagccagactgtgacatcctggccgtgaagacagcccagaagctgtgggccgaccgcatcagcctggccggcagcaacatcttcaccatcggcgtgcaggactttgtgccctttgtgcagtgcaaggccaagttccacgcccccagcttccacgtggatgtgcctgtgcagtttgacatctacctgaaggctgactgcccccaccccatccgcttcagcaagctgtgtgtgtccttcaacaaccaggagtacaaccagttctgtgtgattgaggaggccagcaaggccaatgaggtgctggagaacctgacccagggcaagatgtgcctggtgcctgggaagaccaggaagctgctcttcaagtttgtggccaagacagaagatgtgggcaagaagattgagatcacctctgtggacctggccctgggcaatgaaacaggccgctgtgtggtgctgaactggcagggcggcggcggagatgctgccagcagccaggaggccctgcaggccgcccggagcttcaagagaagacccaagctgcctgacaatgaggtgcactgggacagcatcatcatccaggccagcaccatgatcatcagccgggtgcccaacatctctgtgcacctgctgcacgagcccccagccctgaccaatgagatgtactgcctggtggtgacagtgcagagccatgagaagacccagatcagagatgtgaagctgacagctggcctgaagccaggccaggatgccaacctgacccagaagacccacgtgaccctgcacggcacagagctgtgtgatgagagctacccagccctgctgacagacatccctgtgggggacctgcaccctggagagcagctggagaagatgctgtatgtgcgctgtggcaccgtgggcagcaggatgttcctggtgtatgtgtcctacctgatcaacaccaccgtggaggagaaggagatcgtgtgcaagtgccacaaggatgaaacagtgaccatcgagaccgtcttcccctttgatgtggccgtgaagtttgtgtccaccaagtttgagcacctggagcgggtgtatgctgacatccccttcctgctgatgacagacctgctgagcgccagcccctgggccctgaccatcgtgagcagcgagctgcagctggcccccagcatgaccaccgtggaccagctggagagccaggtggacaacgtcatcctgcagacaggagagagcgccagcgccctgtactacctgctggagaaggacctgagcaatggagagtacccccaccaccacaactgccaccacagcgctgcccgggactgtggggagtaccccagcccctgtgaatgtagatctgctgtgatctgggcctgccagagggtggtgacctgccaggtgagccccacagaatag

SEQ ID NO: 173492 - DNA, 2091 bp, synthetic construct
  misc_feature 1..2091: note = Description of Artificial Sequence: Synthetic coding sequence
  source 1..2091: mol_type = other DNA
atggaggatgctgggggcggggaggagcagggcctgctcttccaggaggagaccatcgacctgggcggagatgaatttggcagcgaggagaatgaaacagccagcgagggcagcagccccctggccgacaagctgaatgagcacatgatggagagcgtgctgatcagtgacagccccaacagtgaaggagatgctggggacctgggccgggtgagagatgaagctgagcctggaggagagggggaccccggccctgagcccgccggcacccccagccccagcggggaggctgatggagactgtgccccagaagatgctgcccccagcagcggcggggccccccggcaggatgctgcccgggaggtgcccggcagcgaggccgcccggcctgagcaggagccccctgtggccgagcctgtgcctgtgtgcaccatcttcagccagagggcccccccagccagcggagatggctttgagccccagatggtgaagagccccagctttggaggagccagcgaggccagcgcccggaccccaccccaggtggtgcagcccagccccagcctgagcaccttctttggagacacagctgccagccacagcctggccagtgacttctttgacagcttcaccaccagcgccttcatctctgtgagcaaccctggagctggcagccctgccccagccagccccccacccctggccgtgcctggaacagagggccggcctgagcctgtggccatgaggggcccccaggccgccgcccccccagccagccctgagccctttgcccacatccaggccgtgtttgctggcagtgatgacccctttgccacagccctgtccatgtctgagatggacagaagaaatgatgcctggctgcctggagaggccacccggggcgtgctgcgggctgtggccacccagcagagaggagctgtgtttgtggacaaggagaacctgaccatgcctggcctgcgctttgacaacatccagggagatgctgtgaaggacctgatgctgcgcttcctgggggagaaggctgctgccaagaggcaggtgctgaatgctgacagcgtggagcagagctttgtgggcctgaagcagctgatcagctgcaggaactggagggctgctgtggacctgtgtggccgcctgctgacagcccacggccagggctacggcaagagcggcctgctgaccagccacaccacagacagcctgcagctgtggtttgtgcggctggccctgctggtgaagctgggcctcttccagaatgctgagatggagtttgagcccttcggcaacctggaccagcctgacctgtactatgagtactacccccacgtgtacccaggccggcggggctccatggtgcccttctccatgaggatcctgcacgccgagctgcagcagtacctgggcaacccccaggagagcctggaccggctgcacaaggtgaagacagtgtgcagcaagatcctggccaacctggagcagggcctggccgaggatggcggcatgagctctgtgacccaggagggccggcagggctgcagctacctggtggccagcatccggctgtggaggagccggctgggccgggtgatgtacagcatggccaactgcctgctgctgatgaaggactatgtgctggccgtggaggcctaccacagcgtcatcaagtactacccagagcaggagccccagctgctgtctggaattggccgcatcagcctgcagatcggggacatcaagacagctgagaagtacttccaggatgtggagaaggtgacccagaagctggatggcctgcagggcaagatcatggtgctgatgaacagcgccttcctgcacctgggccagaacaactttgctgaggcccaccgcttcttcacagagatcctgaggatggaccccagaaatgctgtgcagatgctgagcgccagccaccccaccgggaaggagcccagccccaaggatgctgaggagcaccctgagggccaccgggacagcgctgagcccggccctgcccggcccatggtgccccagagggcccctcctggccctgccctgtgtgcccagccctag

SEQ ID NO: 173493 - DNA, 2208 bp, synthetic construct
  misc_feature 1..2208: note = Description of Artificial Sequence: Synthetic coding sequence
  source 1..2208: mol_type = other DNA
atggaggatgctgggggcggggaggagaccccagcccctgaggccccccaccccccccagctggcccctcctgaggagcagggcctgctcttccaggaggagaccatcgacctgggcggagatgaatttggaagtgaagaaaatgaaacagccagcgagggcagcagccccctggccgacaagctgaatgagcacatgatggagagcgtgctgatcagtgacagccccaacagtgaaggagatgctggggacctgggccgggtgagagatgaggccgagcccggcggggagggggaccccggccctgagcctgctggcacccccagccccagcggggaggctgatggagactgtgccccagaagatgctgcccccagcagtggaggagccccccggcaggatgctgcccgggaggtgcccggcagcgaggccgcccggcctgagcaggagccccctgtggccgagcctgtgcctgtgtgcaccatcttcagccagagggcccccccagccagcggagatggctttgagccccagatggtgaagagccccagctttggaggagccagcgaggccagcgcccggaccccaccccaggtggtgcagcccagccccagcctgagcaccttcttcggggacacagctgccagccacagcctggccagtgacttctttgacagcttcaccaccagcgccttcatctctgtgagcaaccctggggccggcagccctgccccagccagccccccacccctggccgtgcccggcacagagggccggcctgagcctgtggccatgaggggcccccaggccgccgcccccccagccagccctgagccctttgcccacatccaggccgtgtttgctggcagtgatgacccctttgccacagccctgtccatgtctgagatggacagaagaaatgatgcctggctgcccggggaggccacccggggcgtgctgcgggctgtggccacccagcagagaggagctgtgtttgtggacaaggagaacctgaccatgcctggcctgcgctttgacaacatccagggagatgctgtgaaggacctgatgctgcgcttcctgggggagaaggccgccgccaagaggcaggtgctgaatgctgacagcgtggagcagagctttgtgggcctgaagcagctgatcagctgcaggaactggagggctgctgtggacctgtgtggccgcctgctgacagcccacggccagggctacggcaagagcggcctgctgaccagccacaccacagacagcctgcagctgtggtttgtgcggctggccctgctggtgaagctgggcctcttccagaatgctgagatggagtttgagccctttggaaacctggaccagcctgacctgtactatgagtactacccccacgtgtacccaggaagaagaggctccatggtgcccttctccatgaggatcctgcatgctgagctgcagcagtacctgggcaacccccaggagagcctggaccggctgcacaaggtgaagacagtgtgcagcaagatcctggccaacctggagcagggcctggctgaagatggcggcatgagctctgtgacccaggagggccggcaggccagcatccggctgtggaggagccggctgggccgggtgatgtacagcatggccaactgcctgctgctgatgaaggactatgtgctggccgtggaggcctaccacagcgtcatcaagtactacccagagcaggagccccagctgctgagcggcatcggccgcatcagcctgcagattggagacatcaagacagctgagaagtacttccaggatgtggagaaggtgacccagaagctggatggcctgcagggcaagatcatggtgctgatgaacagcgccttcctgcacctgggccagaacaactttgctgaggcccaccgcttcttcacagagatcctgaggatggaccccagaaatgctgtggccaacaacaatgctgctgtgtgcctgctgtacctgggcaagctgaaggacagcctgcggcagctggaggccatggtgcagcaggaccccaggcactacctgcacgagagcgtgctcttcaacctgaccaccatgtatgagctggagagcagccgctccatgcagaagaagcaggccctgctggaggccgtggccggcaaggagggggacagcttcaacacccagtgcctgaagctggcctag

SEQ ID NO: 173494 - DNA, 2208 bp, synthetic construct; identical to SEQ ID NO: 173493
  misc_feature 1..2208: note = Description of Artificial Sequence: Synthetic coding sequence
  source 1..2208: mol_type = other DNA

SEQ ID NO: 173495 - DNA, 423 bp, synthetic construct
  misc_feature 1..423: note = Description of Artificial Sequence: Synthetic coding sequence
  source 1..423: mol_type = other DNA
atgagcggcagcttctactttgtgattgtgggccaccacgacaaccctgtgtttgagatggagttcctgcctgctgggaaggccgagagcaaggatgaccaccgccacctgaaccagttcatcgcccacgccgccctggacctggtggatgagaacatgtggctgagcaacaacatgtacctgaagacagtggacaagttcaatgagtggtttgtgtctgcctttgtgacagctggccacatgaggttcatcatgctgcatgacatccggcaggaggatggcatcaagaacttcttcacagatgtgtatgacctgtacatcaagttctccatgaaccccttctatgagcccaacagccccatccgcagcagcgcctttgacaggaaggtgcagttcctgggcaagaagcacctgctgtcctag

SEQ ID NO: 173496 - DNA, 423 bp, synthetic construct; identical to SEQ ID NO: 173495
  misc_feature 1..423: note = Description of Artificial Sequence: Synthetic coding sequence
  source 1..423: mol_type = other DNA

SEQ ID NO: 173497 - DNA, 423 bp, synthetic construct; identical to SEQ ID NO: 173495
  misc_feature 1..423: note = Description of Artificial Sequence: Synthetic coding sequence
  source 1..423: mol_type = other DNA

SEQ ID NO: 173498 - DNA, 423 bp, synthetic construct; identical to SEQ ID NO: 173495
  misc_feature 1..423: note = Description of Artificial Sequence: Synthetic coding sequence
  source 1..423: mol_type = other DNA

SEQ ID NO: 173499 - DNA, 444 bp, synthetic construct
  misc_feature 1..444: note = Description of Artificial Sequence: Synthetic coding sequence
  source 1..444: mol_type = other DNA
atgagcggcagcttctactttgtgattgtgggccaccacgacaaccctgtgtttgagatggagttcctgcctgctgggaaggccgagagcaaggatgaccaccgccacctgaaccagttcatcgcccacgccgccctggacctggtggatgagaacatgtggctgagcaacaacatgtacctgaagacagtggacaagttcaatgagtggtttgtgtctgcctttgtgacagctggccacatcctgaccttcctggtgaagatgaggttcatcatgctgcatgacatccggcaggaggatggcatcaagaacttcttcacagatgtgtatgacctgtacatcaagttctccatgaaccccttctatgagcccaacagccccatccgcagcagcgcctttgacaggaaggtgcagttcctgggcaagaagcacctgctgtcctag

SEQ ID NO: 173500 - DNA, 525 bp, synthetic construct
  misc_feature 1..525: note = Description of Artificial Sequence: Synthetic coding sequence
  source 1..525: mol_type = other DNA
atgagctcctggaagcaggacagaagtggcctgcggagcacagagctgaatgtgctggagtaccagcccctgtgtgctgtgcgcagccacatcctgaagaccatgagcggcagcttctactttgtgattgtgggccaccacgacaaccctgtgtttgagatggagttcctgcctgctgggaaggccgagagcaaggatgaccaccgccacctgaaccagttcatcgcccacgccgccctggacctggtggatgagaacatgtggctgagcaacaacatgtacctgaagacagtggacaagttcaatgagtggtttgtgtctgcctttgtgacagctggccacatgaggttcatcatgctgcatgacatccggcaggaggatggcatcaagaacttcttcacagatgtgtatgacctgtacatcaagttctccatgaaccccttctatgagcccaacagccccatccgcagcagcgcctttgacaggaaggtgcagttcctgggcaagaagcacctgctgtcctag

SEQ ID NO: 173501 - DNA, 225 bp, synthetic construct
  misc_feature 1..225: note = Description of Artificial Sequence: Synthetic coding sequence
  source 1..225: mol_type = other DNA
atgagcggcagcttctactttgtgattgtgggccaccacgacaaccctgtgtttgagatggagttcctgcctgctgggaaggccgagagcaaggatgaccaccgccacctgaaccagttcatcgcccacgccgccctggacctggtggatgagaacatgtggctgagcaacaacatgtacctgaagacagtggacaagttcaatgagtggtttgtgtctgcctag

SEQ ID NO: 173502 - DNA, 423 bp, synthetic construct
  misc_feature 1..423: note = Description of Artificial Sequence: Synthetic coding sequence
  source 1..423: mol_type = other DNA
atggctgtgtgcatcgccgtcatcgccaaggagaactaccccctgtacatccgcagcacccccacagaaaatgagctgaagttccactacatggtgcacaccagcctggatgtggtggatgagaagatcagcgccatgggcaaggccctggtggaccagcgggagctgtacctgggcctgctgtaccccacagaggactacaaggtgtatggctacgtgaccaacagcaaggtgaagtttgtgatggtggtggacagcagcaacacagccctgcgggacaatgagatccgctccatgttcaggaagctgcacaacagctacacagatgtgatgtgcaaccccttctacaaccctggggaccgcatccagagcagccgggcctttgacaacatggtgacctccatgatgatccaggtgtgctag

SEQ ID NO: 173503 - DNA, 357 bp, synthetic construct
  misc_feature 1..357: note = Description of Artificial Sequence: Synthetic coding sequence
  source 1..357: mol_type = other DNA
atgagccggcaggccaacagaggaacagagagcaagaagatgagcagcgagctgttcaccctgacctatggagccctggtgacccagctgtgcaaggactatgaaaatgatgaagatgtgaacaagcagctggacaagatgggcttcaacattggagtgcggctgattgaggacttcctggcccggagcaatgtgggccgctgccacgacttccgggagacagcagatgtgattgccaaggagaggaagatgttcctgggcaagcagaacaagaccaagaggcaggccaagctgtatgatgctgtgaaggagagaggagctgccagctgcacagatgccagccccctgctgtcctag

SEQ ID NO: 173504 - DNA, 405 bp, synthetic construct
  misc_feature 1..405: note = Description of Artificial Sequence: Synthetic coding sequence
  source 1..405: mol_type = other DNA
atgggcttcaacattggagtgcggctgattgaggacttcctggcccggagcaatgtgggccgctgccacgacttccgggagacagcagatgtgattgccaaggtggccttcaagatgtacctgggcatcacccccagcatcaccaactggagccctgctggagatgagttcagcctcatcctggagaacaaccccctggtggactttgtggagctgcctgacaaccacagcagcctcatctacagcaacctgctgtgtggggtgctgcggggggccctggagatggtgcagatggctgtggaggccaagtttgtgcaggacaccctgaagggagatggagtgacagagatccgcatgaggttcatcagaagaattgaggacaacctgcctgctggggaggagtag

SEQ ID NO: 173505 - DNA, 405 bp, synthetic construct; identical to SEQ ID NO: 173504
  misc_feature 1..405: note = Description of Artificial Sequence: Synthetic coding sequence
  source 1..405: mol_type = other DNA

SEQ ID NO: 173506 - DNA, 543 bp, synthetic construct
  misc_feature 1..543: note = Description of Artificial Sequence: Synthetic coding sequence
  source 1..543: mol_type = other DNA
atgagccggcaggccaacagaggaacagagagcaagaagatgagcagcgagctgttcaccctgacctatggagccctggtgacccagctgtgcaaggactatgaaaatgatgaagatgtgaacaagcagctggacaagatgggcttcaacattggagtgcggctgattgaggacttcctggcccggagcaatgtgggccgctgccacgacttccgggagacagcagatgtgattgccaaggtggccttcaagatgtacctgggcatcacccccagcatcaccaactggagccctgctggagatgagttcagcctcatcctggagaacaaccccctggtggactttgtggagctgcctgacaaccacagcagcctcatctacagcaacctgctgtgtggggtgctgcggggggccctggagatggtgcagatggctgtggaggccaagtttgtgcaggacaccctgaagggagatggagtgacagagatccgcatgaggttcatcagaagaattgaggacaacctgcctgctggggaggagtag

SEQ ID NO: 173507 - DNA, 498 bp, synthetic construct
  misc_feature 1..498: note = Description of Artificial Sequence: Synthetic coding sequence
  source 1..498: mol_type = other DNA
atggccatcttctctgtgtatgtggtgaacaaggccggcggcctcatctaccagctggacagctatgcccccagggctgaggccgagaagaccttctcctaccccctggacctgctgctgaagctgcatgatgagcgggtgctggtggccttcggccagagagatggcatccgggtgggccatgctgtgctggccatcaatggcatggatgtgaatggccgctacacagcagatggcaaggagatgctggagacagacaccttcaagctgcactgctaccagaccctgaccggcatcaagtttgtggtgctggccgacccccggcaggccggcatcgacagcctgctgaggaagatctatgagatctacagcgactttgccctgaagaaccccttctacagcctggagatgcccatccgctgtgagctgtttgaccagaacctgaagctggccctggaggtggccgagaaggccggcacctttggacctggcagctag

SEQ ID NO: 173508 - DNA, 660 bp, synthetic construct
  misc_feature 1..660: note = Description of Artificial Sequence: Synthetic coding sequence
  source 1..660: mol_type = other DNA
atggccatcttctctgtgtatgtggtgaacaaggccggcggcctcatctaccagctggacagctatgcccccagggctgaggccgagaagaccttctcctaccccctggacctgctgctgaagctgcatgatgagcgggtgctggtggccttcggccagagagatggcatccgggtgggccatgctgtgctggccatcaatggcatggatgtgaatggccgctacacagcagatggcaaggaggtgctggagtacctgggcaacccagccaactaccctgtgtccatccgcttcggccggccccggctgaccagcaatgagaagctgatgctggcctccatgttccacagcctgtttgccatcggcagccagctgagccctgagcagggcagcagcggcatcgagatgctggagacagacaccttcaagctgcactgctaccagaccctgaccggcatcaagtttgtggtgctggccgacccccggcaggccggcatcgacagcctgctgaggaagatctatgagatctacagcgactttgccctgaagaaccccttctacagcctggagatgcccatccgctgtgagctgtttgaccagaacctgaagctggccctggaggtggccgagaaggccggcacctttggacctggcagctag

SEQ ID NO: 173509 - DNA, 4308 bp, synthetic construct
  misc_feature 1..4308: note = Description of Artificial Sequence: Synthetic coding sequence
  source 1..4308: mol_type = other DNA
atggcccagtgtgtgcagagcgtgcaggagctgatcccagacagctttgtgccctgtgtggccgccctgtgcagtgatgaggccgagcggctgacccggctgaaccacctgagctttgctgagctgctgaagcccttcagccggctgaccagcgaggtgcacatgagggaccccaacaaccagctgcacgtgatcaagaacctgaagattgctgtgagcaacatcgtgacccagcccccccagcccggggccatcaggaagctgctgaatgatgtggtgtctggcagccagcctgctgagggcctggtggccaacgtcatcacagctggggactatgacctgaacatcagcgccaccaccccctggtttgagagctaccgggagaccttcctgcagagcatgcctgccctggaccacgagttcctgaaccactacctggcctgcatgctggtggccagcagcagcgaggccgagcctgtggagcagttcagcaagctgagccaggagcagcaccgcatccagcacaacagcgactacagctaccccaagtggttcatccccaacaccctgaagtactacgtgctgctgcatgatgtgtctgctggagatgagcagagagctgagagcatctatgaggagatgaagcagaagtatggcacccagggctgctacctgctgaagatcaacagcaggaccagcaacagagccagtgatgagcagatcccagacccctggagccagtacctgcagaagaacagcatccagaaccaggagagctatgaagatggcccctgcaccatcaccagcaacaagaacagcgacaacaacctgctgagcctggatggcctggacaatgaggtgaaggatggcctgcccaacaacttccgggcccaccccctgcagctggagcagagcagtgaccccagcaacagcattgatggccctgaccacctgcggagcgccagcagcctgcacgagaccaagaagggcaacacaggcatcatccacggggcctgcctgaccctgacagaccatgaccgcatccggcagttcatccaggagttcaccttccggggcctgctgccccacatcgagaagaccatccggcagctgaatgaccagctgatcagcaggaagggcctgagccgcagcctcttcagcgccaccaagaagtggttcagcggcagcaaggtgcctgagaagagcatcaatgacctgaagaacaccagcggcctgctgtacccacctgaggcccctgagctgcagatcaggaagatggctgacctgtgcttcctggtgcagcactatgacctggcctacagctgctaccacacagccaagaaggacttcctgaatgaccaggccatgctgtatgctgctggggccctggagatggctgctgtgtctgccttcctgcagcccggggccccccggccctacccagcccactacatggacacagccatccagacctacagagacatctgcaagaacatggtgctggccgagcgctgtgtgctgctgtctgctgagctgctgaagagccagagcaagtacagcgaggccgccgccctgctgatccggctgaccagcgaggacagcgacctgcggagcgccctgctgctggagcaggccgcccactgcttcatcaacatgaagagccccatggtgaggaaatatgccttccacatgatcctggccggccaccgcttcagcaaggccggccagaagaagcacgccctgcgctgctactgccaggccatgcaggtgtacaagggcaagggctggagcctggccgaggaccacatcaacttcaccatcggccggcagagctacaccctgcggcagctggacaatgctgtgtctgccttccgccacatcctgatcaatgaaagcaagcagagcgctgcccagcagggcgccttcctgcgggagtacctgtatgtgtacaagaatgtgtcccagctgagcccagatggccccctgccccagctgcccctgccctacatcaacagcagcgccaccagggtcttctttggacatgacagaagaccagcagatggagagaagcaggccgccacccacgtgtccctggaccaggagtatgacagcgagagcagccagcagtggagggagctggaggagcaggtggtgtctgtggtgaacaagggcgtcatccccagcaacttccaccccacccagtactgcctgaacagctacagcgacaacagccgcttccccctggccgtggtggaggagcccatcaccgtggaggtggccttcaggaaccccctgaaggtgctgctgctgctgacagacctgagcctgctgtggaagttccaccccaaggacttcagcggcaaggacaatgaggaggtgaagcagctggtgaccagcgagcctgagatgattggagctgaggtgatcagcgagttcctgatcaatggagaggagagcaaggtggcccggctgaagctgttcccccaccacatcggggagctgcacatcctgggcgtggtgtacaacctgggcaccatccagggctccatgacagtggatggcattggagccctgcccggctgccacacaggcaagtacagcctgtccatgtctgtgcggggcaagcaggacctggagatccagggcccccggctgaacaacaccaaggaggagaagacctctgtgaagtatggccctgaccggcggctggaccccatcatcacagaggagatgcccctgctggaggtgttcttcatccacttccccaccggcctgctgtgtggggagatcaggaaggcctacgtggagtttgtgaatgtgtccaagtgccccctgaccggcctgaaggtggtgtccaagaggcctgagttcttcaccttcggcggcaacacagctgtgctgacccccctgagccccagcgccagcgagaactgcagcgcctacaagacagtggtgacagatgccacctctgtgtgcacagccctgatcagcagcgccagctctgtggactttggcatcggcaccggcagccagcctgaggtgattcctgtgcccctgcctgacacagtgctgctgcccggggcctctgtgcagctgcccatgtggctgcggggcccagatgaggagggcgtgcatgagatcaacttcctgttctactatgaatctgtgaagaagcagcccaagatccgccaccgcatcctgcggcacacagccatcatctgcaccagccgcagcctgaatgtgcgggccaccgtgtgccgcagcaacagcctggagaatgaggagggccggggcggcaacatgctggtgtttgtggatgtggagaacaccaacaccagcgaggccggcgtgaaggagttccacatcgtgcaggtgagcagcagcagcaagcactggaagctgcagaagtctgtgaacctgtctgagaacaaggacaccaagctggccagccgggagaagggcaagttctgcttcaaggccatccgctgtgagaaggaggaggccgccacccagagcagcgagaagtacacctttgctgacatcatctttggaaatgagcagatcatcagcagcgccagcccctgtgccgacttcttctaccgcagcctgagcagcgagctgaagaagccccaggcccacctgcctgtgcacacagagaagcagagcacagaagatgctgtgcggctcatccagaagtgcagcgaggtggacctgaacatcgtcatcctgtggaaggcctacgtggtggaggacagcaagcagctgatcctggagggccagcaccacgtgatcctgcggaccatcggcaaggaggccttctcctacccccagaagcaggagcccccagagatggagctgctgaagttcttccggcctgagaacatcaccgtgagcagccggcccagcgtggagcagctgagcagcctcatcaagaccagcctgcactacccagagagcttcaaccaccccttccaccagaagagcctgtgcctggtgcctgtgaccctgctgctgagcaactgcagcaaggcagatgtggatgtgattgtggacctgcggcacaagaccaccagccctgaggccctggagatccacggcagcttcacctggctgggccagacccagtacaagctgcagctgaagagccaggagatccacagcctgcagctgaaggcctgctttgtgcacactggagtgtacaacctgggcaccccccgggtgtttgccaagctgagtgaccaggtgacagtgtttgagaccagccagcagaacagcatgcctgccctgatcatcatcagcaatgtgtag

SEQ ID NO: 173510 - DNA, 3420 bp, synthetic construct
  misc_feature 1..3420: note = Description of Artificial Sequence: Synthetic coding sequence
  source 1..3420: mol_type = other DNA
atgtctgtgcctgactacatgcagtgtgccgaggaccaccagaccctgctggtggtggtgcagcctgtgggcatcgtgtctgaggagaacttcttccgcatctacaagaggatctgcagcgtgtcccagatctctgtgcgggacagccagagggtgctgtacatccgctaccgccaccactacccacctgagaacaatgagtggggagacttccagacccacaggaaggtggtgggcctcatcaccatcacagactgcttcagcgccaaggactggccccagacctttgagaagttccacgtgcagaaggagatctacggcagcaccctgtatgacagccggctgtttgtgtttggcctgcagggcgagatcgtggagcagcccaggacagatgtggccttctaccccaactatgaggactgccagacagtggagaagagaattgaggacttcatcgagagcctcttcatcgtgctggagagcaagaggctggaccgggccacagacaagagcggggacaagatccccctgctgtgtgtgccctttgagaagaaggactttgtgggcctggacacagacagccgccactacaagaagcgctgccagggccgcatgaggaagcacgtgggggacctgtgcctgcaggccggcatgctgcaggacagcctggtgcactaccacatgtctgtggagctgctgcggtctgtgaatgacttcctgtggctgggcgccgccctggagggcctgtgcagcgccagcgtcatctaccactacccaggcggcaccggcggcaagagcggggcccggcgcttccagggcagcaccctgcctgctgaggccgccaacagacacaggcctggggccctgaccaccaacggcatcaacccagacaccagcacagagatcggccgggccaagaactgcctgagccctgaggacatcatcgacaagtacaaggaggccatctcctactacagcaagtacaagaatgctggggtcatcgagctggaggcctgcatcaaggctgtgcgggtgctggccatccagaagaggtccatggaggccagcgagttcctgcagaatgctgtgtacatcaacctgcggcagctgtctgaggaggagaagatccagcgctacagcatcctgtctgagctgtatgagctgattggcttccacaggaagagcgccttcttcaagagggtggccgccatgcagtgtgtggcccccagcattgctgagcccggctggagggcctgctacaagctgctgctggagaccctgcccggctacagcctgagcctggaccccaaggacttcagccggggcacccaccggggctgggccgctgtgcagatgaggctgctgcacgagctggtgtatgccagcaggaggatgggcaacccagccctgtctgtgcgccacctgtccttcctgctgcagaccatgctggacttcctgagtgaccaggagaagaaggatgtggcccagagcctggagaactacaccagcaagtgccccggcaccatggagcccatcgccctgcccggcggcctgaccctgccccctgtgcccttcaccaagctgcccatcgtgagacatgtgaagctgctgaacctgcctgccagcctgcggccccacaagatgaagagcctgctgggccagaatgtgtccaccaagagccccttcatctacagccccatcatcgcccacaacagaggagaggagaggaacaagaagattgacttccagtgggtgcagggagatgtgtgtgaggtgcagctgatggtgtacaaccccatgccctttgagctgcgggtggagaacatgggcctgctgaccagcggcgtggagtttgagagcctgcctgctgccctgagcctgcctgctgagagcggcctgtaccctgtgaccctggtgggcgtgccccagaccaccggcaccatcaccgtgaatggctaccacaccaccgtgtttggagtcttcagtgactgcctgctggacaacctgcccggcatcaagaccagcggcagcacagtggaggtgatcccagccctgccccggctgcagatcagcaccagcctgcccaggtctgcccacagcctgcagcccagcagtggagatgagatcagcaccaacgtgtctgtgcagctgtacaatggagagagccagcagctgatcatcaagctggagaacatcggcatggagcccctggagaagctggaggtgaccagcaaggtgctgaccaccaaggagaagctgtatggagacttcctgtcctggaagctggaggagaccctggcccagttccccctgcagcccgggaaggtggccaccttcaccatcaacatcaaggtgaagctggacttcagctgccaggagaacctgctgcaggacctgagtgatgatggcatctctgtgtctggcttccccctgagcagccccttccggcaggtggtgcggccccgggtggagggcaagcctgtgaaccccccagagagcaacaaggccggggactacagccacgtgaagaccctggaggccgtgctgaacttcaagtacagcggcggccctggccacacagagggctactacagaaacctgagcctgggcctgcacgtggaggtggagcccagcgtcttcttcaccagggtgtccaccctgcctgccaccagcacccggcagtgccacctgctgctggatgtgttcaacagcacagaacatgagctgactgtgtccaccaggagcagcgaggccctgatcctgcatgctggggagtgccagaggatggccatccaggtggacaagttcaactttgagagcttccctgagagccctggagagaagggccagtttgccaaccccaagcagctggaggaggagcggcgggaggcccggggcctggagatccacagcaagctgggcatctgctggaggatccccagcctgaagaggtctggagaggcctctgtggagggcctgctgaaccagctggtgctggagcacctgcagctggcccccctgcagtgggatgtgctggtggatggccagccctgtgaccgggaggccgtggccgcctgccaggtgggggaccctgtgcggctggaggtgcggctgaccaacagaagccccaggtctgtgggcccctttgccctgactgtggtgcccttccaggaccaccagaatggagtgcacaactatgacctgcatgacacagtgtcctttgtgggcagcagcaccttctacctggatgctgtgcagcccagcggccagagcgcctgcctgggcgccctgctcttcctgtacaccggggacttcttcctgcacatccgcttccacgaggacagcaccagcaaggagctgcccccatcctggttctgcctgcccagcgtgcacgtgtgtgccctggaggcccaggcctag

SEQ ID NO: 173511 - DNA, 3741 bp, synthetic construct
  misc_feature 1..3741: note = Description of Artificial Sequence: Synthetic coding sequence
  source 1..3741: mol_type = other DNA
atggtgcctgctggggaccaggaccgggccccccaccggggcaagccagcccaggccggggcccggaccagccgggccagccgggccctgcgctcctggaggaggagccaggccgcccgggccaccgtgacccacccccggggcggccatgaccggggcagccatggaggctaccgggagggccaccggggctgccggcgggacccccagtgggccagcgctggccccccacccctgtccttcacagaggaggtgaagtttgagctgcgggccctgaaggactgggacttcaagatgtctgtgcctgactacatgcagtgtgccgaggaccaccagaccctgctggtggtggtgcagcctgtgggcatcgtgtctgaggagaacttcttccgcatctacaagaggatctgcagcgtgtcccagatctctgtgcgggacagccagagggtgctgtacatccgctaccgccaccactacccacctgagaacaatgagtggggagacttccagacccacaggaaggtggtgggcctcatcaccatcacagactgcttcagcgccaaggactggccccagacctttgagaagttccacgtgcagaaggagatctacggcagcaccctgtatgacagccggctgtttgtgtttggcctgcagggcgagatcgtggagcagcccaggacagatgtggccttctaccccaactatgaggactgccagacagtggagaagagaattgaggacttcatcgagagcctcttcatcgtgctggagagcaagaggctggaccgggccacagacaagagcggggacaagatccccctgctgtgtgtgccctttgagaagaaggactttgtgggcctggacacagacagccgccactacaagaagcgctgccagggccgcatgaggaagcacgtgggggacctgtgcctgcaggccggcatgctgcaggacagcctggtgcactaccacatgtctgtggagctgctgcggtctgtgaatgacttcctgtggctgggcgccgccctggagggcctgtgcagcgccagcgtcatctaccactacccaggcggcaccggcggcaagagcggggcccggcgcttccagggcagcaccctgcctgctgaggccgccaacagacacaggcctggggcccaggaggtgctgattgatcctggggccctgaccaccaacggcatcaacccagacaccagcacagaaattggccgggccaagaactgcctgagccctgaggacatcatcgacaagtacaaggaggccatctcctactacagcaagtacaagaatgctggggtgattgagctggaggcctgcatcaaggctgtgcgggtgctggccatccagaagaggtccatggaggccagcgagttcctgcagaatgctgtgtacatcaacctgcggcagctgtctgaggaggagaagatccagcgctacagcatcctgtctgagctgtatgagctgattggcttccacaggaagagcgccttcttcaagagggtggccgccatgcagtgtgtggcccccagcattgctgagcccggctggagggcctgctacaagctgctgctggagaccctgcccggctacagcctgagcctggaccccaaggacttcagccggggcacccaccggggctgggccgctgtgcagatgaggctgctgcacgagctggtgtatgccagcaggaggatgggcaacccagccctgtctgtgcgccacctgtccttcctgctgcagaccatgctggacttcctgagtgaccaggagaagaaggatgtggcccagagcctggagaactacaccagcaaatgtcctggcaccatggagcccatcgccctgcccggcggcctgaccctgccccctgtgcccttcaccaagctgcccatcgtgcgccacgtgaagctgctgaacctgcctgccagcctgcggccccacaagatgaagagcctgctgggccagaatgtgtccaccaagagccccttcatctacagccccatcatcgcccacaacagaggagaggagaggaacaagaagattgacttccagtgggtgcagggagatgtgtgtgaggtgcagctgatggtgtacaaccccatgccctttgagctgcgggtggagaacatgggcctgctgaccagcggcgtggagtttgagagcctgcctgctgccctgagcctgcctgctgagagcggcctgtaccctgtgaccctggtgggcgtgccccagaccaccggcaccatcaccgtgaatggctaccacaccaccgtgtttggagtcttcagtgactgcctgctggacaacctgcccggcatcaagaccagcggcagcacagtggaggtgatcccagccctgccccggctgcagatcagcaccagcctgcccaggtctgcccacagcctgcagcccagcagtggagatgagatcagcaccaacgtgtctgtgcagctgtacaacggggagagccagcagctgatcatcaagctggagaacatcggcatggagcccctggagaagctggaggtgaccagcaaggtgctgaccaccaaggagaagctgtatggagacttcctgtcctggaagctggaggagaccctggcccagttccccctgcagcccgggaaggtggccaccttcaccatcaacatcaaggtgaagctggacttcagctgccaggagaacctgctgcaggacctgagtgatgatggcatctctgtgtctggcttccccctgagcagccccttccggcaggtggtgcggccccgggtggagggcaagcctgtgaaccccccagagagcaacaaggccggggactacagccacgtgaagaccctggaggccgtgctgaacttcaagtacagcggcggccctggccacacagagggctactacagaaacctgagcctgggcctgcacgtggaggtggagcccagcgtcttcttcaccagggtgtccaccctgcctgccaccagcacccggcagtgccacctgctgctggatgtgttcaacagcacagagcacgagctgactgtgtccaccaggagcagcgaggccctgatcctgcacgccggggagtgccagaggatggccatccaggtggacaagttcaactttgagagcttccctgagagccctggagagaagggccagtttgccaaccccaagcagctggaggaggagcggcgggaggcccggggcctggagatccacagcaagctgggcatctgctggaggatccccagcctgaagaggtctggagaggcctctgtggagggcctgctgaaccagctggtgctggagcacctgcagctggcccccctgcagtgggatgtgctggtggatggccagccctgtgaccgggaggccgtggccgcctgccaggtgggggaccctgtgcggctggaggtgcggctgaccaacagaagccccaggtctgtgggcccctttgccctgactgtggtgcccttccaggaccaccagaatggagtgcacaactatgacctgcatgacacagtgtcctttgtgggcagcagcaccttctacctggatgctgtgcagcccagcggccagagcgcctgcctgggcgccctgctcttcctgtacacaggagacttcttcctgcacatccgcttccacgaggacagcaccagcaaggagctgccccccagctggttctgcctgcccagcgtgcacgtgtgtgccctggaggcccaggcctag

SEQ ID NO: 173512 - DNA, 3447 bp, synthetic construct
  misc_feature 1..3447: note = Description of Artificial Sequence: Synthetic coding sequence
  source 1..3447: mol_type = other DNA
atgtctgtgcctgactacatgcagtgtgccgaggaccaccagaccctgctggtggtggtgcagcctgtgggcatcgtgtctgaggagaacttcttccgcatctacaagaggatctgcagcgtgtcccagatctctgtgcgggacagccagagggtgctgtacatccgctaccgccaccactacccacctgagaacaatgagtggggagacttccagacccacaggaaggtggtgggcctcatcaccatcacagactgcttcagcgccaaggactggccccagacctttgagaagttccacgtgcagaaggagatctacggcagcaccctgtatgacagccggctgtttgtgtttggcctgcagggcgagatcgtggagcagcccaggacagatgtggccttctaccccaactatgaggactgccagacagtggagaagagaattgaggacttcatcgagagcctcttcatcgtgctggagagcaagaggctggaccgggccacagacaagagcggggacaagatccccctgctgtgtgtgccctttgagaagaaggactttgtgggcctggacacagacagccgccactacaagaagcgctgccagggccgcatgaggaagcacgtgggggacctgtgcctgcaggccggcatgctgcaggacagcctggtgcactaccacatgtctgtggagctgctgcggtctgtgaatgacttcctgtggctgggcgccgccctggagggcctgtgcagcgccagcgtcatctaccactacccaggcggcaccggcggcaagagcggggcccggcgcttccagggcagcaccctgcctgctgaggccgccaacagacacaggcctggggcccaggaggtgctgattgatcctggggccctgaccaccaacggcatcaacccagacaccagcacagaaattggccgggccaagaactgcctgagccctgaggacatcatcgacaagtacaaggaggccatctcctactacagcaagtacaagaatgctggggtgattgagctggaggcctgcatcaaggctgtgcgggtgctggccatccagaagaggtccatggaggccagcgagttcctgcagaatgctgtgtacatcaacctgcggcagctgtctgaggaggagaagatccagcgctacagcatcctgtctgagctgtatgagctgattggcttccacaggaagagcgccttcttcaagagggtggccgccatgcagtgtgtggcccccagcattgctgagcccggctggagggcctgctacaagctgctgctggagaccctgcccggctacagcctgagcctggaccccaaggacttcagccggggcacccaccggggctgggccgctgtgcagatgaggctgctgcacgagctggtgtatgccagcaggaggatgggcaacccagccctgtctgtgcgccacctgtccttcctgctgcagaccatgctggacttcctgagtgaccaggagaagaaggatgtggcccagagcctggagaactacaccagcaaatgtcctggcaccatggagcccatcgccctgcccggcggcctgaccctgccccctgtgcccttcaccaagctgcccatcgtgcgccacgtgaagctgctgaacctgcctgccagcctgcggccccacaagatgaagagcctgctgggccagaatgtgtccaccaagagccccttcatctacagccccatcatcgcccacaacagaggagaggagaggaacaagaagattgacttccagtgggtgcagggagatgtgtgtgaggtgcagctgatggtgtacaaccccatgccctttgagctgcgggtggagaacatgggcctgctgaccagcggcgtggagtttgagagcctgcctgctgccctgagcctgcctgctgagagcggcctgtaccctgtgaccctggtgggcgtgccccagaccaccggcaccatcaccgtgaatggctaccacaccaccgtgtttggagtcttcagtgactgcctgctggacaacctgcccggcatcaagaccagcggcagcacagtggaggtgatcccagccctgccccggctgcagatcagcaccagcctgcccaggtctgcccacagcctgcagcccagcagtggagatgagatcagcaccaacgtgtctgtgcagctgtacaacggggagagccagcagctgatcatcaagctggagaacatcggcatggagcccctggagaagctggaggtgaccagcaaggtgctgaccaccaaggagaagctgtatggagacttcctgtcctggaagctggaggagaccctggcccagttccccctgcagcccgggaaggtggccaccttcaccatcaacatcaaggtgaagctggacttcagctgccaggagaacctgctgcaggacctgagtgatgatggcatctctgtgtctggcttccccctgagcagccccttccggcaggtggtgcggccccgggtggagggcaagcctgtgaaccccccagagagcaacaaggccggggactacagccacgtgaagaccctggaggccgtgctgaacttcaagtacagcggcggccctggccacacagagggctactacagaaacctgagcctgggcctgcacgtggaggtggagcccagcgtcttcttcaccagggtgtccaccctgcctgccaccagcacccggcagtgccacctgctgctggatgtgttcaacagcacagagcacgagctgactgtgtccaccaggagcagcgaggccctgatcctgcacgccggggagtgccagaggatggccatccaggtggacaagttcaactttgagagcttccctgagagccctggagagaagggccagtttgccaaccccaagcagctggaggaggagcggcgggaggcccggggcctggagatccacagcaagctgggcatctgctggaggatccccagcctgaagaggtctggagaggcctctgtggagggcctgctgaaccagctggtgctggagcacctgcagctggcccccctgcagtgggatgtgctggtggatggccagccctgtgaccgggaggccgtggccgcctgccaggtgggggaccctgtgcggctggaggtgcggctgaccaacagaagccccaggtctgtgggcccctttgccctgactgtggtgcccttccaggaccaccagaatggagtgcacaactatgacctgcatgacacagtgtcctttgtgggcagcagcaccttctacctggatgctgtgcagcccagcggccagagcgcctgcctgggcgccctgctcttcctgtacacaggagacttcttcctgcacatccgcttccacgaggacagcaccagcaaggagctgccccccagctggttctgcctgcccagcgtgcacgtgtgtgccctggaggcccaggcctag

SEQ ID NO: 173513 - DNA, 2862 bp, synthetic construct
  misc_feature 1..2862: note = Description of Artificial Sequence: Synthetic coding sequence
  source 1..2862: mol_type = other DNA
atggccctggtgttccagtttggccagcctgtgcgggcccagcccctgcccggcctgtgccacggcaagctgatccgcaccaatgcctgtgatgtgtgcaacagcacagacctgcctgaggtggagatcatcagcctgctggaggagcagctgccccactacaagctgcgggctgacaccatctacggctatgaccatgatgactggctgcacacccccctcatcagcccagatgccaacatcgacctgaccacagagcagatcgaggagaccctgaagtacttcctgctgtgtgccgagcgggtgggccagatgaccaagacctacaatgacattgatgctgtgacccggctgctggaggagaaggagcgggacctggagctggccgcccgcatcggccagagcctgctgaagaagaacaagaccctgacagaaagaaatgagctgctggaggagcaggtggagcacatccgggaggaggtgtcccagctgcggcatgagctgtccatgaaggatgagctgctgcagttctacaccagcgctgctgaggagagcgagcctgagagcgtgtgcagcacccccctgaagagaaatgaaagcagcagctctgtgcagaactacttccacctggacagcctgcagaagaagctgaaggacctggaggaggagaatgtggtgctgcggtctgaggccagccagctgaagacagagaccatcacctatgaggagaaggagcagcagctggtgaatgactgtgtgaaggagctgagagatgccaacgtgcagatcgccagcatcagcgaggagctggccaagaagacagaagatgctgcccggcagcaggaggagatcacccacctgctgagccagatcgtggacctgcagaagaaggccaaggcctgtgctgtggagaatgaggagctggtgcagcacctgggcgccgccaaggatgcccagaggcagctgacagctgagctgcgggagctggaggacaagtatgcagagtgcatggagatgctgcacgaggcccaggaggagctgaagaacctgaggaacaagaccatgcccaacaccaccagccgccgctaccacagcctgggcctcttccccatggacagcctggccgctgagattgagggcaccatgaggaaggagctgcagctggaggaggccgagagcccagacatcacccaccagaagagggtgtttgaaacagtgaggaacatcaaccaggtggtgaagcagaggagcctgacccccagccccatgaacatccctggcagcaaccagagcagcgccatgaacagcctgctgagcagctgtgtgtccacccccaggagcagcttctacggcagtgacattggaaatgtggtgctggacaacaagaccaacagcatcatcctggagacagaggccgctgacctgggcaatgatgagaggagcaagaagccaggcaccccaggcaccccaggcagccatgacctggagacagccctgcggcggctgagcctgcggcgggagaactacctgtctgaaagacgcttctttgaggaggagcaggagaggaagctgcaggagctggccgagaagggggagctgcggagcggcagcctgacccccacagagagcatcatgagcctgggcacccacagccgcttcagcgagttcaccggcttcagcggcatgtccttcagcagccgcagctacctgcctgagaagctgcagatcgtgaagcccctggagggcagcgccaccctgcaccactggcagcagctggcccagccccacctgggcggcatcctggaccccaggcctggggtggtgaccaagggcttccgcaccctggatgtggacctggatgaggtgtactgcctgaatgactttgaggaggatgacacaggagaccacatcagcctgccccggctggccaccagcacccctgtgcagcaccctgagaccagcgcccaccaccctgggaagtgcatgagccagaccaacagcaccttcaccttcaccacctgccgcatcctgcaccccagtgatgagctgaccagggtgacccccagcctgaacagcgcccccaccccagcctgtggcagcaccagccacctgaagagcacccctgtggccaccccctgcaccccccggcggctgagcctggccgagagcttcaccaacacccgggagagcaccaccaccatgagcaccagcctgggcctggtgtggctgctgaaggagcggggcatctctgctgctgtgtatgacccccagagctgggaccgggccggccggggcagcctgctgcacagctacacccccaagatggccgtcatccccagcaccccacccaacagccccatgcagacccccaccagcagcccccccagctttgagttcaagtgcaccagccccccctatgacaacttcctggccagcaagccagccagcagcatcctgcgggaggtgcgggagaagaatgtgcgcagcagcgagagccagacagatgtgtctgtgagcaacctgaacctggtggacaaggtgcggcgcttcggcgtggccaaggtggtgaacagcggccgggcccacgtgcccaccctgacagaggagcagggccccctgctgtgtggccccccaggccctgccccagccctggtgccccggggcctggtgcctgagggcctgcccctgcgctgccccaccgtgaccagcgccatcggcggcctgcagctgaacagcggcatcagaagaaacagaagcttccccaccatggtgggcagctccatgcagatgaaggcccctgtgaccctgaccagcggcatcctgatgggcgccaagctgagcaagcagaccagcctgaggtag

SEQ ID NO: 173514 - DNA, 2061 bp, synthetic construct
  misc_feature 1..2061: note = Description of Artificial Sequence: Synthetic coding sequence
  source 1..2061: mol_type = other DNA
atgagcctgcgggacaagggcggggaggaggagtgctttgaatatgactgccaggatgaggagaggaagcccacccaccggcagcacgacacccaggacctgctggaggaggtgctgtgtgccgagcgggtgggccagatgaccaagacctacaatgacattgatgctgtgacccggctgctggaggagaaggagcgggacctggagctggccgcccgcatcggccagagcctgctgaagaagaacaagaccctgacagaaagaaatgagctgctggaggagcaggtggagcacatccgggaggaggtgtcccagctgcggcatgagctgtccatgaaggatgagctgctgcagttctacaccagcgctgctgaggagagcgagcctgagagcgtgtgcagcacccccctgaagagaaatgaaagcagcagctctgtgcagaactacttccacctggacagcctgcagaagaagctgaaggacctggaggaggagaatgtggtgctgcggtctgaggccagccagctgaagacagagaccatcacctatgaggagaaggagcagcagctggtgaatgactgtgtgaaggagctgagagatgccaacgtgcagatcgccagcatcagcgaggagctggccaagaagacagaagatgctgcccggcagcaggaggagatcacccacctgctgagccagatcgtggacctgcagaagaaggccaaggcctgtgctgtggagaatgaggagctggtgcagcacctgggcgccgccaaggatgcccagaggcagctgacagctgagctgcgggagctggaggacaagtatgcagagtgcatggagatgctgcacgaggcccaggaggagctgaagaacctgaggaacaagaccatgcccaacaccaccagccgccgctaccacagcctgggcctcttccccatggacagcctggccgctgagattgagggcaccatgaggaaggagctgcagctggaggaggccgagagcccagacatcacccaccagaagagggtgtttgaaacagtgaggaacatcaaccaggtggtgaagcagaggagcctgacccccagccccatgaacatccctggcagcaaccagagcagcgccatgaacagcctgctgagcagctgtgtgtccacccccaggagcagcttctacggcagtgacattggaaatgtggtgctggacaacaagaccaacagcatcatcctggagacagaggccgctgacctgggcaatgatgagaggagcaagaagccaggcaccccaggcaccccaggcagccatgacctggagacagccctgcggcggctgagcctgcggcgggagaactacctgtctgaaagacgcttctttgaggaggagcaggagaggaagctgcaggagctggccgagaagggggagctgcggagcggcagcctgacccccacagagagcatcatgagcctgggcacccacagccgcttcagcgagttcaccggcttcagcggcatgtccttcagcagccgcagctacctgcctgagaagctgcagatcgtgaagcccctggagggcagcgccaccctgcaccactggcagcagctggcccagccccacctgggcggcatcctggaccccaggcctggggtggtgaccaagggcttccgcaccctggatgtggacctggatgaggtgtactgcctgaatgactttgaggaggatgacacaggagaccacatcagcctgccccggctggccaccagcacccctgtgcagcaccctgagaccagcggggagaggagccaggcccgggtgacagtgtctggcagccgcagctaccccagccggccccaggccagccctgaggagatgcaggagcccccagctgccacagaggaggaggaggaggaggaggaggaggagggcagcggggagggcaccaccatcagccctgtgaacctggcccccttccctgaggccgagttctgggccatcctgacctctgtgcccggcaccatccgcagcggcagcctgtctgtggccagcgcccggctgtgtggctag

SEQ ID NO: 173515 - DNA, 2688 bp, synthetic construct
  misc_feature 1..2688: note = Description of Artificial Sequence: Synthetic coding sequence
  source 1..2688: mol_type = other DNA
atgagcctgcgggacaagggcggggaggaggagtgctttgaatatgactgccaggatgaggagaggaagcccacccaccggcagcacgacacccaggacctgctggaggaggtgctgtgtgccgagcgggtgggccagatgaccaagacctacaatgacattgatgctgtgacccggctgctggaggagaaggagcgggacctggagctggccgcccgcatcggccagagcctgctgaagaagaacaagaccctgacagaaagaaatgagctgctggaggagcaggtggagcacatccgggaggaggtgtcccagctgcggcatgagctgtccatgaaggatgagctgctgcagttctacaccagcgctgctgaggagagcgagcctgagagcgtgtgcagcacccccctgaagagaaatgaaagcagcagctctgtgcagaactacttccacctggacagcctgcagaagaagctgaaggacctggaggaggagaatgtggtgctgcggtctgaggccagccagctgaagacagagaccatcacctatgaggagaaggagcagcagctggtgaatgactgtgtgaaggagctgagagatgccaacgtgcagatcgccagcatcagcgaggagctggccaagaagacagaagatgctgcccggcagcaggaggagatcacccacctgctgagccagatcgtggacctgcagaagaaggccaaggcctgtgctgtggagaatgaggagctggtgcagcacctgggcgccgccaaggatgcccagaggcagctgacagctgagctgcgggagctggaggacaagtatgcagagtgcatggagatgctgcacgaggcccaggaggagctgaagaacctgaggaacaagaccatgcccaacaccaccagccgccgctaccacagcctgggcctcttccccatggacagcctggccgctgagattgagggcaccatgaggaaggagctgcagctggaggaggccgagagcccagacatcacccaccagaagagggtgtttgaaacagtgaggaacatcaaccaggtggtgaagcagaggagcctgacccccagccccatgaacatccctggcagcaaccagagcagcgccatgaacagcctgctgagcagctgtgtgtccacccccaggagcagcttctacggcagtgacattggaaatgtggtgctggacaacaagaccaacagcatcatcctggagacagaggccgctgacctgggcaatgatgagaggagcaagaagccaggcaccccaggcaccccaggcagccatgacctggagacagccctgcggcggctgagcctgcggcgggagaactacctgtctgaaagacgcttctttgaggaggagcaggagaggaagctgcaggagctggccgagaagggggagctgcggagcggcagcctgacccccacagagagcatcatgagcctgggcacccacagccgcttcagcgagttcaccggcttcagcggcatgtccttcagcagccgcagctacctgcctgagaagctgcagatcgtgaagcccctggagggcagcgccaccctgcaccactggcagcagctggcccagccccacctgggcggcatcctggaccccaggcctggggtggtgaccaagggcttccgcaccctggatgtggacctggatgaggtgtactgcctgaatgactttgaggaggatgacacaggagaccacatcagcctgccccggctggccaccagcacccctgtgcagcaccctgagaccagcgcccaccaccctgggaagtgcatgagccagaccaacagcaccttcaccttcaccacctgccgcatcctgcaccccagtgatgagctgaccagggtgacccccagcctgaacagcgcccccaccccagcctgtggcagcaccagccacctgaagagcacccctgtggccaccccctgcaccccccggcggctgagcctggccgagagcttcaccaacacccgggagagcaccaccaccatgagcaccagcctgggcctggtgtggctgctgaaggagcggggcatctctgctgctgtgtatgacccccagagctgggaccgggccggccggggcagcctgctgcacagctacacccccaagatggccgtcatccccagcaccccacccaacagccccatgcagacccccaccagcagcccccccagctttgagttcaagtgcaccagccccccctatgacaacttcctggccagcaagccagccagcagcatcctgcgggaggtgcgggagaagaatgtgcgcagcagcgagagccagacagatgtgtctgtgagcaacctgaacctggtggacaaggtgcggcgcttcggcgtggccaaggtggtgaacagcggccgggcccacgtgcccaccctgacagaggagcagggccccctgctgtgtggccccccaggccctgccccagccctggtgccccggggcctggtgcctgagggcctgcccctgcgctgccccaccgtgaccagcgccatcggcggcctgcagctgaacagcggcatcagaagaaacagaagcttccccaccatggtgggcagctccatgcagatgaaggcccctgtgaccctgaccagcggcatcctgatgggcgccaagctgagcaagcagaccagcctgaggtag

SEQ ID NO: 173516 - DNA, 2361 bp, synthetic construct
  misc_feature 1..2361: note = Description of Artificial Sequence: Synthetic coding sequence
  source 1..2361: mol_type = other DNA
atggccctggtgttccagtttggccagcctgtgcgggcccagcccctgcccggcctgtgccacggcaagctgatccgcaccaatgcctgtgatgtgtgcaacagcacagacctgcctgaggtggagatcatcagcctgctggaggagcagctgccccactacaagctgcgggctgacaccatctacggctatgaccatgatgactggctgcacacccccctcatcagcccagatgccaacatcgacctgaccacagagcagatcgaggagaccctgaagtacttcctgctgtgtgccgagcgggtgggccagatgaccaagacctacaatgacattgatgctgtgacccggctgctggaggagaaggagcgggacctggagctggccgcccgcatcggccagagcctgctgaagaagaacaagaccctgacagaaagaaatgagctgctggaggagcaggtggagcacatccgggaggaggtgtcccagctgcggcatgagctgtccatgaaggatgagctgctgcagttctacaccagcgctgctgaggagagcgagcctgagagcgtgtgcagcacccccctgaagagaaatgaaagcagcagctctgtgcagaactacttccacctggacagcctgcagaagaagctgaaggacctggaggaggagaatgtggtgctgcggtctgaggccagccagctgaagacagagaccatcacctatgaggagaaggagcagcagctggtgaatgactgtgtgaaggagctgagagatgccaacgtgcagatcgccagcatcagcgaggagctggccaagaagacagaagatgctgcccggcagcaggaggagatcacccacctgctgagccagatcgtggacctgcagaagaaggccaaggcctgtgctgtggagaatgaggagctggtgcagcacctgggcgccgccaaggatgcccagaggcagctgacagctgagctgcgggagctggaggacaagtatgcagagtgcatggagatgctgcacgaggcccaggaggagctgaagaacctgaggaacaagaccatgcccaacaccaccagccgccgctaccacagcctgggcctcttccccatggacagcctggccgctgagattgagggcaccatgaggaaggagctgcagctggaggaggccgagagcccagacatcacccaccagaagagggtgtttgaaacagtgaggaacatcaaccaggtggtgaagcagaggagcctgacccccagccccatgaacatccctggcagcaaccagagcagcgccatgaacagcctgctgagcagctgtgtgtccacccccaggagcagcttctacggcagtgacattggaaatgtggtgctggacaacaagaccaacagcatcatcctggagacagaggccgctgacctgggcaatgatgagaggagcaagaagccaggcaccccaggcaccccaggcagccatgacctggagacagccctgcggcggctgagcctgcggcgggagaactacctgtctgaaagacgcttctttgaggaggagcaggagaggaagctgcaggagctggccgagaagggggagctgcggagcggcagcctgacccccacagagagcatcatgagcctgggcacccacagccgcttcagcgagttcaccggcttcagcggcatgtccttcagcagccgcagctacctgcctgagaagctgcagatcgtgaagcccctggagggcagcgccaccctgcaccactggcagcagctggcccagccccacctgggcggcatcctggaccccaggcctggggtggtgaccaagggcttccgcaccctggatgtggacctggatgaggtgtactgcctgaatgactttgaggaggatgacacagcccaccaccctgggaagtgcatgagccagaccaacagcaccttcaccttcaccacctgccgcatcctgcaccccagtgatgagctgaccagggtgacccccagcctgaacagcgcccccaccccagcctgtggcagcaccagccacctgaagagcacccctgtggccaccccctgcaccccccggcggctgagcctggccgagagcttcaccaacacccgggagagcaccaccaccatgagcaccagcctgggcctggtgtggctgctgaaggagcggggcatctctgctgctgtgtatgacccccagagctgggacagagctggccggggcagcctgctgcacagccatgaagatgtgacctgtgccaacctgggggagggcggcgtgctgagcagcttcctgctgcggagcacagagacccccaagtgtgtgctgatcccctggattggcaaccagtag

SEQ ID NO: 173517 - DNA, 2745 bp, synthetic construct
  misc_feature 1..2745: note = Description of Artificial Sequence: Synthetic coding sequence
  source 1..2745: mol_type = other DNA
atgagccagagccagaatgccatcttcaccagccccactggagaggagaacctgatgaacagcaaccaccgggacagcgagagcatcacagatgtgtgcagcaatgaagacctgcctgaggtggagctggtgtccctgctggaggagcagctgccccagtaccgcctgaaggtggacaccctcttcctgtatgagaaccaggactggacccagagcccccaccagaggcagcacgccagtgatgccctgagccctgtgctggccgaggagaccttccgctacatgatcctgggcacagacagagtggagcagatgaccaagacctacaatgacatcgacatggtgacccacctgctggccgagcgggaccgggacctggagctggccgcccgcatcggccaggccctgctgaagagaaatcatgtgctgtctgagcagaatgaaagcctggaggagcagctgggccaggcctttgaccaggtgaaccagctgcagcacgagctgtgcaagaaggatgagctgctgagaattgtgtccatcgccagcgaggagagcgagacagacagcagctgcagcacccccctgcgcttcaatgaaagcttcagcctgagccagggcctgctgcagctggagatgctgcaggagaagctgaaggagctggaggaggagaacatggccctgcggagcaaggcctgccacatcaagacagagaccgtgacctatgaggagaaggagcagcagctggtgtctgactgtgtgaaggagctgcgggagaccaatgcccagatgagcaggatgacagaggagctgagcggcaagagtgatgagctgatccgctaccaggaggagctgagcagcctgctgagccagatcgtggacctgcagcacaagctgaaggagcacgtgattgagaaggaggagctgaagctgcacctgcaggccagcaaggatgcccagaggcagctgaccatggagctgcacgagctgcaggacaggaacatggagtgcctgggcatgctgcacgagagccaggaggagatcaaggagctgcggagccgcagcggccccacagcccacctgtacttcagccagagctatggagccttcaccggggagagcctggccgctgagattgagggcaccatgaggaagaagctgagcctggatgaggagagcagcctcttcaagcagaaggcccagcagaagagggtgtttgacacagtgcgcatcgccaatgacacccggggccgcagcatctccttccctgccctgctgcccatccctggcagcaacagaagcagcgtcatcatgacagccaagccctttgagagcggcctgcagcagacagaggacaagagcctgctgaaccagggcagcagcagcgaggaggtggccggcagcagccagaagatgggccagcccggccccagcggggacagcgacctggccacagccctgcaccggctgagcctgcggcggcagaactacctgtctgagaagcagttctttgctgaggagtggcagaggaagatccaggtgctggccgaccagaaggagggcgtgtctggctgtgtgacccccacagagagcctggccagcctgtgcaccacccagagcgagatcacagacctgagcagcgccagctgcctgcggggcttcatgcctgagaagctgcagatcgtgaagcccctggagggcagccagaccctgtaccactggcagcagctggcccagcccaacctgggcaccatcctggaccccaggcctggggtcatcaccaagggcttcacccagctgcctggagatgccatctaccacatcagtgacctggaggaggatgaggaggagggcatcaccttccaggtgcagcagcccctggaggtggaggagaagctgagcaccagcaagcctgtgacaggcatcttcctgccccccatcaccagcgctgggggccctgtgacagtggccacagccaaccctgggaagtgcctgagctgcaccaacagcaccttcaccttcaccacctgccgcatcctgcaccccagcgacatcacccaggtgacccccagcagcggcttccccagcctgagctgtggcagcagcggcagcagcagcagcaacacagctgtgaacagccctgccctgagctaccgcctgagcattggagagagcatcaccaacagaagagacagcaccaccaccttcagcagcaccatgagcctggccaagctgctgcaggagcggggcatcagcgccaaggtgtaccacagccccatcagcgagaaccccctgcagcccctgcccaagagcctggccatccccagcaccccacccaacagccccagccacagcccctgccccagccccctgccctttgagccccgggtgcacctgtctgagaacttcctggccagcaggcctgctgagaccttcctgcaggagatgtatggcctgcggcccagcaggaaccccccagatgtgggccagctgaagatgaacctggtggaccggctgaagaggctgggcatcgcccgggtggtgaagaaccctggggcccaggagaatggccgctgccaggaggccgagatcggcccccagaagccagacagcgctgtgtacctgaacagcggcagcagcctgctgggcggcctgcggaggaaccagagcctgcctgtgatcatgggcagctttgctgcccctgtgtgcaccagcagccccaagatgggcgtgctgaaggaggactag

SEQ ID NO: 173518 - DNA, 936 bp, synthetic construct
  misc_feature 1..936: note = Description of Artificial Sequence: Synthetic coding sequence
  source 1..936: mol_type = other DNA
atgagccagagccagaatgccatcttcaccagccccactggagaggagaacctgatgaacagcaaccaccgggacagcgagagcatcacagatgtgtgcagcaatgaagacctgcctgaggtggagctggtgtccctgctggaggagcagctgccccagtaccgcctgaaggtggacaccctcttcctgtatgagaaccaggactggacccagagcccccaccagaggcagcacgccagtgatgccctgagccctgtgctggccgaggagaccttccgctacatgatcctgggcacagacagagtggagcagatgaccaagacctacaatgacatcgacatggtgacccacctgctggccgagcgggaccgggacctggagctggccgcccgcatcggccaggccctgctgaagagaaatcatgtgctgtctgagcagaatgaaagcctggaggagcagctgggccaggcctttgaccaggtgaaccagctgcagcacgagctgtgcaagaaggatgagctgctgagaattgtgtccatcgccagcgaggagagcgagacagacagcagctgcagcacccccctgcgcttcaatgaaagcttcagcctgagccagggcctgctgcagctggagatgctgcaggagaagctgaaggagctggaggaggagaacatggccctgcggagcaaggcctgccacatcaagacagagaccgtgacctatgaggagaaggagcagcagctggtgtctgactgtgtgaaggagctgcgggagaccaatgcccagatgagcaggatgacagaggagctgagcggcaagagtgatgagctgatccgctaccaggaggagctgagcagcctgctgagccagatcgtggacctgcagcacaagctgaaggaggtgggcctcttcatccacagcacagacatctgctag

SEQ ID NO: 173519 - DNA, 93 bp, synthetic construct
  misc_feature 1..93: note = Description of Artificial Sequence: Synthetic coding sequence
  source 1..93: mol_type = other DNA
atgagccagagccagaatgccatcttcaccagccccactggagaggagaacctgatgaacagcaaccaccgggacagcgagagcatcacctag

SEQ ID NO: 173520 - DNA, 2340 bp, synthetic construct
  misc_feature 1..2340: note = Description of Artificial Sequence: Synthetic coding sequence
  source 1..2340: mol_type = other DNA
atgatcctgggcacagacagagtggagcagatgaccaagacctacaatgacatcgacatggtgacccacctgctggccgagcgggaccgggacctggagctggccgcccgcatcggccaggccctgctgaagagaaatcatgtgctgtctgagcagaatgaaagcctggaggagcagctgggccaggcctttgaccaggtgaaccagctgcagcacgagctgtgcaagaaggatgagctgctgagaattgtgtccatcgccagcgaggagagcgagacagacagcagctgcagcacccccctgcgcttcaatgaaagcttcagcctgagccagggcctgctgcagctggagatgctgcaggagaagctgaaggagctggaggaggagaacatggccctgcggagcaaggcctgccacatcaagacagagaccgtgacctatgaggagaaggagcagcagctggtgtctgactgtgtgaaggagctgcgggagaccaatgcccagatgagcaggatgacagaggagctgagcggcaagagtgatgagctgatccgctaccaggaggagctgagcagcctgctgagccagatcgtggacctgcagcacaagctgaaggagcacgtgattgagaaggaggagctgaagctgcacctgcaggccagcaaggatgcccagaggcagctgaccatggagctgcacgagctgcaggacaggaacatggagtgcctgggcatgctgcacgagagccaggaggagatcaaggagctgcggagccgcagcggccccacagcccacctgtacttcagccagagctatggagccttcaccggggagagcctggccgctgagattgagggcaccatgaggaagaagctgagcctggatgaggagagcagcctcttcaagcagaaggcccagcagaagagggtgtttgacacagtgcgcatcgccaatgacacccggggccgcagcatctccttccctgccctgctgcccatccctggcagcaacagaagcagcgtcatcatgacagccaagccctttgagagcggcctgcagcagacagaggacaagagcctgctgaaccagggcagcagcagcgaggaggtggccggcagcagccagaagatgggccagcccggccccagcggggacagcgacctggccacagccctgcaccggctgagcctgcggcggcagaactacctgtctgagaagcagttctttgctgaggagtggcagaggaagatccaggtgctggccgaccagaaggagggcgtgtctggctgtgtgacccccacagagagcctggccagcctgtgcaccacccagagcgagatcacagacctgagcagcgccagctgcctgcggggcttcatgcctgagaagctgcagatcgtgaagcccctggagggcagccagaccctgtaccactggcagcagctggcccagcccaacctgggcaccatcctggaccccaggcctggggtcatcaccaagggcttcacccagctgcctggagatgccatctaccacatcagtgacctggaggaggatgaggaggagggcatcaccttccaggtgcagcagcccctggaggtggaggagaagctgagcaccagcaagcctgtgacaggcatcttcctgccccccatcaccagcgctgggggccctgtgacagtggccacagccaaccctgggaagtgcctgagctgcaccaacagcaccttcaccttcaccacctgccgcatcctgcaccccagcgacatcacccaggtgacccccagcagcggcttccccagcctgagctgtggcagcagcggcagcagcagcagcaacacagctgtgaacagccctgccctgagctaccgcctgagcattggagagagcatcaccaacagaagagacagcaccaccaccttcagcagcaccatgagcctggccaagctgctgcaggagcggggcatcagcgccaaggtgtaccacagccccatcagcgagaaccccctgcagcccctgcccaagagcctggccatccccagcaccccacccaacagccccagccacagcccctgccccagccccctgccctttgagccccgggtgcacctgtctgagaacttcctggccagcaggcctgctgagaccttcctgcaggagatgtatggcctgcggcccagcaggaaccccccagatgtgggccagctgaagatgaacctggtggaccggctgaagaggctgggcatcgcccgggtggtgaagaaccctgtgcccaagaggatggaggatgcccggcggcagaagctggtgctgaagaaccagatcctgctcttcatctag

SEQ ID NO: 173521 - DNA, 486 bp, synthetic construct
  misc_feature 1..486: note = Description of Artificial Sequence: Synthetic coding sequence
  source 1..486: mol_type = other DNA
atggagaagcccctgactgtgctgcgggtgtccctgtaccaccccaccctgggccccagcgcctttgccaacgtgcccccccggctgcagcacgacaccagccccctgctgctgggccggggccaggatgcccacctgcagctgcagctgccccggctgagcagaagacacctgagcctggagccctacctggagaagggcagcgccctgctggccttctgcctgaaggccctgagcaggaagggctgtgtgtgggtgaatggcctgaccctgcgctacctggagcaggtgcccctgagcacagtgaacagagtgtccttcagcggcatccagatgctggtgcgggtggaggagggcaccagcctggaggcctttgtgtgctacttccacgtgagccccagccccctcatctacagacctgaggccgaggagacagatgagtgggagggcatcagccagggccagcccccacctggcagcggctag

SEQ ID NO: 173522 - DNA, 1749 bp, synthetic construct
  misc_feature 1..1749: note = Description of Artificial Sequence: Synthetic coding sequence
  source 1..1749: mol_type = other DNA
atggccgagttcctggatgaccaggagacccggctgtgtgacaactgcaagaaggagatccctgtgttcaacttcaccatccacgagatccactgccagaggaacatcggcatgtgccccacctgcaaggagcccttccccaagagtgacatggagacccacatggctgctgagcactgccaggtgacctgcaagtgcaacaagaagctggagaagaggctgctgaagaagcatgaggagacagagtgccccctgcggctggccgtgtgccagcactgtgacctggagctgagcatcctgaagctgaaggagcacgaggactactgtggggccaggacagagctgtgtggcaactgtggcagaaatgtgctggtgaaggacctgaagacccaccctgaggtgtgtggccgggagggggaggagaagagaaatgaggtggccatccccccaaatgcctatgatgagagctggggccaggacggcatctggatcgccagccagctgctgcggcagatcgaggccctggacccccccatgaggctgccccggcggcccctgcgggcctttgaaagtgatgtgttccacaacagaaccaccaaccagaggaacatcacagcccaggtgtccatccagaacaacctgtttgaggagcaggagcggcaggagaggaacagaggccagcagccccccaaggagggcggggaggagagcgccaacctggacttcatgctggccctgagcctgcagaatgaaggccaggccagctctgtggccgagcaggacttctggagggctgtgtgtgaggccgaccagagccatggaggccccaggagcctgagtgacatcaagggagctgctgatgagatcatgctgccctgtgagttctgtgaggagctgtacccagaggagctgctgattgaccaccagaccagctgcaaccccagccgggccctgcccagcctgaacacaggcagcagcagcccccggggcgtggaggagccagatgtgatcttccagaacttcctgcagcaggccgccagcaaccagctggacagcctgatgggcctgagcaacagccaccctgtggaggagagcatcatcatcccctgtgagttctgtggggtgcagctggaggaggaggtgctcttccaccaccaggaccagtgtgaccagaggcctgccacagccaccaaccacgtgacagagggcatcccccggctggacagccagccccaggagaccagccctgagctgcccaggagaagagtgcgccaccagggcgacctgagcagcggctacctggatgacaccaagcaggagacagccaacggccccaccagctgcctgccccccagccggcccatcaacaacatgacagccacctacaaccagctgagccgcagcaccagcggcccccggcccggctgccagcccagcagcccctgtgtgcccaagctgagcaacagcgacagccaggacatccagggcaggaacagagacagccagaatggagccatcgcccctggccacgtgtctgtcatccggcccccccagaacctgtacccagaaaatattgtgcccagcttcagccctggccccagcggccgctatggagccagcggccgctctgagggcggcaggaacagccgggtgaccccagctgctgccaactaccgcagcaggacagccaaggccaagcccagcaagcagcagggcgctggagatgctgaggaggaggaggaggagtag

SEQ ID NO: 173523 - DNA, 1749 bp, synthetic construct; identical to SEQ ID NO: 173522
  misc_feature 1..1749: note = Description of Artificial Sequence: Synthetic coding sequence
  source 1..1749: mol_type = other DNA

SEQ ID NO: 173524 - DNA, 408 bp, synthetic construct
  misc_feature 1..408: note = Description of Artificial Sequence: Synthetic coding sequence
  source 1..408: mol_type = other DNA
atggccgagttcctggatgaccaggagacccggctgtgtgacaactgcaagaaggagatccctgtgttcaacttcaccatccacgagatccactgccagaggaacatcggcatgtgccccacctgcaaggagcccttccccaagagtgacatggagacccacatggctgctgagcactgccaggtgacctgcaagtgcaacaagaagctggagaagaggctgctgaagaagcatgaggagacagagtgccccctgcggctggccgtgtgccagcactgtgacctggagctgagcatcctgaagctgaaggagcacgaggactactgtggggccaggacagagctgtgtggcaactgtggcagaaatgtgctggtgaaggacctgaagacccaccctgaggtgtgctag

SEQ ID NO: 173525 - DNA, 495 bp, synthetic construct
  misc_feature 1..495: note = Description of Artificial Sequence: Synthetic coding sequence
  source 1..495: mol_type = other DNA
atggccgagttcctggatgaccaggagacccggctgtgtgacaactgcaagaaggagatccctgtgttcaacttcaccatccacgagatccactgccagaggaacatcggcatgtgccccacctgcaaggagcccttccccaagagtgacatggagacccacatggctgctgagcactgccaggtgacctgcaagtgcaacaagaagctggagaagaggctgctgaagaagcatgaggagacagagtgccccctgcggctggccgtgtgccagcactgtgacctggagctgagcatcctgaagctgaaggagcacgaggactactgtggggccaggacagagctgtgtggcaactgtggcagaaatgtgctggtgaaggacctgaagacccaccctgagctgaagaacaagaggggcaggaaaggaattgaggccaacagcccccccaagagggtggtgaagagggtgcagacctggaccagctgctggccctag

SEQ ID NO: 173526 - DNA, 852 bp, synthetic construct
  misc_feature 1..852: note = Description of Artificial Sequence: Synthetic coding sequence
  source 1..852: mol_type = other DNA
atggccgagttcctggatgaccaggagacccggctgtgtgacaactgcaagaaggagatccctgtgttcaacttcaccatccacgagatccactgccagaggaacatcggcatgtgccccacctgcaaggagcccttccccaagagtgacatggagacccacatggctgctgagcactgccaggtgacctgcaagtgcaacaagaagctggagaagaggctgctgaagaagcatgaggagacagagtgccccctgcggctggccgtgtgccagcactgtgacctggagctgagcatcctgaagctgaaggagcacgaggactactgtggggccaggacagagctgtgtggcaactgtggcagaaatgtgctggtgaaggacctgaagacccaccctgaggtgtgtggccgggagggggaggagaagagaaatgaggtggccatccccccaaatgcctatgatgagagctggggccaggacggcatctggatcgccagccagctgctgcggcagatcgaggccctggacccccccatgaggctgccccggcggcccctgcgggcctttgaaagtgatgtgttccacaacagaaccaccaaccagaggaacatcacagcccaggtgtccatccagaacaacctgtttgaggagcaggagcggcaggagaggaacagaggccagcagccccccaaggagggcggggaggagagcgccaacctggacttcatgctggccctgagcctgcagaatgaaggccaggccagctctgtggccgagcaggacttctggagggctgtgtgtgaggccgaccagagccatggaggccccaggagcctgagtgacatcaagtag

SEQ ID NO: 173527 - DNA, 414 bp, synthetic construct
  misc_feature 1..414: note = Description of Artificial Sequence: Synthetic coding sequence
  source 1..414: mol_type = other DNA
atgggcgcccacctggtgcggcgctacctgggagatgcctctgtggagccagaccccctgcagatgcccaccttccccccagactatggcttccctgagaggaaggagcgggagatggtggccacccagcaggagatgatggatgcccagctgcggctgcagctgcgggactactgtgcccaccacctgatccggctgctgaagtgcaagagggacagcttccccaacttcctggcctgcaagcaggagagacatgactgggactactgtgagcaccgggactatgtgatgaggatgaaggagtttgagcgggagcggcggctgctgcagaggaagaagaggcgggagaagaaggctgctgagctggccaagggccagggccctggagaggtggaccccaaggtggccctgtag

SEQ ID NO: 173528 - DNA, 972 bp, synthetic construct
  misc_feature 1..972: note = Description of Artificial Sequence: Synthetic coding sequence
  source 1..972: mol_type = other DNA
atgatcctgcaggagaccaaggccgcctgtggcatcccagccatcccccactgcagccgggtggagatcctggatgccaagacccgggagaagctgtgcttcctggacaaggtggagccccacgccaccatcgccgagatcaagaacctcttcaccaagacccacccccagtggtacccagcccggcagagcctgcggctggaccccaagggcaagagcctgaaggatgaagatgtgctgcagaagctgcctgtgggcaccacagccaccctgtacttccgggacctgggcgcccagatctcctgggtgaccgtcttcctgacagaatatgccggccccctcttcatctacctgctcttctacttccgggtgcccttcatctacggccacaagtatgacttcaccagcagccgccacacagtggtgcacctggcctgcatctgccacagcttccactacatcaagaggctgctggagaccctgtttgtgcaccgcttcagccacggcaccatgcccctgaggaacatcttcaagaactgcacctactactggggctttgctgcctggatggcctactacatcaaccaccccctgtacaccccacccacctacggggcccagcaggtgaagctggccctggccatcttcgtcatctgccagctgggcaacttcagcatccacatggccctgcgggacctgcggcctgctggcagcaagaccaggaagatcccctaccccaccaagaaccccttcacctggctgttcctgctggtgtcctgccccaactacacctatgaggtgggctcctggattggatttgccatcatgacccagtgcctgcctgtggccctcttcagcctggtgggcttcacccagatgaccatctgggccaagggcaagcacaggagctacctgaaggagttccgggactacccacccctgaggatgcccatcatccccttcctgctgtag

SEQ ID NO: 173529 - DNA, 1014 bp, synthetic construct
  misc_feature 1..1014: note = Description of Artificial Sequence: Synthetic coding sequence
  source 1..1014: mol_type = other DNA
atgagcagcagccctgtgaagaggcagaggatggagagcgccctggaccagctgaagcagttcaccaccgtggtggccgacaccggggacttccacgccattgatgagtacaagccccaggatgccaccaccaaccccagcctcatcctggccgccgcccagatgcctgcctaccaggagctggtggaggaggccatcgcctacggcaggaagctgggcggcagccaggaggaccagatcaagaatgccatcgacaagctgtttgtgctgtttggagctgagatcctgaagaagatccctggccgggtgtccacagaggtggatgcccggctgagctttgacaaggatgccatggtggcccgggcccggcggctcatcgagctgtacaaggaggccggcatcagcaaggaccgcatcctgatcaagctgagcagcacctgggagggcatccaggccggcaaggagctggaggagcagcacggcatccactgcaacatgaccctgctcttctcctttgcccaggccgtggcctgtgccgaggccggcgtgaccctcatcagcccctttgtgggccgcatcctggactggcacgtggccaacacagacaagaagagctatgagcccctggaggaccccggggtgaagtctgtgaccaagatctacaactactacaagaagttctcctacaagaccatcgtgatgggcgccagcttcagaaatactggagagatcaaggccctggccggctgtgacttcctgaccatcagccccaagctgctgggggagctgctgcaggacaatgccaagctggtgcctgtgctgagcgccaaggccgcccaggccagtgacctggagaagatccacctggatgagaagagcttccgctggctgcacaatgaagaccagatggctgtggagaagctgagtgatggcatcaggaagtttgctgctgatgctgtgaagctggagaggatgctgacagagaggatgtttaatgcagaaaatggcaagtag

SEQ ID NO: 173530 - DNA, 957 bp, synthetic construct
  misc_feature 1..957: note = Description of Artificial Sequence: Synthetic coding sequence
  source 1..957: mol_type = other DNA
atgagcagcagccctgtgaagaggcagaggatggagagcgccctggaccagctgaagcagttcaccaccgtggtggccgacaccggggacttccacgccattgatgagtacaagccccaggatgccaccaccaaccccagcctcatcctggccgccgcccagatgcctgcctaccaggagctggtggaggaggccatcgcctacggcaggaagctgggcggcagccaggaggaccagatcaagaatgccatcgacaagctgtttgtgctgtttggagctgagatcctgaagaagatccctggccgggtgtccacagaggtggatgcccggctgagctttgacaaggatgccatggtggcccgggcccggcggctcatcgagctgtacaaggaggccggcatcagcaaggaccgcatcctgatcaagctgagcagcacctgggagggcatccaggccggcaaggagctggaggagcagcacggcatccactgcaacatgaccctgctcttctcctttgcccaggccgtggcctgtgccgaggccggcgtgaccctcatcagcccctttgtgggccgcatcctggactggcacgtggccaacacagacaagaagagctatgagcccctggaggaccccggggtgaagtctgtgaccaagatctacaactactacaagaagttctcctacaagaccatcgtgatgggcgccagcttcagaaatactggagagatcaaggccctggccggctgtgacttcctgaccatcagccccaagctgctgggggagctgctgcaggacaatgccaagctggtgcctgtgctgagcgccaagcccaagcctgtgacctggaagaagagcacctggatgaggagcctgtctgtgggctgcaccaccaggacccgctggctgtggaggagcagcctgactggaagtgccagcctgcccctgatgcagtag

SEQ ID NO: 173531 - DNA, 1302 bp, synthetic construct
  misc_feature 1..1302: note = Description of Artificial Sequence: Synthetic coding sequence
  source 1..1302: mol_type = other DNA
atgaggcagagccaccagctgcccctggtgggcctgctgctcttctccttcatccccagccagctgtgtgagatctgtgaggtgtctgaggagaactacatccggctgaagcccctgctgaacaccatgatccagagcaactacaacagaggcaccagcgctgtgaatgtggtgctgagcctgaagctggtgggcatccagatccagaccctgatgcagaagatgatccagcagatcaagtacaacgtgaagagccggctgagtgatgtgagcagcggggagctggccctgatcatcctggccctgggcgtgtgcagaaatgctgaggagaacctgatctatgactaccacctgattgacaagctggagaacaagttccaggccgagattgagaacatggaggcccacaacggcacccccctgaccaactactaccagctgagcctggatgtgctggccctgtgcctcttcaacggcaactacagcacagctgaggtggtgaaccacttcaccccagagaacaagaactactacttcggcagccagttctctgtggacacaggagccatggctgtgctggccctgacctgtgtgaagaagagcctcatcaatggccagatcaaggcagatgagggcagcctgaagaacatcagcatctacaccaagagcctggtggagaagatcctgtctgagaagaaggaaaatggcctcatcggcaacaccttcagcactggagaggccatgcaggccctgtttgtgtccagtgactactacaatgaaaatgactggaactgccagcagaccctgaacacagtgctgacagagatcagccagggcgccttcagcaaccccaatgctgctgcccaggtgctgcctgccctgatgggcaagaccttcctggacatcaacaaggacagcagctgtgtgtctgccagcggcaacttcaacatctctgcagatgagcccatcaccgtgaccccaccagacagccagagctacatctctgtgaactacagcgtgcgcatcaatgagacctacttcaccaacgtgacagtgctgaatggcagcgtcttcctgtctgtgatggagaaggcccagaagatgaatgacaccatcttcggcttcaccatggaggagaggtcctggggcccctacatcacctgcatccagggcctgtgtgccaacaacaatgacaggacctactgggagctgctgagcggcggggagcccctgagccagggcgccggcagctatgtggtgagaaatggagagaacctggaggtgcgctggagcaagtactag

SEQ ID NO: 173532 - DNA, 1083 bp, synthetic construct
  misc_feature 1..1083: note = Description of Artificial Sequence: Synthetic coding sequence
  source 1..1083: mol_type = other DNA
atggctgctgctgctgctgctggagctggccctgagatggtgcggggccaggtgtttgatgtgggcccccgctacaccaacctgagctacatcggggagggcgcctacggcatggtgtgcagcgcctatgacaacgtgaacaaggtgcgggtggccatcaagaagatcagcccctttgagcaccagacctactgccagaggaccctgcgggagatcaagatcctgctgcgcttcagacatgagaacatcatcggcatcaatgacatcatccgggcccccaccatcgagcagatgaaggatgtgtacatcgtgcaggacctgatggagacagacctgtacaagctgctgaagacccagcacctgagcaatgaccacatctgctacttcctgtaccagatcctgcggggcctgaagtacatccacagcgccaacgtgctgcaccgggacctgaagcccagcaacctgctgctgaacaccacctgtgacctgaagatctgtgactttggcctggcccgggtggccgaccctgaccatgaccacacaggcttcctgacagaatatgtggccacccgctggtaccgggcccctgagatcatgctgaacagcaagggctacaccaagagcattgacatctggagcgtgggctgcatcctggccgagatgctgagcaaccggcccatcttccctgggaagcactacctggaccagctgaaccacatcctgggcatcctgggcagccccagccaggaggacctgaactgcatcatcaacctgaaggccaggaactacctgctgagcctgccccacaagaacaaggtgccctggaacagactcttccccaatgctgacagcaaggccctggacctgctggacaagatgctgaccttcaacccccacaagagaattgaggtggagcaggccctggcccacccctacctggagcagtactatgaccccagtgatgagcccatcgccgaggcccccttcaagtttgacatggagctggatgacctgcccaaggagaagctgaaggagctgatctttgaggagacagcccgcttccagcccggctaccgctcctag

SEQ ID NO: 173533 - DNA, 1203 bp, synthetic construct
  misc_feature 1..1203: note = Description of Artificial Sequence: Synthetic coding sequence
  source 1..1203: mol_type = other DNA
atgaggcacctgggcgccttcctgttcctgctgggcgtgctgggcgccctgacagagatgtgtgagatccctgagatggacagccacctggtggagaagctgggccagcacctgctgccctggatggaccggctgagcctggagcacctgaaccccagcatctacgtgggcctgcggctgagcagcctgcaggccggcaccaaggaggacctgtacctgcacagcctgaagctgggctaccagcagtgcctgctgggcagcgccttctctgaagatgatggagactgccagggcaagcccagcatgggccagctggccctgtacctgctggccctgcgggccaactggcatgaccacaagggccacccccacaccagctactaccagtatggcctgggcatcctggccctgtgcctgcaccagaagagggtgcatgattctgtggtggacaagctgctgtatgctgtggagcccttccaccagggccaccacagcgtggacacagctgccatggccggcctggccttcacctgcctgaagaggagcaacttcaaccctggccggcggcagaggatcaccatggccatcagaacagtgcgggaggagatcctgaaggcccagaccccagagggccactttggaaatgtgtacagcacccccctggccctgcagttcctgatgaccagccccatgagaggagctgagctgggcacagcctgcctgaaggcccgggtggccctgctggccagcctgcaggatggagccttccagaatgccctgatgatcagccagctgctgcctgtgctgaaccacaagacctacatcgacctgatcttcccagactgcctggccccccgggtgatgctggagcctgctgctgagaccatcccccagacccaggagatcatctctgtgaccctgcaggtgctgagcctgctgcccccctaccggcagagcatctctgtgctggccggcagcacagtggaggatgtgctgaagaaggcccacgagctgggcggcttcacctatgagacccaggccagcctgagcggcccctacctgacctctgtgatgggcaaggccgccggggagcgggagttctggcagctgctgcgggaccccaacacccccctgctgcagggcattgctgactaccggcccaaggatggagagaccatcgagctgcggctggtgtcctggtag

SEQ ID NO: 173534 - DNA, 843 bp, synthetic construct
  misc_feature 1..843: note = Description of Artificial Sequence: Synthetic coding sequence
  source 1..843: mol_type = other DNA
atggaggatgaggtggtgcgctttgccaagaagatggacaagatggtgcagaagaagaatgccagcaccagaattggcatgtctgtgaatgccatcaggaagcagagcacagatgaggaggtgaccagcctggccaagagcctcatcaagtcctggaagaagctgctggatggccccagcacagagaaggacctggatgagaagaagaaggagcccgccatcaccagccagaacagccctgaggcccgggaggagagcaccagcagtggaaatgtgagcaacaggaaggatgagaccaatgcccgggacacctacgtgagcagcttcccccgggcccccagcaccagtgacagcgtgcggctgaagtgccgggagatgctggccgccgccctgaggactggagatgactacatcgccatcggggctgatgaggaggagctgggcagccagatcgaggaggccatctaccaggagatccggaacacagacatgaagtacaagaacagagtgcgcagccgcatcagcaacctgaaggatgccaagaaccccaacctgaggaagaatgtgctgtgtggcaacatccccccagacctgtttgccaggatgacagctgaggagatggccagtgatgagctgaaggagatgaggaagaacctgaccaaggaggccatccgggagcaccagatggccaagacaggaggcacccagacagacctcttcacctgtgggaagtgcaagaagaagaactgcacctacacccaggtgcagaccaggtctgcagatgagcccatgaccacctttgtggtgtgcaatgaatgtggcaaccgctggaagttctgctag

SEQ ID NO: 173535 - DNA, 906 bp, synthetic construct
  misc_feature 1..906: note = Description of Artificial Sequence: Synthetic coding sequence
  source 1..906: mol_type = other DNA
atggaggatgaggtggtgcgctttgccaagaagatggacaagatggtgcagaagaagaatgctgctggggccctggacctgctgaaggagctgaagaacatccccatgaccctggagctgctgcagagcacccgcatcggcatgtctgtgaatgccatcaggaagcagagcacagatgaggaggtgaccagcctggccaagagcctcatcaagtcctggaagaagctgctggatggccccagcacagagaaggacctggatgagaagaagaaggagcccgccatcaccagccagaacagccctgaggcccgggaggagagcaccagcagtggaaatgtgagcaacaggaaggatgagaccaatgcccgggacacctacgtgtcctccttcccccgggcccccagcaccagtgacagcgtgcggctgaagtgccgggagatgctggccgccgccctgaggactggagatgactacatcgccatcggggctgatgaggaggagctgggcagccagatcgaggaggccatctaccaggagatccggaacacagacatgaagtacaagaacagagtgcgcagccgcatcagcaacctgaaggatgccaagaaccccaacctgaggaagaatgtgctgtgtggcaacatccccccagacctgtttgccaggatgacagctgaggagatggccagtgatgagctgaaggagatgaggaagaacctgaccaaggaggccatccgggagcaccagatggccaagacaggaggcacccagacagacctcttcacctgtgggaagtgcaagaagaagaactgcacctacacccaggtgcagaccaggtctgcagatgagcccatgaccacctttgtggtgtgcaatgaatgtggcaaccgctggaagttctgctag

SEQ ID NO: 173536 - DNA, 354 bp, synthetic construct
  misc_feature 1..354: note = Description of Artificial Sequence: Synthetic coding sequence
  source 1..354: mol_type = other DNA
atggaggatgaggtggtgcgctttgccaagaagatggacaagatggtgcagaagaagaatgctgctggggccctggacctgctgaaggagctgaagaacatccccatgaccctggagctgctgcaggagatggccagtgatgagctgaaggagatgaggaagaacctgaccaaggaggccatccgggagcaccagatggccaagacaggaggcacccagacagacctcttcacctgtgggaagtgcaagaagaagaactgcacctacacccaggtgcagaccaggtctgcagatgagcccatgaccacctttgtggtgtgcaatgaatgtggcaaccgctggaagttctgctag

SEQ ID NO: 173537 - DNA, 480 bp, synthetic construct
  misc_feature 1..480: note = Description of Artificial Sequence: Synthetic coding sequence
  source 1..480: mol_type = other DNA
atggacaagcccaggaaagaaaatgaggaggagccccagagcgcccccaagacagatgaggagaggcctcctgtggagcacagccctgagaagcagagccctgaggagcagagcagcgaggagcagagcagcgaggaggagttcttccctgaggagctgctgcctgagctgctgcctgagatgctgctgtctgaggagcggcccccccaggagggcctgagcaggaaggacctgtttgagggccggccccccatggagcagcccccctgtggggtgggcaagcacaagctggaggagggcagcttcaaggagcggctggcccggagccggccccagttccggggggacatccacggcaggaacctgagcaatgaggagatgatccaggccgcagatgagctggaggagatgaagagggtgaggaacaagctgatgatcatgcactggaaggccaagaggagccggccctaccccatctag

SEQ ID NO: 173538 - DNA, 480 bp, synthetic construct; identical to SEQ ID NO: 173537
  misc_feature 1..480: note = Description of Artificial Sequence: Synthetic coding sequence
  source 1..480: mol_type = other DNA

SEQ ID NO: 173539 - DNA, 480 bp, synthetic construct; identical to SEQ ID NO: 173537
  misc_feature 1..480: note = Description of Artificial Sequence: Synthetic coding sequence
  source 1..480: mol_type = other DNA

SEQ ID NO: 173540 - DNA, 471 bp, synthetic construct
  misc_feature 1..471: note = Description of Artificial Sequence: Synthetic coding sequence
  source 1..471: mol_type = other DNA
atggacaagcccaggaaagaaaatgaggaggagccccagaggccccggcccatgagaagaggcctgcgctggagcaccctgcccaagagcagcccccccaggagcagcctgcggcgcagcagcccccggcggcgcagcagcttcctgcggagcagctgcctgagcagctgcctgcgctgcagcagcagaagaagcccccaggagggcctgagcaggaaggacctgtttgagggccggccccccatggagcagcccccctgtggggtgggcaagcacaagctggaggagggcagcttcaaggagcggctggcccggagccggccccagttccggggggacatccatggaagaaacctgagcaatgaggagatgatccaggccgcagatgagctggaggagatgaagagggtgaggaacaagctgatgatcatgcactggaaggccaagaggagccggccctaccccatctag

SEQ ID NO: 173541 - DNA, 303 bp, synthetic construct
  misc_feature 1..303: note = Description of Artificial Sequence: Synthetic coding sequence
  source 1..303: mol_type = other DNA
atgcagaagccctgcaaggaaaatgaaggcaagcccaagtgcagcgtgcccaagcgggaggagaagaggccctatggagaatttgagcggcagcagacagagggcaacttccggcagaggctgctgcagagcctggaggagttcaaggaggacatcgactaccgccacttcaaggatgaggagatgacccgggagggagatgagatggagcgctgcctggaggagatccggggcctgaggaagaagttccgggccctgcacagcaaccaccgccacagccgggaccggccctaccccatctag

SEQ ID NO: 173542 - DNA, 303 bp, synthetic construct; identical to SEQ ID NO: 173541
  misc_feature 1..303: note = Description of Artificial Sequence: Synthetic coding sequence
  source 1..303: mol_type = other DNA

SEQ ID NO: 173543 - DNA, 291 bp, synthetic construct
  misc_feature 1..291: note = Description of Artificial Sequence: Synthetic coding sequence
  source 1..291: mol_type = other DNA
atgtatgtgaagctgatcagcagtgatggccacgagttcatcgtgaagcgggagcacgccctgaccagcggcaccatcaaggccatgctgagcggccctggccagtttgctgaaaatgagaccaatgaggtgaacttccgggagatccccagccacgtgctgagcaaggtgtgcatgtacttcacctacaaggtgcgctacaccaacagcagcacagagatccctgagttccccatcgcccctgagatcgccctggagctgctgatggccgccaacttcctggactgctag

SEQ ID NO: 173544 - DNA, 339 bp, synthetic construct
  misc_feature 1..339: note = Description of Artificial Sequence: Synthetic coding sequence
  source 1..339: mol_type = other DNA
atggatggagaggagaagacctacggcggctgtgagggcccagatgccatgtatgtgaagctgatcagcagtgatggccacgagttcatcgtgaagcgggagcacgccctgaccagcggcaccatcaaggccatgctgagcggccctggccagtttgctgaaaatgagaccaatgaggtgaacttccgggagatccccagccacgtgctgagcaaggtgtgcatgtacttcacctacaaggtgcgctacaccaacagcagcacagagatccctgagttccccatcgcccctgagatcgccctggagctgctgatggccgccaacttcctggactgctag

SEQ ID NO: 173545 - DNA, 339 bp, synthetic construct; identical to SEQ ID NO: 173544
  misc_feature 1..339: note = Description of Artificial Sequence: Synthetic coding sequence
  source 1..339: mol_type = other DNA

SEQ ID NO: 173546 - DNA, 339 bp, synthetic construct; identical to SEQ ID NO: 173544
  misc_feature 1..339: note = Description of Artificial Sequence: Synthetic coding sequence
  source 1..339: mol_type = other DNA

SEQ ID NO: 173547 - DNA, 339 bp, synthetic construct; identical to SEQ ID NO: 173544
  misc_feature 1..339: note = Description of Artificial Sequence: Synthetic coding sequence
  source 1..339: mol_type = other DNA

SEQ ID NO: 173548 - DNA, 339 bp, synthetic construct; identical to SEQ ID NO: 173544
  misc_feature 1..339: note = Description of Artificial Sequence: Synthetic coding sequence
  source 1..339: mol_type = other DNA

SEQ ID NO: 173549 - DNA, 339 bp, synthetic construct; identical to SEQ ID NO: 173544
  misc_feature 1..339: note = Description of Artificial Sequence: Synthetic coding sequence
  source 1..339: mol_type = other DNA

SEQ ID NO: 173550 - DNA, 2397 bp, synthetic construct
  misc_feature 1..2397: note = Description of Artificial Sequence: Synthetic coding sequence
  source 1..2397: mol_type = other DNA
atgcacggcggccgcagctgtggccccaggacccggcgggagcccagcagtggagaggaggccgcccctgtgacagccatggctgctgagagcgccctgcaggtggtggagaagctgcaggcccggctggccgccaacccagaccccaagaagctgctgaagtacctgaagaagctgagcaccctgcccatcaccgtggacatcctggccgagaccggggtgggcaagacagtgaacagcctgaggaagcatgagcacgtgggcagctttgcccgggacctggtggcccagtggaagaagctggtgcctgtggagagaaatgctgagccagatgagcaggactttgagaagagcaacagcaggaagaggcccagagatgccctgcagaaggaggaggagatggagggggactaccaggagacctggaaggccaccggcagccgcagctacagcccagaccaccggcagaagaagcacaggaagctgtctgagctggagcggccccacaaggtgagccacggccatgaaagaagagatgagaggaagcgctgccacaggatgagccccacctacagcagtgaccctgagagcagtgactatggccacgtgcagagcccccccagctgcaccagcccccaccagatgtatgtggaccactaccgcagcctggaggaggaccaggagcccatcgtgagccaccagaagccaggcaagggccacagcaatgccttccaggaccggctgggcgccagccaggagcggcacctgggggagccccacggcaagggcgtggtgtcccagaacaaggagcacaagagcagccacaaggacaagaggcctgtggatgccaagagtgatgagaaggcctctgtggtgtcccgggagaagagccacaaggccctgagcaaggaggagaacagaagacctccttctggggacaatgcccgggagaagccacccagcagcggcgtgaagaaggagaaggaccgggagggcagcagcctgaagaagaagtgcctgcccccatctgaggccgccagtgacaaccacctgaagaagcccaagcaccgggaccctgagaaggccaagctggacaagagcaagcagggcctggacagctttgacaccgggaagggggccggggacctgctgcccaaggtgaaggagaagggcagcaacaacctgaagaccccagagggcaaggtgaagaccaacctggacaggaagagcctgggcagcctgcccaaggtggaggagacagacatggaggatgaatttgagcagcccaccatgagctttgagagctacctgtcctatgaccagcccaggaagaagaagaagaagatcgtgaagaccagcgccacagccctgggggacaagggcctgaagaagaatgacagcaagagcacaggcaagaacctggacagcgtgcagaagctgcccaaggtgaacaagaccaagtctgagaagccagctggagctgacctggccaagctgaggaaggtgcctgatgtgctgcctgtgctgcctgacctgcccctgcctgccatccaggccaactaccggcccctgcccagcctggagctgatcagcagcttccagcccaagaggaaggccttcagcagcccccaggaggaggaggaggccggcttcaccggccgcaggatgaacagcaagatgcaggtgtacagcggcagcaaatgtgcctacctgcccaagatgatgaccctgcaccagcagtgcatccgggtgctgaagaacaacatcgacagcatctttgaggtgggcggcgtgccctacagcgtgctggagcctgtgctggagcgctgcaccccagaccagctgtaccgcatcgaggagtacaaccacgtgctgattgaggagacagaccagctgtggaaggtgcactgccaccgggacttcaaggaggagaggcctgaggagtatgaatcctggagggagatgtacctgcggctgcaggatgcccgggagcagaggctgcgggtgctgaccaagaacatccagtttgcccacgccaacaagcccaagggccggcaggccaagatggcctttgtgaacagcgtggccaagcccccaagagatgtgagaagacggcaggagaagtttggaactggaggagctgctgtgcctgagaagatcaagatcaagccagccccctaccccatgggcagcagccacgccagcgccagcagcatctccttcaaccccagccctgaggagcccgcctatgatggccccagcaccagcagcgcccacctggcccctgtggtgagcagcacagtgtcctatgaccccaggaagcccaccgtgaagaagatcgcccccatgatggccaagaccatcaaggccttcaagaaccgcttcagcagaagatag

SEQ ID NO: 173551 - DNA, 3297 bp, synthetic construct
  misc_feature 1..3297: note = Description of Artificial Sequence: Synthetic coding sequence
  source 1..3297: mol_type = other DNA
atggccgagagaggaggagatggaggagagagcgagcgcttcaaccctggagagctgaggatggcccagcagcaggccctgcgcttccggggccctgcccctcctccaaatgctgtgatgaggggccccccacccctgatgaggcctcctcctccatttggcatgatgaggggccccccacctccaccccggcccccatttggccggcccccatttgaccccaacatgccacccatgcctcctcctgggggcatccccccacccatgggccccccccacctgcagaggcctcccttcatgcccccacccatgagctccatgcctcctcctcctggcatgatgttccccccaggcatgcctcctgtgacagcccctggcaccccagccctgcccccaacagaggagatctgggtggagaacaagaccccagatggcaaggtgtactactacaatgcccggacccgggagagcgcctggaccaagccagatggagtgaaggtgatccagcagagcgagctgacccccatgctggccgcccaggcccaggtgcaggcccaggcccaggcccaggcccaggcccaggcccaggcccaggcccaggcccaggcccaggcccaggcccaggcccaggcccaggcccaggcccaggcccaggcccaggcccaggcccaggcccaggcccaggcccaggcccaggcccaggcccaggcccaggcccaggcccaggtgcaggcccaggtgcaggcccaggtgcaggcccaggccgtgggcgccagcacccccaccaccagcagccctgccccagctgtgtccaccagcaccagcagcagcacccccagcagcaccaccagcaccaccaccacagccacctctgtggcccagacagtgtccacccccaccacccaggaccagacccccagcagcgctgtgtctgtggccacccccaccgtgtctgtgtccaccccagcccccacagccacccctgtgcagacagtgccccagccccacccccagaccctgcccccagctgtgccccacagcgtgccccagcccaccacagccatcccagccttcccccctgtgatggtgccccccttccgggtgcccctgcccggcatgcccatccccctgcccggggtggccatgatgcagatcgtgtcctgcccctacgtgaagacagtggccaccaccaagacaggagtgctgcccggcatggccccacccatcgtgcccatgatccacccccaggtggccatcgccgccagccctgccaccctggccggggccacagctgtgtctgagtggacagagtacaagacagcagatggcaagacctactactacaacaacagaaccctggagagcacctgggagaagccccaggagctgaaggagaaggagaagctggaggagaagatcaaggagcccatcaaggagcccagcgaggagcccctgcccatggagacagaggaggaggaccccaaggaggagcccatcaaggagatcaaggaggagcccaaggaggaggagatgacagaggaggagaaggccgcccagaaggccaagcctgtggccacagcccccatccctggcaccccctggtgtgtggtgtggacaggagatgagagggtcttcttctacaaccccaccacccggctgtccatgtgggacagaccagatgacctgattggccgggcagatgtggacaagatcatccaggagcccccccacaagaagggcatggaggagctgaagaagctgcggcaccccacccccaccatgctgagcatccagaagtggcagttctccatgtctgccatcaaggaggagcaggagctgatggaggagatcaatgaagatgagcctgtgaaggccaagaagaggaagagagatgacaacaaggacatcgacagcgagaaggaggccgccatggaggccgagatcaaggccgcccgggagcgggccatcgtgcccctggaggccaggatgaagcagttcaaggacatgctgctggagcggggcgtgtctgccttcagcacctgggagaaggagctgcacaagatcgtgtttgacccccgctacctgctgctgaaccccaaggagaggaagcaggtgtttgaccagtatgtgaagaccagggctgaggaggagcggcgggagaagaagaacaagatcatgcaggccaaggaggacttcaagaagatgatggaggaggccaagttcaacccccgggccaccttcagcgagtttgctgccaagcacgccaaggacagccgcttcaaggccatcgagaagatgaaggaccgggaggccctcttcaatgaatttgtggccgccgccaggaagaaggagaaggaggacagcaagaccagaggagagaagatcaagagtgacttctttgagctgctgagcaaccaccacctggacagccagagccgctggagcaaggtgaaggacaaggtggagagtgacccccgctacaaggctgtggacagcagctccatgagagaagatctcttcaagcagtacatcgagaagatcgccaagaacctggacagcgagaaggagaaggagctggagcggcaggccagaattgaggccagcctgcgggagcgggagcgggaggtgcagaaggcccggtctgagcagaccaaggagattgaccgggagcgggagcagcacaagcgggaggaggccatccagaacttcaaggccctgctgagtgacatggtgcgcagcagtgatgtgtcctggagcgacaccaggaggaccctgaggaaggaccaccgctgggagagcggcagcctgctggagcgggaggagaaggagaagctgttcaatgagcacatcgaggccctgaccaagaagaagcgggagcacttccggcagctgctggatgagaccagcgccatcaccctgaccagcacctggaaggaggtgaagaagatcatcaaggaggacccccgctgcatcaagttcagcagcagtgacaggaagaagcagcgggagtttgaggagtacatccgggacaagtacatcacagccaaggctgacttccgcaccctgctgaaggagaccaagttcatcacctaccgcagcaagaagctgatccaggagagtgaccagcacctgaaggatgtggagaagatcctgcagaatgacaagcgctacctggtgctggactgtgtgcctgaggagaggaggaagctgattgtggcctacgtggatgacctggaccggcggggccccccacctccacccacagccagcgagcccacccggcgcagcaccaagtag

SEQ ID NO: 173552 - DNA, 3234 bp, synthetic construct
  misc_feature 1..3234: note = Description of Artificial Sequence: Synthetic coding sequence
  source 1..3234: mol_type = other DNA
atggccgagagaggaggagatggaggagagagcgagcgcttcaaccctggagagctgaggatggcccagcagcaggccctgcgcttccggggccctgcccctcctccaaatgctgtgatgaggggccccccacccctgatgaggcctcctcctccatttggcatgatgaggggccccccacctccaccccggcccccatttggccggcccccatttgaccccaacatgccacccatgcctcctcctgggggcatccccccacccatgggccccccccacctgcagaggcctcccttcatgcccccacccatgagctccatgcctcctcctcctggcatgatgttccccccaggcatgcctcctgtgacagcccctggcaccccagccctgcccccaacagaggagatctgggtggagaacaagaccccagatggcaaggtgtactactacaatgcccggacccgggagagcgcctggaccaagccagatggagtgaaggtgatccagcagagcgagctgacccccatgctggccgcccaggcccaggtgcaggcccaggcccaggcccaggcccaggcccaggcccaggcccaggcccaggcccaggcccaggcccaggcccaggcccaggcccaggcccaggcccaggcccaggcccaggcccaggcccaggcccaggcccaggcccaggcccaggcccaggcccaggcccaggcccaggcccaggtgcaggcccaggtgcaggcccaggtgcaggcccaggccgtgggcgccagcacccccaccaccagcagccctgccccagctgtgtccaccagcaccagcagcagcacccccagcagcaccaccagcaccaccaccacagccacctctgtggcccagacagtgtccacccccaccacccaggaccagacccccagcagcgctgtgtctgtggccacccccaccgtgtctgtgtccaccccagcccccacagccacccctgtgcagacagtgccccagccccacccccagaccctgcccccagctgtgccccacagcgtgccccagcccaccacagccatcccagccttcccccctgtgatggtgccccccttccgggtgcccctgcccggcatgcccatccccctgcccggggtgctgcccggcatggccccacccatcgtgcccatgatccacccccaggtggccatcgccgccagccctgccaccctggccggggccacagctgtgtctgagtggacagagtacaagacagcagatggcaagacctactactacaacaacagaaccctggagagcacctgggagaagccccaggagctgaaggagaaggagaagctggaggagaagatcaaggagcccatcaaggagcccagcgaggagcccctgcccatggagacagaggaggaggaccccaaggaggagcccatcaaggagatcaaggaggagcccaaggaggaggagatgacagaggaggagaaggccgcccagaaggccaagcctgtggccacagcccccatccctggcaccccctggtgtgtggtgtggacaggagatgagagggtcttcttctacaaccccaccacccggctgtccatgtgggacagaccagatgacctgattggccgggcagatgtggacaagatcatccaggagcccccccacaagaagggcatggaggagctgaagaagctgcggcaccccacccccaccatgctgagcatccagaagtggcagttctccatgtctgccatcaaggaggagcaggagctgatggaggagatcaatgaagatgagcctgtgaaggccaagaagaggaagagagatgacaacaaggacattgattctgagaaggaggccgccatggaggccgagatcaaggccgcccgggagcgggccatcgtgcccctggaggccaggatgaagcagttcaaggacatgctgctggagcggggcgtgtctgccttcagcacctgggagaaggagctgcacaagatcgtgtttgacccccgctacctgctgctgaaccccaaggagaggaagcaggtgtttgaccagtatgtgaagaccagggctgaggaggagcggcgggagaagaagaacaagatcatgcaggccaaggaggacttcaagaagatgatggaggaggccaagttcaacccccgggccaccttcagcgagtttgctgccaagcacgccaaggacagccgcttcaaggccatcgagaagatgaaggaccgggaggccctcttcaatgaatttgtggccgccgccaggaagaaggagaaggaggacagcaagaccagaggagagaagatcaagagtgacttctttgagctgctgagcaaccaccacctggacagccagagccgctggagcaaggtgaaggacaaggtggagagtgacccccgctacaaggctgtggacagcagctccatgagggaggacctcttcaagcagtacatcgagaagatcgccaagaacctggacagcgagaaggagaaggagctggagcggcaggcccgcatcgaggccagcctgcgggagcgggagcgggaggtgcagaaggcccggtctgagcagaccaaggagattgaccgggagcgggagcagcacaagcgggaggaggccatccagaacttcaaggccctgctgagtgacatggtgcgcagcagtgatgtgtcctggagcgacaccaggaggaccctgaggaaggaccaccgctgggagagcggcagcctgctggagcgggaggagaaggagaagctgttcaatgagcacatcgaggccctgaccaagaagaagcgggagcacttccggcagctgctggatgagaccagcgccatcaccctgaccagcacctggaaggaggtgaagaagatcatcaaggaggacccccgctgcatcaagttcagcagcagtgacaggaagaagcagcgggagtttgaggagtacatccgggacaagtacatcacagccaaggctgacttccgcaccctgctgaaggagaccaagttcatcacctaccgcagcaagaagctgatccaggagagtgaccagcacctgaaggatgtggagaagatcctgcagaatgacaagcgctacctggtgctggactgtgtgcctgaggagaggaggaagctgattgtggcctacgtggatgacctggacagaagaggccccccacctccacccacagccagcgagcccaccaggaggagcaccaagtag

SEQ ID NO: 173553 - DNA, 2049 bp, synthetic construct
  misc_feature 1..2049: note = Description of Artificial Sequence: Synthetic coding sequence
  source 1..2049: mol_type = other DNA
atgaacccccagcagcagaggatggccgccatcggcacagacaaggagctgagtgacctgctggacttcagcgccatgttcagcccccctgtgaacagcggcaagacccggcccaccaccctgggcagcagccagttcagcggcagcggcattgatgagcggggcggcaccacctcctggggcaccagcggccagcccagccccagctatgacagcagccggggcttcacagacagcccccactacagcgaccacctgaatgacagccggctgggcgcccacgagggcctgagccccacccccttcatgaacagcaacctgatgggcaagaccagcgagcggggcagcttcagcctgtacagccgggacaccggcctgcccggctgccagagcagcctgctgcggcaggacctgggcctgggcagccctgcccagctgagcagcagcggcaagccaggcacagcctactacagcttcagcgccaccagcagcagaagaagacccctgcatgacagcgctgccctggaccccctgcaggccaagaaggtgaggaaggtgcccccaggcctgcccagctctgtgtatgcccccagccccaacagtgatgacttcaaccgggagagccccagctaccccagccccaagccacccacctccatgtttgccagcaccttcttcatgcaggacggcacccacaacagcagtgacctgtggagcagcagcaatggcatgagccagcccggctttggaggcatcctgggcaccagcaccagccacatgagccagagcagcagctatggcaacctgcacagccatgaccggctgagctacccaccccacagcgtgagccccacagacatcaacaccagcctgccccccatgagcagcttccaccggggcagcaccagcagcagcccctacgtggccgccagccacaccccacccatcaatggaagtgacagcatcctgggcaccagaggaaatgctgctggcagcagccagacaggagatgccctgggcaaggccctggccagcatctacagcccagaccacaccagcagcagcttccccagcaaccccagcacccctgtgggcagccccagccccctgaccggcaccagccagtggcccaggcctgggggccaggcccccagcagccccagctatgagaacagcctgcacagcctgcagagcaggatggaggaccggctggaccggctggatgatgccatccacgtgctgagaaatcatgctgtgggccccagcaccagcctgcctgctggccacagcgacatccacagcctgctgggccccagccacaatgcccccatcggcagcctgaacagcaactatggaggcagcagcctggtggccagcagccgcagcgcctccatggtgggcacccacagagaagattctgtgtccctgaatggaaaccacagcgtgctgagcagcacagtgaccaccagcagcacagacctgaaccacaagacccaggagaactaccggggcggcctgcagagccagagcggcaccgtggtgaccacagagatcaagacagagaacaaggagaaggatgagaacctgcacgagccccccagcagtgatgacatgaagagtgatgatgagagcagccagaaggacatcaaggtgagcagccggggccgcaccagcagcaccaatgaagatgaggacctgaaccctgagcagaagattgaaagagagaaggagaggaggatggccaacaatgcccgggagcggctgcgggtgcgggacatcaatgaggccttcaaggagctgggccgcatgtgccagctgcacctgaagtctgagaagccccagaccaagctgctgatcctgcaccaggccgtggccgtcatcctgagcctggagcagcaggtgcgggagaggaacctgaaccccaaggccgcctgcctgaagaggcgggaggaggagaaggtgtctgctgtgtctgctgagccccccaccaccctgcccggcacccaccctggcctgtctgagaccaccaaccccatgggccacatgtag

SEQ ID NO: 173554 - DNA, 2121 bp, synthetic construct
  misc_feature 1..2121: note = Description of Artificial Sequence: Synthetic coding sequence
  source 1..2121: mol_type = other DNA
atgaacccccagcagcagaggatggccgccatcggcacagacaaggagctgagtgacctgctggacttcagcgccatgttcagcccccctgtgaacagcggcaagacccggcccaccaccctgggcagcagccagttcagcggcagcggcattgatgagcggggcggcaccacctcctggggcaccagcggccagcccagccccagctatgacagcagccggggcttcacagacagcccccactacagcgaccacctgaatgacagccggctgggcgcccacgagggcctgagccccacccccttcatgaacagcaacctgatgggcaagaccagcgagcggggcagcttcagcctgtacagccgggacaccggcctgcccggctgccagagcagcctgctgcggcaggacctgggcctgggcagccctgcccagctgagcagcagcggcaagccaggcacagcctactacagcttcagcgccaccagcagcagaagaagacccctgcatgacagcgctgccctggaccccctgcaggccaagaaggtgaggaaggtgcccccaggcctgcccagctctgtgtatgcccccagccccaacagtgatgacttcaaccgggagagccccagctaccccagccccaagccacccacctccatgtttgccagcaccttcttcatgcaggacggcacccacaacagcagtgacctgtggagcagcagcaatggcatgagccagcccggctttggaggcatcctgggcaccagcaccagccacatgagccagagcagcagctatggcaacctgcacagccatgaccggctgagctacccaccccacagcgtgagccccacagacatcaacaccagcctgccccccatgagcagcttccaccggggcagcaccagcagcagcccctacgtggccgccagccacaccccacccatcaatggaagtgacagcatcctgggcaccagaggaaatgctgctggcagcagccagacaggagatgccctgggcaaggccctggccagcatctacagcccagaccacaccagcagcagcttccccagcaaccccagcacccctgtgggcagccccagccccctgaccggcaccagccagtggcccaggcctgggggccaggcccccagcagccccagctatgagaacagcctgcacagcctgaagaacagagtggagcagcagctgcacgagcacctgcaggatgccatgtccttcctgaaggatgtgtgtgagcagagcaggatggaggaccggctggaccggctggatgatgccatccacgtgctgagaaatcatgctgtgggccccagcaccagcctgcctgctggccacagcgacatccacagcctgctgggccccagccacaatgcccccatcggcagcctgaacagcaactatggaggcagcagcctggtggccagcagccgcagcgcctccatggtgggcacccacagagaagattctgtgtccctgaatggaaaccacagcgtgctgagcagcacagtgaccaccagcagcacagacctgaaccacaagacccaggagaactaccggggcggcctgcagagccagagcggcaccgtggtgaccacagagatcaagacagagaacaaggagaaggatgagaacctgcacgagccccccagcagtgatgacatgaagagtgatgatgagagcagccagaaggacatcaaggtgagcagccggggccgcaccagcagcaccaatgaagatgaggacctgaaccctgagcagaagattgaaagagagaaggagaggaggatggccaacaatgcccgggagcggctgcgggtgcgggacatcaatgaggccttcaaggagctgggccgcatgtgccagctgcacctgaagtctgagaagccccagaccaagctgctgatcctgcaccaggccgtggccgtcatcctgagcctggagcagcaggtgcgggagaggaacctgaaccccaaggccgcctgcctgaagaggcgggaggaggagaaggtgtctgctgtgtctgctgagccccccaccaccctgcccggcacccaccctggcctgtctgagaccaccaaccccatgggccacatgtag

SEQ ID NO: 173555 - DNA, 2109 bp, synthetic construct
  misc_feature 1..2109: note = Description of Artificial Sequence: Synthetic coding sequence
  source 1..2109: mol_type = other DNA
atgaacccccagcagcagaggatggccgccatcggcacagacaaggagctgagtgacctgctggacttcagcgccatgttcagcccccctgtgaacagcggcaagacccggcccaccaccctgggcagcagccagttcagcggcagcggcaccatccacgagatgaagcagctgaacagcaaggcccggcagaagggccagaggatcaagggcttcacagacagcccccactacagcgaccacctgaatgacagccggctgggcgcccacgagggcctgagccccacccccttcatgaacagcaacctgatgggcaagaccagcgagcggggcagcttcagcctgtacagccgggacaccggcctgcccggctgccagagcagcctgctgcggcaggacctgggcctgggcagccctgcccagctgagcagcagcggcaagccaggcacagcctactacagcttcagcgccaccagcagcagaagaagacccctgcatgacagcgctgccctggaccccctgcaggccaagaaggtgaggaaggtgcccccaggcctgcccagctctgtgtatgcccccagccccaacagtgatgacttcaaccgggagagccccagctaccccagccccaagccacccacctccatgtttgccagcaccttcttcatgcaggacggcacccacaacagcagtgacctgtggagcagcagcaatggcatgagccagcccggctttggaggcatcctgggcaccagcaccagccacatgagccagagcagcagctatggcaacctgcacagccatgaccggctgagctacccaccccacagcgtgagccccacagacatcaacaccagcctgccccccatgagcagcttccaccggggcagcaccagcagcagcccctacgtggccgccagccacaccccacccatcaatggaagtgacagcatcctgggcaccagaggaaatgctgctggcagcagccagacaggagatgccctgggcaaggccctggccagcatctacagcccagaccacaccagcagcagcttccccagcaaccccagcacccctgtgggcagccccagccccctgaccggcaccagccagtggcccaggcctgggggccaggcccccagcagccccagctatgagaacagcctgcacagcctgaagaacagagtggagcagcagctgcacgagcacctgcaggatgccatgtccttcctgaaggatgtgtgtgagcagagcaggatggaggaccggctggaccggctggatgatgccatccacgtgctgagaaatcatgctgtgggccccagcaccagcctgcctgctggccacagcgacatccacagcctgctgggccccagccacaatgcccccatcggcagcctgaacagcaactatggaggcagcagcctggtggccagcagccgcagcgcctccatggtgggcacccacagagaagattctgtgtccctgaatggaaaccacagcgtgctgagcagcacagtgaccaccagcagcacagacctgaaccacaagacccaggagaactaccggggcggcctgcagagccagagcggcaccgtggtgaccacagagatcaagacagagaacaaggagaaggatgagaacctgcacgagccccccagcagtgatgacatgaagagtgatgatgagagcagccagaaggacatcaaggtgagcagccggggccgcaccagcagcaccaatgaagatgaggacctgaaccctgagcagaagattgaaagagagaaggagaggaggatggccaacaatgcccgggagcggctgcgggtgcgggacatcaatgaggccttcaaggagctgggccgcatgtgccagctgcacctgaagtctgagaagccccagaccaagctgctgatcctgcaccaggccgtggccgtcatcctgagcctggagcagcaggtgcgggagaggaacctgaaccccaaggccgcctgcctgaagaggcgggaggaggagaaggtgtctgctgtgtctgctgagccccccaccaccctgcccggcacccaccctggcctgtctgagaccaccaaccccatgggccacatgtag

SEQ ID NO: 173556 - DNA, 1341 bp, synthetic construct
  misc_feature 1..1341: note = Description of Artificial Sequence: Synthetic coding sequence
  source 1..1341: mol_type = other DNA
atgggcaagcgctacatgcaccacccccagatccagatgatcagcacagtgaacctgctggtgatccacctgctgagccaccagcctgtgtgcagcctggccctgagcctgtgcaagagctacccaccccacagcgtgagccccacagacatcaacaccagcctgccccccatgagcagcttccaccggggcagcaccagcagcagcccctacgtggccgccagccacaccccacccatcaatggaagtgacagcatcctgggcaccagaggaaatgctgctggcagcagccagacaggagatgccctgggcaaggccctggccagcatctacagcccagaccacaccagcagcagcttccccagcaaccccagcacccctgtgggcagccccagccccctgaccggcaccagccagtggcccaggcctgggggccaggcccccagcagccccagctatgagaacagcctgcacagcctgcagagcaggatggaggaccggctggaccggctggatgatgccatccacgtgctgagaaatcatgctgtgggccccagcaccagcctgcctgctggccacagcgacatccacagcctgctgggccccagccacaatgcccccatcggcagcctgaacagcaactatggaggcagcagcctggtggccagcagccgcagcgcctccatggtgggcacccacagagaagattctgtgtccctgaatggaaaccacagcgtgctgagcagcacagtgaccaccagcagcacagacctgaaccacaagacccaggagaactaccggggcggcctgcagagccagagcggcaccgtggtgaccacagagatcaagacagagaacaaggagaaggatgagaacctgcacgagccccccagcagtgatgacatgaagagtgatgatgagagcagccagaaggacatcaaggtgagcagccggggccgcaccagcagcaccaatgaagatgaggacctgaaccctgagcagaagattgaaagagagaaggagaggaggatggccaacaatgcccgggagcggctgcgggtgcgggacatcaatgaggccttcaaggagctgggccgcatgtgccagctgcacctgaagtctgagaagccccagaccaagctgctgatcctgcaccaggccgtggccgtcatcctgagcctggagcagcaggtgcgggagaggaacctgaaccccaaggccgcctgcctgaagaggcgggaggaggagaaggtgtctgctgtgtctgctgagccccccaccaccctgcccggcacccaccctggcctgtctgagaccaccaaccccatgggccacatgtag

SEQ ID NO: 173557 - DNA, 2046 bp, synthetic construct
  misc_feature 1..2046: note = Description of Artificial Sequence: Synthetic coding sequence
  source 1..2046: mol_type = other DNA
atggccgccttctctgtgctgcggccccgggtgcccggcagcagcggcacctgggccgctgaccctgatgccagcacagctgtgagccccagcctgcgctttggaggccgggagcccgcccggcccacccggggcggggccaccaagtggcccaagatgaacccccagcagcagaggatggccgccatcggcacagacaaggagctgagtgacctgctggacttcagcgccatgttcagcccccctgtgaacagcggcaagacccggcccaccaccctgggcagcagccagttcagcggcagcggcattgatgagcggggcggcaccacctcctggggcaccagcggccagcccagccccagctatgacagcagccggggcttcacagacagcccccactacagcgaccacctgaatgacagccggctgggcgcccacgagggcctgagccccacccccttcatgaacagcaacctgatgggcaagaccagcgagcggggcagcttcagcctgtacagccgggacaccggcctgcccggctgccagagcagcctgctgcggcaggacctgggcctgggcagccctgcccagctgagcagcagcggcaagccaggcacagcctactacagcttcagcgccaccagcagcagaagaagacccctgcatgacagcgctgccctggaccccctgcaggccaagaaggtgaggaaggtgcccccaggcctgcccagctctgtgtatgcccccagccccaacagtgatgacttcaaccgggagagccccagctaccccagccccaagccacccacctccatgtttgccagcaccttcttcatgcaggacggcacccacaacagcagtgacctgtggagcagcagcaatggcatgagccagcccggctttggaggcatcctgggcaccagcaccagccacatgagccagagcagcagctatggcaacctgcacagccatgaccggctgagctacccaccccacagcgtgagccccacagacatcaacaccagcctgccccccatgagcagcttccaccggggcagcaccagcagcagcccctacgtggccgccagccacaccccacccatcaatggaagtgacagcatcctgggcaccagaggaaatgctgctggcagcagccagacaggagatgccctgggcaaggccctggccagcatctacagcccagaccacaccagcagcagcttccccagcaaccccagcacccctgtgggcagccccagccccctgaccggcaccagccagtggcccaggcctgggggccaggcccccagcagccccagctatgagaacagcctgcacagcctgcagagcaggatggaggaccggctggaccggctggatgatgccatccacgtgctgagaaatcatgctgtgggccccagcaccagcctgcctgctggccacagcgacatccacagcctgctgggccccagccacaatgcccccatcggcagcctgaacagcaactatggaggcagcagcctggtggccagcagccgcagcgcctccatggtgggcacccacagagaagattctgtgtccctgaatggaaaccacagcgtgctgagcagcacagtgaccaccagcagcacagacctgaaccacaagacccaggagaactaccggggcggcctgcagagccagagcggcaccgtggtgaccacagagatcaagacagagaacaaggagaaggatgagaacctgcacgagccccccagcagtgatgacatgaagagtgatgatgagagcagccagaaggacatcaaggtgagcagccggggccgcaccagcagcaccaatgaagatgaggacctgaaccctgagcagaagattgaaagagagaaggagaggaggatggccaacaatgcccgggagcggctgcgggtgcgggacatcaatgaggccttcaaggagctgggccgcatgtgccagctgcacctgaagtctgagaagccccagaccaagctgctgatcctgcaccaggccgtgaccaccatcggcccctag

SEQ ID NO: 173558 - DNA, 885 bp, synthetic construct
  misc_feature 1..885: note = Description of Artificial Sequence: Synthetic coding sequence
  source 1..885: mol_type = other DNA
atgtccttcctgaaggatgtgtgtgagcagagcaggatggaggaccggctggaccggctggatgatgccatccacgtgctgaggaaccacgctgtgggccccagcaccagcctgcctgctggccacagcgacatccacagcctgctgggccccagccacaatgcccccatcggcagcctgaacagcaactacggcggcagcagcctggtggccagcagccgcagcgcctccatggtgggcacccaccgggaggacagcgtgtccctgaatggaaaccacagcgtgctgagcagcacagtgaccaccagcagcacagacctgaaccacaagacccaggagaactacagaggaggcctgcagagccagagcggcaccgtggtgaccacagagatcaagacagagaacaaggagaaggatgagaacctgcacgagccccccagcagtgatgacatgaagagtgatgatgagagcagccagaaggacatcaaggtgagcagccggggccgcaccagcaccaatgaagatgaggacctgaaccctgagcagaagattgaaagagagaaggagaggaggatggccaacaatgcccgggagcggctgcgggtgcgggacatcaatgaggccttcaaggagctgggccgcatgtgccagctgcacctgaagtctgagaagccccagaccaagctgctgatcctgcaccaggccgtggccgtcatcctgagcctggagcagcaggtgcgggagaggaacctgaaccccaaggccgcctgcctgaagaggcgggaggaggagaaggtgtctgctgtgtctgctgagccccccaccaccctgcccggcacccaccctggcctgtctgagaccaccaaccccatgggccacatgtag

SEQ ID NO: 173559 - DNA, 1611 bp, synthetic construct
  misc_feature 1..1611: note = Description of Artificial Sequence: Synthetic coding sequence
  source 1..1611: mol_type = other DNA
atgtactgtgcctaccctgtgcccggcatgggcagcaacagcctgatgtactactacaacgggaagacagtgtatgcccccagccccaacagtgatgacttcaaccgggagagccccagctaccccagccccaagccacccacctccatgtttgccagcaccttcttcatgcaggacggcacccacaacagcagtgacctgtggagcagcagcaatggcatgagccagcccggctttggaggcatcctgggcaccagcaccagccacatgagccagagcagcagctatggcaacctgcacagccatgaccggctgagctacccaccccacagcgtgagccccacagacatcaacaccagcctgccccccatgagcagcttccaccggggcagcaccagcagcagcccctacgtggccgccagccacaccccacccatcaatggaagtgacagcatcctgggcaccagaggaaatgctgctggcagcagccagacaggagatgccctgggcaaggccctggccagcatctacagcccagaccacaccagcagcagcttccccagcaaccccagcacccctgtgggcagccccagccccctgaccggcaccagccagtggcccaggcctgggggccaggcccccagcagccccagctatgagaacagcctgcacagcctgaagaacagagtggagcagcagctgcacgagcacctgcaggatgccatgtccttcctgaaggatgtgtgtgagcagagcaggatggaggaccggctggaccggctggatgatgccatccacgtgctgagaaatcatgctgtgggccccagcaccagcctgcctgctggccacagcgacatccacagcctgctgggccccagccacaatgcccccatcggcagcctgaacagcaactatggaggcagcagcctggtggccagcagccgcagcgcctccatggtgggcacccacagagaagattctgtgtccctgaatggaaaccacagcgtgctgagcagcacagtgaccaccagcagcacagacctgaaccacaagacccaggagaactaccggggcggcctgcagagccagagcggcaccgtggtgaccacagagatcaagacagagaacaaggagaaggatgagaacctgcacgagccccccagcagtgatgacatgaagagtgatgatgagagcagccagaaggacatcaaggtgagcagccggggccgcaccagcagcaccaatgaagatgaggacctgaaccctgagcagaagattgaaagagagaaggagaggaggatggccaacaatgcccgggagcggctgcgggtgcgggacatcaatgaggccttcaaggagctgggccgcatgtgccagctgcacctgaagtctgagaagccccagaccaagctgctgatcctgcaccaggccgtggccgtcatcctgagcctggagcagcaggtgcgggagaggaacctgaaccccaaggccgcctgcctgaagaggcgggaggaggagaaggtgtctgctgtgtctgctgagccccccaccaccctgcccggcacccaccctggcctgtctgagaccaccaaccccatgggccacatgtag

SEQ ID NO: 173560 - DNA, 2049 bp, synthetic construct; identical to SEQ ID NO: 173553
  misc_feature 1..2049: note = Description of Artificial Sequence: Synthetic coding sequence
  source 1..2049: mol_type = other DNA

SEQ ID NO: 173561 - DNA, 1020 bp, synthetic construct
  misc_feature 1..1020: note = Description of Artificial Sequence: Synthetic coding sequence
  source 1..1020: mol_type = other DNA
atgagcagcaacagcagcaccagccagtggcccaggcctgggggccaggcccccagcagccccagctatgagaacagcctgcacagcctgaagaacagagtggagcagcagctgcacgagcacctgcaggatgccatgtccttcctgaaggatgtgtgtgagcagagcaggatggaggaccggctggaccggctggatgatgccatccacgtgctgagaaatcatgctgtgggccccagcaccagcctgcctgctggccacagcgacatccacagcctgctgggccccagccacaatgcccccatcggcagcctgaacagcaactatggaggcagcagcctggtggccagcagccgcagcgcctccatggtgggcacccacagagaagattctgtgtccctgaatggaaaccacagcgtgctgagcagcacagtgaccaccagcagcacagacctgaaccacaagacccaggagaactaccggggcggcctgcagagccagagcggcaccgtggtgaccacagagatcaagacagagaacaaggagaaggatgagaacctgcacgagccccccagcagtgatgacatgaagagtgatgatgagagcagccagaaggacatcaaggtgagcagccggggccgcaccagcaccaatgaagatgaggacctgaaccctgagcagaagattgagcgggagaaggagaggaggatggccaacaatgcccgggagcggctgcgggtgcgggacatcaatgaggccttcaaggagctgggccgcatgtgccagctgcacctgaagtctgagaagccccagaccaagctgctgatcctgcaccaggccgtggccgtcatcctgagcctggagcagcaggtgcgggagaggaacctgaaccccaaggccgcctgcctgaagagaagagaggaggagaaggtgtctgctgtgtctgctgagccccccaccaccctgcccggcacccaccctggcctgtctgagaccaccaaccccatgggccacatgtag

SEQ ID NO: 173562 - DNA, 1341 bp, synthetic construct; identical to SEQ ID NO: 173556
  misc_feature 1..1341: note = Description of Artificial Sequence: Synthetic coding sequence
  source 1..1341: mol_type = other DNA

SEQ ID NO: 173563 - DNA, 1539 bp, synthetic construct
  misc_feature 1..1539: note = Description of Artificial Sequence: Synthetic coding sequence
  source 1..1539: mol_type = other DNA
atgtactgtgcctaccctgtgcccggcatgggcagcaacagcctgatgtactactacaacgggaagacagtgtatgcccccagccccaacagtgatgacttcaaccgggagagccccagctaccccagccccaagccacccacctccatgtttgccagcaccttcttcatgcaggacggcacccacaacagcagtgacctgtggagcagcagcaatggcatgagccagcccggctttggaggcatcctgggcaccagcaccagccacatgagccagagcagcagctatggcaacctgcacagccatgaccggctgagctacccaccccacagcgtgagccccacagacatcaacaccagcctgccccccatgagcagcttccaccggggcagcaccagcagcagcccctacgtggccgccagccacaccccacccatcaatggaagtgacagcatcctgggcaccagaggaaatgctgctggcagcagccagacaggagatgccctgggcaaggccctggccagcatctacagcccagaccacaccagcagcagcttccccagcaaccccagcacccctgtgggcagccccagccccctgaccggcaccagccagtggcccaggcctgggggccaggcccccagcagccccagctatgagaacagcctgcacagcctgcagagcaggatggaggaccggctggaccggctggatgatgccatccacgtgctgagaaatcatgctgtgggccccagcaccagcctgcctgctggccacagcgacatccacagcctgctgggccccagccacaatgcccccatcggcagcctgaacagcaactatggaggcagcagcctggtggccagcagccgcagcgcctccatggtgggcacccacagagaagattctgtgtccctgaatggaaaccacagcgtgctgagcagcacagtgaccaccagcagcacagacctgaaccacaagacccaggagaactaccggggcggcctgcagagccagagcggcaccgtggtgaccacagagatcaagacagagaacaaggagaaggatgagaacctgcacgagccccccagcagtgatgacatgaagagtgatgatgagagcagccagaaggacatcaaggtgagcagccggggccgcaccagcagcaccaatgaagatgaggacctgaaccctgagcagaagattgaaagagagaaggagaggaggatggccaacaatgcccgggagcggctgcgggtgcgggacatcaatgaggccttcaaggagctgggccgcatgtgccagctgcacctgaagtctgagaagccccagaccaagctgctgatcctgcaccaggccgtggccgtcatcctgagcctggagcagcaggtgcgggagaggaacctgaaccccaaggccgcctgcctgaagaggcgggaggaggagaaggtgtctgctgtgtctgctgagccccccaccaccctgcccggcacccaccctggcctgtctgagaccaccaaccccatgggccacatgtag

SEQ ID NO: 173564 - DNA, 600 bp, synthetic construct
  misc_feature 1..600: note = Description of Artificial Sequence: Synthetic coding sequence
  source 1..600: mol_type = other DNA
atggcctttgccctgctgcggcctgtgggcgcccacgtgctgtacccagatgtgcggctgctgtctgaagatgaggagaacagaagtgaaagtgatgccagtgaccagagctttggctgctgtgagggccctgaggccgcccggcggggccctggccctgggggcggcagaagagctgggggcggcggcggggccggccctgtggtggtggtgcggcagaggcaggccgccaatgcccgggagcgggacaggacccagagcgtgaacacagccttcaccgccctgcggaccctcatccccacagagcctgtggacaggaagctgagcaagattgaaacagtgcggctggccagcagctacatcgcccacctggccaacgtgctgctgctgggggacagcgcagatgatggccagccctgcttccgggccgccggcagcgccaagggagctgtgcctgctgctgctgatggcggccggcagcccaggagcatctgcaccttctgcctgagcaaccagaggaagggcggcggccggcgggacctgggcggcagctgcctgaaggtgcggggcgtggcccccctgcggggccccaggaggtag

SEQ ID NO: 173565 - DNA, 1038 bp, synthetic construct
  misc_feature 1..1038: note = Description of Artificial Sequence: Synthetic coding sequence
  source 1..1038: mol_type = other DNA
atgctgccctgcttccagctgctgcgcatcggcggcggccggggcggggacctgtacaccttccaccccccagctggagctggctgcacctaccgcctgggccacagagctgacctgtgtgatgtggccctgcggccccagcaggagcccggcctcatcagcggcatccacgccgagctgcacgccgagcccagaggagatgactggagggtgtccctggaggaccacagcagccagggcaccctggtgaacaacgtgcggctgccccggggccaccggctggagctgagtgatggagacctgctgaccttcggccctgagggccccccaggcaccagccccagcgagttctacttcatgttccagcaggtgcgggtgaagccccaggactttgctgccatcaccatccccaggagcagaggagaggcccgggtgggcgccggcttccggcccatgctgcccagccagggcgccccccagaggcccctgagcaccttcagccctgcccccaaggccaccctcatcctgaacagcatcggcagcctgagcaagctgcggccccagcccctgaccttcagccccagctggggcggccccaagagcctgcctgtgcctgcccctcctggagagatgggcaccacccccagcgccccaccccagaggaacagaaggaagtctgtgcaccgggtgctggccgagctggatgatgagagcgagcccccagagaaccccccacctgtgctgatggagcccaggaagaagctgcgggtggacaaggcccccctgacccccactggaaacagaagaggccggcccaggaagtaccctgtgtctgcccccatggcccctcctgctgtgggcggcggggagccctgtgccgccccctgctgctgcctgccccaggaggagaccgtggcctgggtgcagtgtgatggctgtgatgtgtggttccacgtggcctgtgtgggctgcagcatccaggccgcccgggaggccgacttccgctgccccggctgcagagctggcatccagacctag

SEQ ID NO: 173566 - DNA, 1038 bp, synthetic construct; identical to SEQ ID NO: 173565
  misc_feature 1..1038: note = Description of Artificial Sequence: Synthetic coding sequence
  source 1..1038: mol_type = other DNA

SEQ ID NO: 173567 - DNA, 1038 bp, synthetic construct
  misc_feature 1..1038: note = Description of Artificial Sequence: Synthetic coding sequence
  source 1..1038: mol_type = other DNA
atgctgccctgcttccagctgctgcgcatcggcggcggccggggcggggacctgtacaccttccaccccccagctggagctggctgcacctaccgcctgggccacagagctgacctgtgtgatgtggccctgcggccccagcaggagcccggcctcatcagcggcatccacgccgagctgcacgccgagcccagaggagatgactggagggtgtccctggaggaccacagcagccagggcaccctggtgaacaacgtgcggctgccccggggccaccggctggagctgagtgatggagacctgctgaccttcggccctgagggccccccaggcaccagccccagcgagttctacttcatgttccagcaggtgcgggtgaagccccaggactttgctgccatcaccatccccaggagcagaggagaggcccgggtgggcgccggcttccggcccatgctgcccagccagggcgccccccagaggcccctgagcaccttcagccctgcccccaaggccaccctcatcctgaacagcatcggcagcctgagcaagctgcggccccagcccctgaccttcagccccagctggggcggccccaagagcctgcctgtgcctgcccctcctggagaggtgggcaccacccccagcgccccaccccagaggaacagaaggaagtctgtgcaccgggtgctggccgagctggatgatgagagcgagcccccagagaaccccccacctgtgctgatggagcccaggaagaagctgcgggtggacaaggcccccctgacccccactggaaacagaagaggccggcccaggaagtaccctgtgtctgcccccatggcccctcctgctgtgggcggcggggagccctgtgccgccccctgctgctgcctgccccaggaggagaccgtggcctgggtgcagtgtgatggctgtgatgtgtggttccacgtggcctgtgtgggctgcagcatccaggccgcccgggaggccgacttccgctgccccggctgcagagctggcatccagacctag

SEQ ID NO: 173568 - DNA, 1038 bp, synthetic construct; identical to SEQ ID NO: 173567
  misc_feature 1..1038: note = Description of Artificial Sequence: Synthetic coding sequence
  source 1..1038: mol_type = other DNA

SEQ ID NO: 173569 - DNA, 1038 bp, synthetic construct; identical to SEQ ID NO: 173567
  misc_feature 1..1038: note = Description of Artificial Sequence: Synthetic coding sequence
  source 1..1038: mol_type = other DNA

SEQ ID NO: 173570 - DNA, 1038 bp, synthetic construct; identical to SEQ ID NO: 173567
  misc_feature 1..1038: note = Description of Artificial Sequence: Synthetic coding sequence
  source 1..1038: mol_type = other DNA

SEQ ID NO: 173571 - DNA, 1038 bp, synthetic construct; identical to SEQ ID NO: 173567
  misc_feature 1..1038: note = Description of Artificial Sequence: Synthetic coding sequence
  source 1..1038: mol_type = other DNA

SEQ ID NO: 173572 - DNA, 1038 bp, synthetic construct
  misc_feature 1..1038: note = Description of Artificial Sequence: Synthetic coding sequence
  source 1..1038: mol_type = other DNA
atgctgccctgcttccagctgctgcgcatcggcggcggccggggcggggacctgtacaccttccaccccccagctggagctggctgcacctaccgcctgggccacagagctgacctgtgtgatgtggccctgcggccccagcaggagcccggcctcatcagcggcatccacgccgagctgcacgccgagcccagaggagatgactggagggtgtccctggaggaccacagcagccagggcaccctggtgaacaacgtgcggctgccccggggccaccggctggagctgagtgatggagacctgctgaccttcggccctgagggcagccctggcaccagccccagcgagttctacttcatgttccagcaggtgcgggtgaagccccaggactttgctgccatcaccatccccaggagcagaggagaggcccgggtgggcgccggcttccggcccatgctgcccagccagggcgccccccagaggcccctgagcaccttcagccctgcccccaaggccaccctcatcctgaacagcatcggcagcctgagcaagctgcggccccagcccctgaccttcagccccagctggggcggccccaagagcctgcctgtgcctgcccctcctggagaggtgggcaccacccccagcgccccaccccagaggaacagaaggaagtctgtgcaccgggtgctggccgagctggatgatgagagcgagcccccagagaaccccccacctgtgctgatggagcccaggaagaagctgcgggtggacaaggcccccctgacccccactggaaacagaagaggccggcccaggaagtaccctgtgtctgcccccatggcccctcctgctgtgggcggcggggagccctgtgccgccccctgctgctgcctgccccaggaggagaccgtggcctgggtgcagtgtgatggctgtgatgtgtggttccacgtggcctgtgtgggctgcagcatccaggccgcccgggaggccgacttccgctgccccggctgcagagctggcatccagacctag

SEQ ID NO: 173573 - DNA, 1038 bp, synthetic construct; identical to SEQ ID NO: 173567
  misc_feature 1..1038: note = Description of Artificial Sequence: Synthetic coding sequence
  source 1..1038: mol_type = other DNA

SEQ ID NO: 173574 - DNA, 1038 bp, synthetic construct; identical to SEQ ID NO: 173567
  misc_feature 1..1038: note = Description of Artificial Sequence: Synthetic coding sequence
  source 1..1038: mol_type = other DNA

SEQ ID NO: 173575 - DNA, 1038 bp, synthetic construct; identical to SEQ ID NO: 173567
  misc_feature 1..1038: note = Description of Artificial Sequence: Synthetic coding sequence
  source 1..1038: mol_type = other DNA

SEQ ID NO: 173576 - DNA, 1038 bp, synthetic construct; identical to SEQ ID NO: 173567
  misc_feature 1..1038: note = Description of Artificial Sequence: Synthetic coding sequence
  source 1..1038: mol_type = other DNA

SEQ ID NO: 173577 - DNA, 1038 bp, synthetic construct; identical to SEQ ID NO: 173567
  misc_feature 1..1038: note = Description of Artificial Sequence: Synthetic coding sequence
  source 1..1038: mol_type = other DNA

SEQ ID NO: 173578 - DNA, 1038 bp, synthetic construct; identical to SEQ ID NO: 173572
  misc_feature 1..1038: note = Description of Artificial Sequence: Synthetic coding sequence
  source 1..1038: mol_type = other DNA

SEQ ID NO: 173579 - DNA, 654 bp, synthetic construct
  misc_feature 1..654: note = Description of Artificial Sequence: Synthetic coding sequence
  source 1..654: mol_type = other DNA
accctggtgaacaacgtgcggctgccccggggccaccggctggagctgagtgatggagacctgctgaccttcggccctgagggccccccaggcaccagccccagcgagttctacttcatgttccagcaggtgcgggtgaagccccaggactttgctgccatcaccatccccaggagcagaggagaggcccgggtgggcgccggcttccggcccatgctgcccagccagggcgccccccagaggcccctgagcaccttcagccctgcccccaaggccaccctcatcctgaacagcatcggcagcctgagcaagctgcggccccagcccctgaccttcagccccagctggggcggccccaagagcctgcctgtgcctgcccctcctggagagatgggcaccacccccagcgccccaccccagaggaacagaaggaagtctgtgcaccgggtgctggccgagctggatgatgagagcgagcccccagagaaccccccacctgtgctgatggagcccaggaagaagctgcgggtggacaaggcccccctgacccccactggaaactggcacatccagggcatgcagagcatcgtgaagggccagaaggagcggccctggccccgggagcacctgagcggctatgaggaggccagctag

SEQ ID NO: 173580 - DNA, 645 bp, synthetic construct
  misc_feature 1..645: note = Description of Artificial Sequence: Synthetic coding sequence
  source 1..645: mol_type = other DNA
atgagccagaggaaggcccggggccccccagccatgcctggggtgggccacagccagacccaggccaaggcccggctgctgcccggggctgacaggaagaggagccggctgagcaggacccggcaggacccctgggaggagaggtcctggagcaaccagcgctggagccgggccaccccaggcccccggggcaccagggctgggggcctggccctgggccgctctgaggccagcccagaaaatgctgcccgggagaggagccgggtgaggaccctgcggcaggccttcctggccctgcaggccgccctgcctgctgtgcccccagacaccaagctgagcaagctggatgtgctggtgctggccgccagctacatcgcccacctgaccaggaccctgggccacgagctgcccggccctgcctggccacccttcctgcggggcctgcgctacctgcaccccctgaagaagtggcccatgaggagccggctgtatgccggcggcctgggctacagcgacctggacagcaccacagccagcacccccagccagaggaccagagatgctgaggtgggcagccaggtgcctggagaggctgatgccctgctgagcaccacccccctgagccctgccctgggggacaagtag

SEQ ID NO: 173581 - DNA, 2031 bp, synthetic construct
  misc_feature 1..2031: note = Description of Artificial Sequence: Synthetic coding sequence
  source 1..2031: mol_type = other DNA
atgagcagaagagccctgcggcggctgcggggggagcagaggggccaggagcccctgggccctggggccctgcactttgacctgagagatgatgatgatgctgaggaggagggccccaagcgggagctgggcgtgcggcggcctgggggcgccggcaaggagggcgtgcgggtgaacaacagatttgagctgatcaacattgatgacctggaggatgatcctgtggtgaatggagagaggagcggctgtgccctgacagatgctgtggcccctggcaacaagggccggggccagaggggcaacacagagagcaagacagatggagatgacacagaaacagtgcccagcgagcagagccacgccagcggcaagctgaggaagaagaagaagaagcagaagaacaagaagagcagcactggagaggcctctgaaaatggcctggaggacatcgaccgcatcctggagagaattgaggacagcacaggcctgaaccggcccggccctgcccccctgagcagcaggaagcacgtgctgtatgtggagcaccgccacctgaacccagacacagagctgaagcgctactttggagcccgggccatcctgggggagcagaggccccggcagaggcagagggtgtaccccaagtgcacctggctgaccacccccaagagcacctggccccgctacagcaagccaggcctgtccatgaggctgctggagagcaagaagggcctgtccttctttgcctttgagcacagcgaggagtaccagcaggcccagcacaagttcctggtggccgtggagagcatggagcccaacaacatcgtggtgctgctgcagaccagcccctaccacgtggacagcctgctgcagctgagtgatgcctgccgcttccaggaggaccaggagatggcccgggacctggtggagcgggccctgtacagcatggagtgtgccttccaccccctcttcagcctgaccagcggggcctgccgcctggactacagaagaccagaaaatagaagcttctacctggccctgtacaagcagatgtccttcctggagaagaggggctgccccaggacagccctggagtactgcaagctgatcctgagcctggagccagatgaggaccccctgtgcatgctgctgctgattgaccacctggccctgcgggccaggaactatgagtacctgatccgcctcttccaggagtgggaggcccacaggaacctgagccagctgcccaactttgccttctctgtgcccctggcctacttcctgctgagccagcagacagacctgcctgaatgtgagcagagcagcgcccggcagaaggccagcctgctgatccagcaggccctgaccatgtttcctggggtgctgctgcccctgctggagagctgcagcgtgcggccagatgcctctgtgagcagccaccgcttcttcggccccaatgctgagatcagccagcccccagccctgagccagctggtgaacctgtacctgggccgcagccacttcctgtggaaggagcccgccaccatgtcctggctggaggagaatgtgcatgaggtgctgcaggccgtggatgctggggaccctgctgtggaggcctgtgaaaatagaaggaaggtgctgtaccagagggcccccaggaacatccaccgccacgtgatcctgtctgagatcaaggaggccgtggccgccctgcccccagatgtgaccacccagagcgtgatgggctttgaccccctgcccccaagtgacaccatctacagctatgtgcggcctgagcggctgagccccatcagccacggcaacaccatcgccctcttcttccgcagcctgctgcccaactacaccatggagggggagaggcctgaggagggcgtggccggcggcctgaacagaaaccagggcctgaaccggctgatgctggccgtgcgggacatgatggccaacttccacctgaatgacctggaggcccctcatgaagatgatgctgagggggagggggagtgggactag

SEQ ID NO: 173582 - DNA, 1422 bp, synthetic construct
  misc_feature 1..1422: note = Description of Artificial Sequence: Synthetic coding sequence
  source 1..1422: mol_type = other DNA
atgaggctgctggagagcaagaagggcctgtccttctttgcctttgagcacagcgaggagtaccagcaggcccagcacaagttcctggtggccgtggagagcatggagcccaacaacatcgtggtgctgctgcagaccagcccctaccacgtggacagcctgctgcagctgagtgatgcctgccgcttccaggaggaccaggagatggcccgggacctggtggagcgggccctgtacagcatggagtgtgccttccaccccctcttcagcctgaccagcggggcctgccgcctggactacagaagacctgagaacagaagcttctacctggccctgtacaagcagatgtccttcctggagaagaggggctgccccaggacagccctggagtactgcaagctgatcctgagcctggagccagatgaggaccccctgtgcatgctgctgctgattgaccacctggccctgcgggccagaaattatgagtacctgatccgcctcttccaggagtgggaggcccacaggaacctgagccagctgcccaactttgccttctctgtgcccctggcctacttcctgctgagccagcagacagacctgcctgaatgtgagcagagcagcgcccggcagaaggccagcctgctgatccagcaggccctgaccatgtttcctggggtgctgctgcccctgctggagagctgcagcgtgcggccagatgcctctgtgagcagccaccgcttcttcggccccaatgctgagatcagccagcccccagccctgagccagctggtgaacctgtacctgggccgcagccacttcctgtggaaggagcccgccaccatgtcctggctggaggagaatgtgcatgaggtgctgcaggccgtggatgctggggaccctgctgtggaggcctgtgagaacagaaggaaggtgctgtaccagagggcccccaggaacatccacagacatgtgatcctgtctgagatcaaggaggccgtggccgccctgcccccagatgtgaccacccagagcgtgatgggctttgaccccctgccccccagcgacaccatctacagctatgtgcggcctgagaggaagggggaggaggagagaaattctgtcatctggggcagccagctgtgtgtgtgccggcccaggagcttccccagccccccaaatgtgcaggccctggcctgccggcccctgtggcaggccaagagctaccagccctggaagcaccactgcagcctgctgcctgtgacagtggccaagctgtaccatggaggaggagaggcccggggccgcagcggctggggcagcgagccccagcccggccctgagcaggctgatgctggctgtgcccggcatgatggccagctgcccccccagaggcctggaggagctgcccggggcagaagatag

SEQ ID NO: 173583 - DNA, 651 bp, synthetic construct
  misc_feature 1..651: note = Description of Artificial Sequence: Synthetic coding sequence
  source 1..651: mol_type = other DNA
atgagcagaagagccctgcggcggctgcggggggagcagaggggccaggagcccctgggccctggggccctgcactttgacctgagagatgatgatgatgctgaggaggagggccccaagcgggagctgggcgtgcggcggcctgggggcgccggcaaggagggcgtgcgggtgaacaacagatttgagctgatcaacattgatgacctggaggatgatcctgtggtgaatggagagaggagcggctgtgccctgacagatgctgtggcccctggcaacaagggccggggccagaggggcaacacagagagcaagacagatggagatgacacagaaacagtgcccagcgagcagagccacgccagcggcaagctgaggaagaagaagaagaagcagaagaacaagaagagcagcactggagaggcctctgaaaatggcctggaggacatcgaccgcatcctggagagaattgaggacagcacaggcctgaaccggcccggccctgcccccctgagcagcaggaagcacgtgctgtatgtggagcaccgccacctgaacccagacacagagctgaagcgctactttggagcccgggccatcctgggggagcagagggacagagtgctgctgggctgccctgtgtggttctag

SEQ ID NO: 173584 - DNA, 624 bp, synthetic construct
  misc_feature 1..624: note = Description of Artificial Sequence: Synthetic coding sequence
  source 1..624: mol_type = other DNA
ctgactgtgaatgcctccatgagccgcttccccccccacatggtgcccccccaccacaccctgcacaccaccggcatcccccacccagccatcgtgacccccaccgtgaagcaggagagcagccagagtgatgtgggcagcctgcacagcagcaagcaccaggacagcaagaaggaggaggagaagaagaagccccacatcaagaagcccctgaatgccttcatgctgtacatgaaggagatgagggccaaggtggtggccgagtgcaccctgaaggagagcgctgccatcaaccagatcctgggccgccgctggcacgccctgagccgggaggagcaggccaagtactatgagctggccaggaaggagcggcagctgcacatgcagctgtacccaggctggagcgcccgggacaactacggcaagaagaagaagaggaagagggacaagcagcccggggagaccaatgacctgagcgcccccaagaagtgccgggcccgcttcggcctggaccagcagaacaactggtgtggcccctgcaggaggaagaagaagtgtgtgcgctacatccagggcgagggcagctgcctgagcccccccagcagtgatggcagcctgctgtag

SEQ ID NO: 173585 - DNA, 669 bp, synthetic construct
  misc_feature 1..669: note = Description of Artificial Sequence: Synthetic coding sequence
  source 1..669: mol_type = other DNA
accaaccagaacagcagcagtgacagcgaggccgagcggcggcccccacccaggtctgagagcttccgggacaagagccgggagagcctggaggaggccgccaagaggcaggacggcggcctcttcaagggccccccctacccaggctaccccttcatcatgatcccagacctgaccagcccctacctgcccaacggcagcctgagccccacagcccggaccctgcacttccagagcggcagcacccactacagcgcctacaagaccatcgagcaccagattgctgtgcagtacctgcagatgaagtggcccctgctggatgtgcaggccggcagcctgcagagccggcaggccctgaaggatgcccggagccccagccctgcccacatcgtgagccccctgccctgctgcacccagggccatgactgccagcacttctacccacccagcgacttcaccgtgtccacccaggtgttccgggacatgaagaggagccacagcctgcagaaggtgggggagccctggtgcatcgagagcaacaaggtgcctgtggtgcagcacccccaccacgtgcaccccctgacccccctcatcacctacagcaatgagcacttcaccccaggcaaccccccaccccacctgcctgcagatgtggaccccaagacctag

SEQ ID NO: 173586 - DNA, 867 bp, synthetic construct
  misc_feature 1..867: note = Description of Artificial Sequence: Synthetic coding sequence
  source 1..867: mol_type = other DNA
atgccccagctgaatggaggcggcggagatgacctgggcgccaatgatgagctgatctccttcaaggatgaaggagagcaggaggagaagagcagcgagaacagcagcgctgagcgggacctggctgatgtgaagagcagcctggtgaatgaaagtgagaccaaccagaacagcagcagtgacagcgaggccgagcggcggcccccacccaggtctgagagcttccgggacaagagccgggagagcctggaggaggccgccaagaggcaggacggcggcctcttcaagggccccccctacccaggctaccccttcatcatgatcccagacctgaccagcccctacctgcccaacggcagcctgagccccacagcccggaccctgcacttccagagcggcagcacccactacagcgcctacaagaccatcgagcaccagattgctgtgcagtacctgcagatgaagtggcccctgctggatgtgcaggccggcagcctgcagagccggcaggccctgaaggatgcccggagccccagccctgcccacatcgtgagcaacaaggtgcctgtggtgcagcacccccaccacgtgcaccccctgacccccctcatcacctacagcaatgagcacttcaccccaggcaaccccccaccccacctgcctgcagatgtggaccccaagacaggcatccccaggcctccccaccccccagacatcagcccctactaccccctgagccctggcaccgtgggccagatcccccaccccctgggctggcagggccagcctgtgtaccccatcaccactggaggcttccgccacccctaccccacagccctgactgtgaatgcctccatgagcaggtag

SEQ ID NO: 173587 - DNA, 1380 bp, synthetic construct
  misc_feature 1..1380: note = Description of Artificial Sequence: Synthetic coding sequence
  source 1..1380: mol_type = other DNA
atgccccagctgaatggaggcggcggagatgacctgggcgccaatgatgagctgatctccttcaaggatgaaggagagcaggaggagaagagcagcgagaacagcagcgctgagcgggacctggctgatgtgaagagcagcctggtgaatgaaagtgagaccaaccagaacagcagcagtgacagcgaggccgagcggcggcccccacccaggtctgagagcttccgggacaagagccgggagagcctggaggaggccgccaagaggcaggacggcggcctcttcaagggccccccctacccaggctaccccttcatcatgatcccagacctgaccagcccctacctgcccaacggcagcctgagccccacagcccggacctacctgcagatgaagtggcccctgctggatgtgcaggccggcagcctgcagagccggcaggccctgaaggatgcccggagccccagccctgcccacatcgtgagcaacaaggtgcctgtggtgcagcacccccaccacgtgcaccccctgacccccctcatcacctacagcaatgagcacttcaccccaggcaaccccccaccccacctgcctgcagatgtggaccccaagacaggcatcccccggcccccccaccccccagacatcagcccctactaccccctgagccctggcaccgtgggccagatcccccaccccctgggctggctggtgccccagcagggccagcctgtgtaccccatcaccaccggcggcttccgccacccctaccccacagccctgactgtgaatgcctccatgagccgcttccccccccacatggtgcccccccaccacaccctgcacaccaccggcatcccccacccagccatcgtgacccccaccgtgaagcaggagagcagccagagtgatgtgggcagcctgcacagcagcaagcaccaggacagcaagaaggaggaggagaagaagaagccccacatcaagaagcccctgaatgccttcatgctgtacatgaaggagatgagggccaaggtggtggccgagtgcaccctgaaggagagcgctgccatcaaccagatcctgggccgccgctggcacgccctgagccgggaggagcaggccaagtactatgagctggccaggaaggagcggcagctgcacatgcagctgtacccaggctggagcgcccgggacaactacggcaagaagaagaagaggaagagggacaagcagcccggggagaccaatgagcacagcgagtgcttcctgaacccctgcctgagcctgccccccatcacagacctgagcgcccccaagaagtgccgggccaggtttggcctggaccagcagaacaactggtgtggcccctgcagcctgtag

SEQ ID NO: 173588 - DNA, 1470 bp, synthetic construct
  misc_feature 1..1470: note = Description of Artificial Sequence: Synthetic coding sequence
  source 1..1470: mol_type = other DNA
atgccccagctgaatggaggcggcggagatgacctgggcgccaatgatgagctgatctccttcaaggatgaaggagagcaggaggagaagagcagcgagaacagcagcgctgagcgggacctggctgatgtgaagagcagcctggtgaatgaaagtgagaccaaccagaacagcagcagtgacagcgaggccgagcggcggcccccacccaggtctgagagcttccgggacaagagccgggagagcctggaggaggccgccaagaggcaggacggcggcctcttcaagggccccccctacccaggctaccccttcatcatgatcccagacctgaccagcccctacctgcccaacggcagcctgagccccacagcccggacctacctgcagatgaagtggcccctgctggatgtgcaggccggcagcctgcagagccggcaggccctgaaggatgcccggagccccagccctgcccacatcgtgagccccctgccctgctgcacccagggccatgactgccagcacttctacccacccagcgacttcaccgtgtccacccaggtgttccgggacatgaagaggagccacagcctgcagaaggtgggggagccctggtgcatcgagagcaacaaggtgcctgtggtgcagcacccccaccacgtgcaccccctgacccccctcatcacctacagcaatgagcacttcaccccaggcaaccccccaccccacctgcctgcagatgtggaccccaagacaggcatccccaggcctccccaccccccagacatcagcccctactaccccctgagccctggcaccgtgggccagatcccccaccccctgggctggctggtgccccagcagggccagcctgtgtaccccatcaccactggaggcttccgccacccctaccccacagccctgactgtgaatgcctccatgagccgcttccccccccacatggtgcccccccaccacaccctgcacaccaccggcatcccccacccagccatcgtgacccccaccgtgaagcaggagagcagccagagtgatgtgggcagcctgcacagcagcaagcaccaggacagcaagaaggaggaggagaagaagaagccccacatcaagaagcccctgaatgccttcatgctgtacatgaaggagatgagggccaaggtggtggctgaatgtaccctgaaggagagcgctgccatcaaccagatcctgggccgccgctggcacgccctgagccgggaggagcaggccaagtactatgagctggccaggaaggagcggcagctgcacatgcagctgtacccaggctggagcgcccgggacaactacggcaagaagaagaagaggaagagggacaagcagcctggagagaccaatggagagaagaagagcgcctttgccacctacaaggtgaaggccgccgccagcgcccaccccctgcagatggaggcctactag

SEQ ID NO: 173589 - DNA, 1860 bp, synthetic construct
  misc_feature 1..1860: note = Description of Artificial Sequence: Synthetic coding sequence
  source 1..1860: mol_type = other DNA
atgccccagctgaatggaggcggcggagatgacctgggcgccaatgatgagctgatctccttcaaggatgaaggagagcaggaggagaagagcagcgagaacagcagcgctgagcgggacctggctgatgtgaagagcagcctggtgaatgaaagtgagaccaaccagaacagcagcagtgacagcgaggccgagcggcggcccccacccaggtctgagagcttccgggacaagagccgggagagcctggaggaggccgccaagaggcaggacggcggcctcttcaagggccccccctacccaggctaccccttcatcatgatcccagacctgaccagcccctacctgcccaacggcagcctgagccccacagcccggaccctgcacttccagagcggcagcacccactacagcgcctacaagaccatcgagcaccagattgctgtgcagtacctgcagatgaagtggcccctgctggatgtgcaggccggcagcctgcagagccggcaggccctgaaggatgcccggagccccagccctgcccacatcgtgagcaacaaggtgcctgtggtgcagcacccccaccacgtgcaccccctgacccccctcatcacctacagcaatgagcacttcaccccaggcaaccccccaccccacctgcctgcagatgtggaccccaagacaggcatccccaggcctccccaccccccagacatcagcccctactaccccctgagccctggcaccgtgggccagatcccccaccccctgggctggctggtgccccagcagggccagcctgtgtaccccatcaccactggaggcttccgccacccctaccccacagccctgactgtgaatgcctccatgagccgcttccccccccacatggtgcccccccaccacaccctgcacaccaccggcatcccccacccagccatcgtgacccccaccgtgaagcaggagagcagccagagtgatgtgggcagcctgcacagcagcaagcaccaggacagcaagaaggaggaggagaagaagaagccccacatcaagaagcccctgaatgccttcatgctgtacatgaaggagatgagggccaaggtggtggctgaatgtaccctgaaggagagcgctgccatcaaccagatcctgggccgccgctggcacgccctgagccgggaggagcaggccaagtactatgagctggccaggaaggagcggcagctgcacatgcagctgtacccaggctggagcgcccgggacaactacggcaagaagaagaagaggaagagggacaagcagcctggagagaccaatgagcacagcgagtgcttcctgaacccctgcctgagcctgccccccatcacagacctgagcgcccccaagaagtgccgggcccgcttcggcctggaccagcagaacaactggtgtggcccctgcaggaggaagaagaagtgtgtgcgctacatccagggcgagggcagctgcctgagcccccccagcagtgatggcagcctgctggacagccccccacccagccccaacctgctgggcagccccccaagagatgccaagagccagacagagcagacccagcccctgagcctgagcctgaagccagaccccctggcccacctgtccatgatgcctcctcctccagccctgctgctggccgaggccacccacaaggccagcgccctgtgccccaacggggccctggacctgcccccagctgccctgcagcctgctgcccccagcagcagcatcgcccagcccagcaccagcagcctgcacagccacagcagcctggccggcacccagccccagcccctgagcctggtgaccaagagcctggagtag

SEQ ID NO: 173590 - DNA, 363 bp, synthetic construct
  misc_feature 1..363: note = Description of Artificial Sequence: Synthetic coding sequence
  source 1..363: mol_type = other DNA
atgctgtacatgaaggagatgagggccaaggtggtggccgagtgcaccctgaaggagagcgctgccatcaaccagatcctgggccgccgctggcacgccctgagccgggaggagcaggccaagtactatgagctggccaggaaggagcggcagctgcacatgcagctgtacccaggctggagcgcccgggacaactacggcaagaagaagaagaggaagagggacaagcagcccggggagaccaatgacctgagcgcccccaagaagtgccgggcccgcttcggcctggaccagcagaacaactggtgtggcccctgccgctgcaagtacagcaaggaggtgtctggaacagtgcgggcctag

SEQ ID NO: 173591 - DNA, 531 bp, synthetic construct
  misc_feature 1..531: note = Description of Artificial Sequence: Synthetic coding sequence
  source 1..531: mol_type = other DNA
atgagccgcttccccccccacatggtgcccccccaccacaccctgcacaccaccggcatcccccacccagccatcgtgacccccaccgtgaagcaggagagcagccagagtgatgtgggcagcctgcacagcagcaagcaccaggacagcaagaaggaggaggagaagaagaagccccacatcaagaagcccctgaatgccttcatgctgtacatgaaggagatgagggccaaggtggtggccgagtgcaccctgaaggagagcgctgccatcaaccagatcctgggccgccgctggcacgccctgagccgggaggagcaggccaagtactatgagctggccaggaaggagcggcagctgcacatgcagctgtacccaggctggagcgcccgggacaactacggcaagaagaagaagaggaagagggacaagcagcccggggagaccaacggggagaagaagagcgcctttgccacctacaaggtgaaggctgctgccagcgcccaccccctgcagatggaggcctactag

SEQ ID NO: 173592 - DNA, 954 bp, synthetic construct
  misc_feature 1..954: note = Description of Artificial Sequence: Synthetic coding sequence
  source 1..954: mol_type = other DNA
atgccccagctgaatggaggcggcggagatgacctgggcgccaatgatgagctgatctccttcaaggatgaaggagagcaggaggagaagagcagcgagaacagcagcgctgagcgggacctggctgatgtgaagagcagcctggtgaatgaaagtgagaccaaccagaacagcagcagtgacagcgaggccgagcggcggcccccacccaggtctgagagcttccgggacaagagccgggagagcctggaggaggccgccaagaggcaggacggcggcctcttcaagggccccccctacccaggctaccccttcatcatgatcccagacctgaccagcccctacctgcccaacggcagcctgagccccacagcccggacctacctgcagatgaagtggcccctgctggatgtgcaggccggcagcctgcagagccggcaggccctgaaggatgcccggagccccagccctgcccacatcgtgcagagccccctgccctgctgcacccagggccatgactgccagcacttctacccacccagcgacttcaccgtgtccacccaggtgttccgggacatgaagaggagccacagcctgcagaaggtgggggagccctggtgcatcgagagcaacaaggtgcctgtggtgcagcacccccaccacgtgcaccccctgacccccctcatcacctacagcaatgagcacttcaccccaggcaaccccccaccccacctgcctgcagatgtggaccccaagacaggcatcccccggcccccccaccccccagacatcagcccctactaccccctgagccctggcaccgtgggccagatcccccaccccctgggctggctggtgccccagcagggccagcctgtgtaccccatcaccaccggcggcttccgccacccctaccccacagccctgactgtgaatgcctccatgagcaggtag

SEQ ID NO: 173593 - DNA, 1791 bp, synthetic construct
  misc_feature 1..1791: note = Description of Artificial Sequence: Synthetic coding sequence
  source 1..1791: mol_type = other DNA
atgccccagctgaatggaggcggcggagatgacctgggcgccaatgatgagctgatctccttcaaggatgaaggagagcaggaggagaagagcagcgagaacagcagcgctgagcgggacctggctgatgtgaagagcagcctggtgaatgaaagtgagaccaaccagaacagcagcagtgacagcgaggccgagcggcggcccccacccaggtctgagagcttccgggacaagagccgggagagcctggaggaggccgccaagaggcaggacggcggcctcttcaagggccccccctacccaggctaccccttcatcatgatcccagacctgaccagcccctacctgcccaacggcagcctgagccccacagcccggacctacctgcagatgaagtggcccctgctggatgtgcaggccggcagcctgcagagccggcaggccctgaaggatgcccggagccccagccctgcccacatcgtgagcaacaaggtgcctgtggtgcagcacccccaccacgtgcaccccctgacccccctcatcacctacagcaatgagcacttcaccccaggcaaccccccaccccacctgcctgcagatgtggaccccaagacaggcatcccccggcccccccaccccccagacatcagcccctactaccccctgagccctggcaccgtgggccagatcccccaccccctgggctggctggtgccccagcagggccagcctgtgtaccccatcaccaccggcggcttccgccacccctaccccacagccctgactgtgaatgcctccatgagccgcttccccccccacatggtgcccccccaccacaccctgcacaccaccggcatcccccacccagccatcgtgacccccaccgtgaagcaggagagcagccagagtgatgtgggcagcctgcacagcagcaagcaccaggacagcaagaaggaggaggagaagaagaagccccacatcaagaagcccctgaatgccttcatgctgtacatgaaggagatgagggccaaggtggtggccgagtgcaccctgaaggagagcgctgccatcaaccagatcctgggccgccgctggcacgccctgagccgggaggagcaggccaagtactatgagctggccaggaaggagcggcagctgcacatgcagctgtacccaggctggagcgcccgggacaactacggcaagaagaagaagaggaagagggacaagcagcccggggagaccaatgagcacagcgagtgcttcctgaacccctgcctgagcctgccccccatcacagacctgagcgcccccaagaagtgccgggccaggtttggcctggaccagcagaacaactggtgtggcccctgcaggaggaagaagaagtgtgtgcgctacatccagggcgagggcagctgcctgagcccccccagcagtgatggcagcctgctggacagccccccacccagccccaacctgctgggcagccccccaagagatgccaagagccagacagagcagacccagcccctgagcctgagcctgaagccagaccccctggcccacctgtccatgatgcctcctcctccagccctgctgctggccgaggccacccacaaggccagcgccctgtgccccaatggagccctggacctgcccccagctgccctgcagcctgctgcccccagcagcagcatcgcccagcccagcaccagcagcctgcacagccacagcagcctggccggcacccagccccagcccctgagcctggtgaccaagagcctggagtag

SEQ ID NO: 173594 - DNA, 1485 bp, synthetic construct
  misc_feature 1..1485: note = Description of Artificial Sequence: Synthetic coding sequence
  source 1..1485: mol_type = other DNA
atgccccagctgaatggaggcggcggagatgacctgggcgccaatgatgagctgatctccttcaaggatgaaggagagcaggaggagaagagcagcgagaacagcagcgctgagcgggacctggctgatgtgaagagcagcctggtgaatgaaagtgagaccaaccagaacagcagcagtgacagcgaggccgagcggcggcccccacccaggtctgagagcttccgggacaagagccgggagagcctggaggaggccgccaagaggcaggacggcggcctcttcaagggccccccctacccaggctaccccttcatcatgatcccagacctgaccagcccctacctgcccaacggcagcctgagccccacagcccggaccctgcacttccagagcggcagcacccactacagcgcctacaagaccatcgagcaccagattgctgtgcagtacctgcagatgaagtggcccctgctggatgtgcaggccggcagcctgcagagccggcaggccctgaaggatgcccggagccccagccctgcccacatcgtgagcaacaaggtgcctgtggtgcagcacccccaccacgtgcaccccctgacccccctcatcacctacagcaatgagcacttcaccccaggcaaccccccaccccacctgcctgcagatgtggaccccaagacaggcatccccaggcctccccaccccccagacatcagcccctactaccccctgagccctggcaccgtgggccagatcccccaccccctgggctggctggtgccccagcagggccagcctgtgtaccccatcaccactggaggcttccgccacccctaccccacagccctgactgtgaatgcctccatgagccgcttccccccccacatggtgcccccccaccacaccctgcacaccaccggcatcccccacccagccatcgtgacccccaccgtgaagcaggagagcagccagagtgatgtgggcagcctgcacagcagcaagcaccaggacagcaagaaggaggaggagaagaagaagccccacatcaagaagcccctgaatgccttcatgctgtacatgaaggagatgagggccaaggtggtggctgaatgtaccctgaaggagagcgctgccatcaaccagatcctgggccgccgctggcacgccctgagccgggaggagcaggccaagtactatgagctggccaggaaggagcggcagctgcacatgcagctgtacccaggctggagcgcccgggacaactacggcaagaagaagaagaggaagagggacaagcagcctggagagaccaatgagcacagcgagtgcttcctgaacccctgcctgagcctgccccccatcacagacctgagcgcccccaagaagtgccgggcccgcttcggcctggaccagcagaacaactggtgtggcccctgccgctgcaagtacagcaaggaggtgtctggaacagtgcgggcctag

SEQ ID NO: 173595 - DNA, 1809 bp, synthetic construct
  misc_feature 1..1809: note = Description of Artificial Sequence: Synthetic coding sequence
  source 1..1809: mol_type = other DNA
atgccccagctgaatggaggcggcggagatgacctgggcgccaatgatgagctgatctccttcaaggatgaaggagagcaggaggagaagagcagcgagaacagcagcgctgagcgggacctggctgatgtgaagagcagcctggtgaatgaaagtgagaccaaccagaacagcagcagtgacagcgaggccgagcggcggcccccacccaggtctgagagcttccgggacaagagccgggagagcctggaggaggccgccaagaggcaggacggcggcctcttcaagggccccccctacccaggctaccccttcatcatgatcccagacctgaccagcccctacctgcccaacggcagcctgagccccacagcccggaccctgcacttccagagcggcagcacccactacagcgcctacaagaccatcgagcaccagattgctgtgcagtacctgcagatgaagtggcccctgctggatgtgcaggccggcagcctgcagagccggcaggccctgaaggatgcccggagccccagccctgcccacatcgtgagcaacaaggtgcctgtggtgcagcacccccaccacgtgcaccccctgacccccctcatcacctacagcaatgagcacttcaccccaggcaaccccccaccccacctgcctgcagatgtggaccccaagacaggcatccccaggcctccccaccccccagacatcagcccctactaccccctgagccctggcaccgtgggccagatcccccaccccctgggctggctggtgccccagcagggccagcctgtgtaccccatcaccactggaggcttccgccacccctaccccacagccctgactgtgaatgcctccatgagccgcttccccccccacatggtgcccccccaccacaccctgcacaccaccggcatcccccacccagccatcgtgacccccaccgtgaagcaggagagcagccagagtgatgtgggcagcctgcacagcagcaagcaccaggacagcaagaaggaggaggagaagaagaagccccacatcaagaagcccctgaatgccttcatgctgtacatgaaggagatgagggccaaggtggtggctgaatgtaccctgaaggagagcgctgccatcaaccagatcctgggccgccgctggcacgccctgagccgggaggagcaggccaagtactatgagctggccaggaaggagcggcagctgcacatgcagctgtacccaggctggagcgcccgggacaactacggcaagaagaagaagaggaagagggacaagcagcctggagagaccaatgacctgagcgcccccaagaagtgccgggccaggtttggcctggaccagcagaacaactggtgtggcccctgcaggaggaagaagaagtgtgtgcgctacatccagggcgagggcagctgcctgagcccccccagcagtgatggcagcctgctggacagccccccacccagccccaacctgctgggcagccccccaagagatgccaagagccagacagagcagacccagcccctgagcctgagcctgaagccagaccccctggcccacctgtccatgatgcctcctcctccagccctgctgctggccgaggccacccacaaggccagcgccctgtgccccaatggagccctggacctgcccccagctgccctgcagcctgctgcccccagcagcagcatcgcccagcccagcaccagcagcctgcacagccacagcagcctggccggcacccagccccagcccctgagcctggtgaccaagagcctggagtag

SEQ ID NO: 173596 - DNA, 1449 bp, synthetic construct
  misc_feature 1..1449: note = Description of Artificial Sequence: Synthetic coding sequence
  source 1..1449: mol_type = other DNA
atgccccagctgaatggaggcggcggagatgacctgggcgccaatgatgagctgatctccttcaaggatgaaggagagcaggaggagaagagcagcgagaacagcagcgctgagcgggacctggctgatgtgaagagcagcctggtgaatgaaagtgagaccaaccagaacagcagcagtgacagcgaggccgagcggcggcccccacccaggtctgagagcttccgggacaagagccgggagagcctggaggaggccgccaagaggcaggacggcggcctcttcaagggccccccctacccaggctaccccttcatcatgatcccagacctgaccagcccctacctgcccaacggcagcctgagccccacagcccggaccctgcacttccagagcggcagcacccactacagcgcctacaagaccatcgagcaccagattgctgtgcagtacctgcagatgaagtggcccctgctggatgtgcaggccggcagcctgcagagccggcaggccctgaaggatgcccggagccccagccctgcccacatcgtgagcaacaaggtgcctgtggtgcagcacccccaccacgtgcaccccctgacccccctcatcacctacagcaatgagcacttcaccccaggcaaccccccaccccacctgcctgcagatgtggaccccaagacaggcatccccaggcctccccaccccccagacatcagcccctactaccccctgagccctggcaccgtgggccagatcccccaccccctgggctggctggtgccccagcagggccagcctgtgtaccccatcaccactggaggcttccgccacccctaccccacagccctgactgtgaatgcctccatgagccgcttccccccccacatggtgcccccccaccacaccctgcacaccaccggcatcccccacccagccatcgtgacccccaccgtgaagcaggagagcagccagagtgatgtgggcagcctgcacagcagcaagcaccaggacagcaagaaggaggaggagaagaagaagccccacatcaagaagcccctgaatgccttcatgctgtacatgaaggagatgagggccaaggtggtggctgaatgtaccctgaaggagagcgctgccatcaaccagatcctgggccgccgctggcacgccctgagccgggaggagcaggccaagtactatgagctggccaggaaggagcggcagctgcacatgcagctgtacccaggctggagcgcccgggacaactacggcaagaagaagaagaggaagagggacaagcagcctggagagaccaatgagcacagcgagtgcttcctgaacccctgcctgagcctgccccccatcaccggggagaagaagagcgcctttgccacctacaaggtgaaggctgctgccagcgcccaccccctgcagatggaggcctactag

SEQ ID NO: 173597 - DNA, 1008 bp, synthetic construct
  misc_feature 1..1008: note = Description of Artificial Sequence: Synthetic coding sequence
  source 1..1008: mol_type = other DNA
atgagcagcttcctgagcagccgcttccccccccacatggtgcccccccaccacaccctgcacaccaccggcatcccccacccagccatcgtgacccccaccgtgaagcaggagagcagccagagtgatgtgggcagcctgcacagcagcaagcaccaggacagcaagaaggaggaggagaagaagaagccccacatcaagaagcccctgaatgccttcatgctgtacatgaaggagatgagggccaaggtggtggctgaatgtaccctgaaggagagcgctgccatcaaccagatcctgggccgccgctggcacgccctgagccgggaggagcaggccaagtactatgagctggccaggaaggagcggcagctgcacatgcagctgtacccaggctggagcgcccgggacaactacggcaagaagaagaagaggaagagggacaagcagcctggagagaccaatgagcacagcgagtgcttcctgaacccctgcctgagcctgccccccatcacagacctgagcgcccccaagaagtgccgggcccgcttcggcctggaccagcagaacaactggtgtggcccctgcaggaggaagaagaagtgtgtgcgctacatccagggcgagggcagctgcctgagcccccccagcagtgatggcagcctgctggacagccccccacccagccccaacctgctgggcagccccccaagagatgccaagagccagacagagcagacccagcccctgagcctgagcctgaagccagaccccctggcccacctgtccatgatgcctcctcctccagccctgctgctggccgaggccacccacaaggccagcgccctgtgccccaacggggccctggacctgcccccagctgccctgcagcctgctgcccccagcagcagcatcgcccagcccagcaccagcagcctgcacagccacagcagcctggccggcacccagccccagcccctgagcctggtgaccaagagcctggagtag

SEQ ID NO: 173598 - DNA, 1809 bp, synthetic construct
  misc_feature 1..1809: note = Description of Artificial Sequence: Synthetic coding sequence
  source 1..1809: mol_type = other DNA
atgccccagctgaatggaggcggcggagatgacctgggcgccaatgatgagctgatctccttcaaggatgaaggagagcaggaggagaagagcagcgagaacagcagcgctgagcgggacctggctgatgtgaagagcagcctggtgaatgaaagtgagaccaaccagaacagcagcagtgacagcgaggccgagcggcggcccccacccaggtctgagagcttccgggacaagagccgggagagcctggaggaggccgccaagaggcaggacggcggcctcttcaagggccccccctacccaggctaccccttcatcatgatcccagacctgaccagcccctacctgcccaacggcagcctgagccccacagcccggaccctgcacttccagagcggcagcacccactacagcgcctacaagaccatcgagcaccagattgctgtgcagtacctgcagatgaagtggcccctgctggatgtgcaggccggcagcctgcagagccggcaggccctgaaggatgcccggagccccagccctgcccacatcgtgagcaacaaggtgcctgtggtgcagcacccccaccacgtgcaccccctgacccccctcatcacctacagcaatgagcacttcaccccaggcaaccccccaccccacctgcctgcagatgtggaccccaagacaggcatccccaggcctccccaccccccagacatcagcccctactaccccctgagccctggcaccgtgggccagatcccccaccccctgggctggctggtgccccagcagggccagcctgtgtaccccatcaccactggaggcttccgccacccctaccccacagccctgactgtgaatgcctccatgagccgcttccccccccacatggtgcccccccaccacaccctgcacaccaccggcatcccccacccagccatcgtgacccccaccgtgaagcaggagagcagccagagtgatgtgggcagcctgcacagcagcaagcaccaggacagcaagaaggaggaggagaagaagaagccccacatcaagaagcccctgaatgccttcatgctgtacatgaaggagatgagggccaaggtggtggctgaatgtaccctgaaggagagcgctgccatcaaccagatcctgggccgccgctggcacgccctgagccgggaggagcaggccaagtactatgagctggccaggaaggagcggcagctgcacatgcagctgtacccaggctggagcgcccgggacaactacggcaagaagaagaagaggaagagggacaagcagcctggagagaccaatgatgccaacacccccaagaagtgccgggccctgtttggcctggaccggcagaccctgtggtgcaagccctgcaggaggaagaagaagtgtgtgcgctacatccagggcgagggcagctgcctgagcccccccagcagtgatggcagcctgctggacagccccccacccagccccaacctgctgggcagccccccaagagatgccaagagccagacagagcagacccagcccctgagcctgagcctgaagccagaccccctggcccacctgtccatgatgcctcctcctccagccctgctgctggccgaggccacccacaaggccagcgccctgtgccccaatggagccctggacctgcccccagctgccctgcagcctgctgcccccagcagcagcatcgcccagcccagcaccagcagcctgcacagccacagcagcctggccggcacccagccccagcccctgagcctggtgaccaagagcctggagtag

SEQ ID NO: 173599 - DNA, 1860 bp, synthetic construct
  misc_feature 1..1860: note = Description of Artificial Sequence: Synthetic coding sequence
  source 1..1860: mol_type = other DNA
atgccccagctgaatggaggcggcggagatgacctgggcgccaatgatgagctgatctccttcaaggatgaaggagagcaggaggagaagagcagcgagaacagcagcgctgagcgggacctggctgatgtgaagagcagcctggtgaatgaaagtgagaccaaccagaacagcagcagtgacagcgaggccgagcggcggcccccacccaggtctgagagcttccgggacaagagccgggagagcctggaggaggccgccaagaggcaggacggcggcctcttcaagggccccccctacccaggctaccccttcatcatgatcccagacctgaccagcccctacctgcccaacggcagcctgagccccacagcccggaccctgcacttccagagcggcagcacccactacagcgcctacaagaccatcgagcaccagattgctgtgcagtacctgcagatgaagtggcccctgctggatgtgcaggccggcagcctgcagagccggcaggccctgaaggatgcccggagccccagccctgcccacatcgtgagcaacaaggtgcctgtggtgcagcacccccaccacgtgcaccccctgacccccctcatcacctacagcaatgagcacttcaccccaggcaaccccccaccccacctgcctgcagatgtggaccccaagacaggcatccccaggcctccccaccccccagacatcagcccctactaccccctgagccctggcaccgtgggccagatcccccaccccctgggctggctggtgccccagcagggccagcctgtgtaccccatcaccactggaggcttccgccacccctaccccacagccctgactgtgaatgcctccatgagccgcttccccccccacatggtgcccccccaccacaccctgcacaccaccggcatcccccacccagccatcgtgacccccaccgtgaagcaggagagcagccagagtgatgtgggcagcctgcacagcagcaagcaccaggacagcaagaaggaggaggagaagaagaagccccacatcaagaagcccctgaatgccttcatgctgtacatgaaggagatgagggccaaggtggtggctgaatgtaccctgaaggagagcgctgccatcaaccagatcctgggccgccgctggcacgccctgagccgggaggagcaggccaagtactatgagctggccaggaaggagcggcagctgcacatgcagctgtacccaggctggagcgcccgggacaactacggcaagaagaagaagaggaagagggacaagcagcctggagagaccaatgagcacagcgagtgcttcctgaacccctgcctgagcctgccccccatcacagatgccaacacccccaagaagtgccgggccctgtttggcctggaccggcagaccctgtggtgcaagccctgcaggaggaagaagaagtgtgtgcgctacatccagggcgagggcagctgcctgagcccccccagcagtgatggcagcctgctggacagccccccacccagccccaacctgctgggcagccccccaagagatgccaagagccagacagagcagacccagcccctgagcctgagcctgaagccagaccccctggcccacctgtccatgatgcctcctcctccagccctgctgctggccgaggccacccacaaggccagcgccctgtgccccaacggggccctggacctgcccccagctgccctgcagcctgctgcccccagcagcagcatcgcccagcccagcaccagcagcctgcacagccacagcagcctggccggcacccagccccagcccctgagcctggtgaccaagagcctggagtag

SEQ ID NO: 173600 - DNA, 645 bp, synthetic construct
  misc_feature 1..645: note = Description of Artificial Sequence: Synthetic coding sequence
  source 1..645: mol_type = other DNA
atggccttcctgcgctccatgtggggcgtgctgagcgccctgggccgctctggagctgagctgtgcaccggctgcggcagccggctgcggagccccttctcctttgtgtacctgccccgctggttcagctctgtgctggccagctgccccaagaagcctgtgagcagctacctgcgcttcagcaaggagcagctgcccatcttcaaggcccagaacccagatgccaagaccacagagctgatccgccgcatcgcccagcgctggagggagctgcctgacagcaagaagaagatctaccaggatgcctacagagctgagtggcaggtgtacaaggaggagatcagccgcttcaaggagcagctgacccccagccagatcatgagcctggagaaggagatcatggacaagcacctgaagaggaaggccatgaccaagaagaaggagaagctgaagacagtgaaggagaactggaagaacctgagtgacagcgagaaggagctgtacatccagcacgccaaggaggatgagacccgctaccacaatgagatgaagtcctgggaggagcagatgattgaggtgggcaggaaggacctgctgcggaggaccatcaagaagcagaggaaatatggagcagaagaatgttag

SEQ ID NO: 173601 - DNA, 660 bp, synthetic construct
  misc_feature 1..660: note = Description of Artificial Sequence: Synthetic coding sequence
  source 1..660: mol_type = other DNA
tgagagctgtgcaccggctgcggcagccggctgcggagccccttctcctttgtgtacctgccccgctggttcagctctgtgctggccagctgccccaagaagcctgtgagcagctacctgcgcttcagcaaggagcagctgcccatcttcaaggcccagaacccagatgccaagaccacagagctgatccgccgcatcgcccagcgctggagggagctgcctgacagcaagaagaagatctaccaggatgcctacagagctgagtggcaggtgtacaaggaggagatcagccgcttcaaggagcagctgacccccagccagatcatgagcctggagaaggagatcatggacaagcacctgaagaggaaggccatgaccaagaagaaggagctgaccctgctgggcaagcccaagaggcccaggtctgcctacaacgtgtatgtggccgagcgcttccaggaggccaagggggacagcccccaggagaagctgaagacagtgaaggagaactggaagaacctgagtgacagcgagaaggaggtgtccatcaccgtggtgtccctgaagtgcctgctgcgcatctctgtgcgggagtgcatccgggcccggctggacagctgtgaggacaacctggtgctgctgatcatccaggtgttctag

SEQ ID NO: 173602 - DNA, 741 bp, synthetic construct
  misc_feature 1..741: note = Description of Artificial Sequence: Synthetic coding sequence
  source 1..741: mol_type = other DNA
atggccttcctgcgctccatgtggggcgtgctgagcgccctgggccgctctggagctgagctgtgcaccggctgcggcagccggctgcggagccccttctcctttgtgtacctgccccgctggttcagctctgtgctggccagctgccccaagaagcctgtgagcagctacctgcgcttcagcaaggagcagctgcccatcttcaaggcccagaacccagatgccaagaccacagagctgatccgccgcatcgcccagcgctggagggagctgcctgacagcaagaagaagatctaccaggatgcctacagagctgagtggcaggtgtacaaggaggagatcagccgcttcaaggagcagctgacccccagccagatcatgagcctggagaaggagatcatggacaagcacctgaagaggaaggccatgaccaagaagaaggagctgaccctgctgggcaagcccaagaggcccaggtctgcctacaacgtgtatgtggccgagcgcttccaggaggccaagggggacagcccccaggagaagctgaagacagtgaaggagaactggaagaacctgagtgacagcgagaaggagctgtacatccagcacgccaaggaggatgagacccgctaccacaatgagatgaagtcctgggaggagcagatgattgaggtgggcaggaaggacctgctgcggaggaccatcaagaagcagaggaaatatggagcagaagaatgttag

SEQ ID NO: 173603 - DNA, 1302 bp, synthetic construct
  misc_feature 1..1302: note = Description of Artificial Sequence: Synthetic coding sequence
  source 1..1302: mol_type = other DNA
atgagcatcctggccaagatgggagactggcaggacagacatgatggcaccagcaatggaacagcccggctgccccagctgggcaccgtgggccagagcccctacaccagcgccccacccctgagccacaccccaaatgctgacttccagcccccctacttccccccaccctaccagcccatctacccccagagccaggacccctacagccacgtgaatgacccctacagcctgaaccccctgcacgcccagccccagccccagcaccctggctggccaggccagaggcagagccaggagagcggcctgctgcacacccaccggggcctgccccaccagctgagcggcctggacccccggcgggactacagaagacatgaggacctgctgcacggcccccacgccctgagcagcggcctgggggacctgagcatccacagcctgccccacgccatcgaggaggtgccccacgtggaggaccccggcatcaacatcccagaccagaccgtcatcaagaagggccctgtgtccctgagcaagagcaacagcaatgctgtgtctgccatccccatcaacaaggacaacctgtttggaggagtggtgaaccccaatgaggtgttctgcagcgtgcccggccgcctgagcctgctgagcagcaccagcaagtacaaggtgacagtggccgaggtgcagaggcggctgagccccccagagtgcctgaatgccagcctgctgggcggcgtgctgcggcgggccaagagcaagaatggaggccgcagcctgcgggagaagctggacaagattggcctgaacctgcctgctggccgcaggaaggccgccaacgtgaccctgctgaccagcctggtggagggggaggccgtgcacctggcccgggactttggctacgtgtgtgaaacagagttccctgccaaggctgtggccgagttcctgaaccggcagcacagcgaccccaatgagcaggtgaccaggaagaacatgctgctggccaccaagcagatctgcaaggagttcacagacctgctggcccaggacaggagccccctgggcaacagccggcccaaccccatcctggagcccggcatccagagctgcctgacccacttcaacctgatcagccacggcttcggcagccctgctgtgtgtgccgctgtgacagccctgcagaactacctgacagaggccctgaaggccatggacaagatgtacctgagcaacaaccccaacagccacacagacaacaatgccaagagcagtgacaaggaggagaagcacaggaagtag

SEQ ID NO: 173604 - DNA, 1314 bp, synthetic construct
  misc_feature 1..1314: note = Description of Artificial Sequence: Synthetic coding sequence
  source 1..1314: mol_type = other DNA
atgctgtggaagctgacagacaacatcaagtatgaggactgtgaagatagacatgatggcaccagcaatggaacagcccggctgccccagctgggcaccgtgggccagagcccctacaccagcgccccacccctgagccacaccccaaatgctgacttccagcccccctacttccccccaccctaccagcccatctacccccagagccaggacccctacagccacgtgaatgacccctacagcctgaaccccctgcacgcccagccccagccccagcaccctggctggccaggccagaggcagagccaggagagcggcctgctgcacacccaccggggcctgccccaccagctgagcggcctggacccccggcgggactacagaagacatgaggacctgctgcacggcccccacgccctgagcagcggcctgggggacctgagcatccacagcctgccccacgccatcgaggaggtgccccacgtggaggaccccggcatcaacatcccagaccagaccgtcatcaagaagggccctgtgtccctgagcaagagcaacagcaatgctgtgtctgccatccccatcaacaaggacaacctgtttggaggagtggtgaaccccaatgaggtgttctgcagcgtgcccggccgcctgagcctgctgagcagcaccagcaagtacaaggtgacagtggccgaggtgcagaggcggctgagccccccagagtgcctgaatgccagcctgctgggcggcgtgctgcggcgggccaagagcaagaatggaggccgcagcctgcgggagaagctggacaagattggcctgaacctgcctgctggccgcaggaaggccgccaacgtgaccctgctgaccagcctggtggagggggaggccgtgcacctggcccgggactttggctacgtgtgtgaaacagagttccctgccaaggctgtggccgagttcctgaaccggcagcacagcgaccccaatgagcaggtgaccaggaagaacatgctgctggccaccaagcagatctgcaaggagttcacagacctgctggcccaggacaggagccccctgggcaacagccggcccaaccccatcctggagcccggcatccagagctgcctgacccacttcaacctgatcagccacggcttcggcagccctgctgtgtgtgccgctgtgacagccctgcagaactacctgacagaggccctgaaggccatggacaagatgtacctgagcaacaaccccaacagccacacagacaacaatgccaagagcagtgacaaggaggagaagcacaggaagtag

SEQ ID NO: 173605 - DNA, 1296 bp, synthetic construct
  misc_feature 1..1296: note = Description of Artificial Sequence: Synthetic coding sequence
  source 1..1296: mol_type = other DNA
atgctggtgcacagcttcagcgccatggacagacatgatggcaccagcaatggaacagcccggctgccccagctgggcaccgtgggccagagcccctacaccagcgccccacccctgagccacaccccaaatgctgacttccagcccccctacttccccccaccctaccagcccatctacccccagagccaggacccctacagccacgtgaatgacccctacagcctgaaccccctgcacgcccagccccagccccagcaccctggctggccaggccagaggcagagccaggagagcggcctgctgcacacccaccggggcctgccccaccagctgagcggcctggacccccggcgggactacagaagacatgaggacctgctgcacggcccccacgccctgagcagcggcctgggggacctgagcatccacagcctgccccacgccatcgaggaggtgccccacgtggaggaccccggcatcaacatcccagaccagaccgtcatcaagaagggccctgtgtccctgagcaagagcaacagcaatgctgtgtctgccatccccatcaacaaggacaacctgtttggaggagtggtgaaccccaatgaggtgttctgcagcgtgcccggccgcctgagcctgctgagcagcaccagcaagtacaaggtgacagtggccgaggtgcagaggcggctgagccccccagagtgcctgaatgccagcctgctgggcggcgtgctgcggcgggccaagagcaagaatggaggccgcagcctgcgggagaagctggacaagattggcctgaacctgcctgctggccgcaggaaggccgccaacgtgaccctgctgaccagcctggtggagggggaggccgtgcacctggcccgggactttggctacgtgtgtgaaacagagttccctgccaaggctgtggccgagttcctgaaccggcagcacagcgaccccaatgagcaggtgaccaggaagaacatgctgctggccaccaagcagatctgcaaggagttcacagacctgctggcccaggacaggagccccctgggcaacagccggcccaaccccatcctggagcccggcatccagagctgcctgacccacttcaacctgatcagccacggcttcggcagccctgctgtgtgtgccgctgtgacagccctgcagaactacctgacagaggccctgaaggccatggacaagatgtacctgagcaacaaccccaacagccacacagacaacaatgccaagagcagtgacaaggaggagaagcacaggaagtag

SEQ ID NO: 173606 - DNA, 1320 bp, synthetic construct
  misc_feature 1..1320: note = Description of Artificial Sequence: Synthetic coding sequence
  source 1..1320: mol_type = other DNA
atgaagatgctgtggaagctgacagacaacatcaagtatgaggactgtgaagatagacatgatggcaccagcaatggaacagcccggctgccccagctgggcaccgtgggccagagcccctacaccagcgccccacccctgagccacaccccaaatgctgacttccagcccccctacttccccccaccctaccagcccatctacccccagagccaggacccctacagccacgtgaatgacccctacagcctgaaccccctgcacgcccagccccagccccagcaccctggctggccaggccagaggcagagccaggagagcggcctgctgcacacccaccggggcctgccccaccagctgagcggcctggacccccggcgggactacagaagacatgaggacctgctgcacggcccccacgccctgagcagcggcctgggggacctgagcatccacagcctgccccacgccatcgaggaggtgccccacgtggaggaccccggcatcaacatcccagaccagaccgtcatcaagaagggccctgtgtccctgagcaagagcaacagcaatgctgtgtctgccatccccatcaacaaggacaacctgtttggaggagtggtgaaccccaatgaggtgttctgcagcgtgcccggccgcctgagcctgctgagcagcaccagcaagtacaaggtgacagtggccgaggtgcagaggcggctgagccccccagagtgcctgaatgccagcctgctgggcggcgtgctgcggcgggccaagagcaagaatggaggccgcagcctgcgggagaagctggacaagattggcctgaacctgcctgctggccgcaggaaggccgccaacgtgaccctgctgaccagcctggtggagggggaggccgtgcacctggcccgggactttggctacgtgtgtgaaacagagttccctgccaaggctgtggccgagttcctgaaccggcagcacagcgaccccaatgagcaggtgaccaggaagaacatgctgctggccaccaagcagatctgcaaggagttcacagacctgctggcccaggacaggagccccctgggcaacagccggcccaaccccatcctggagcccggcatccagagctgcctgacccacttcaacctgatcagccacggcttcggcagccctgctgtgtgtgccgctgtgacagccctgcagaactacctgacagaggccctgaaggccatggacaagatgtacctgagcaacaaccccaacagccacacagacaacaatgccaagagcagtgacaaggaggagaagcacaggaagtag

SEQ ID NO: 173607 - DNA, 987 bp, synthetic construct
  misc_feature 1..987: note = Description of Artificial Sequence: Synthetic coding sequence
  source 1..987: mol_type = other DNA
atgctgtggaagctgacagacaacatcaagtatgaggactgtgaagatagacatgatggcaccagcaatggaacagcccggctgccccagctgggcaccgtgggccagagcccctacaccagcgccccacccctgagccacaccccaaatgctgacttccagcccccctacttccccccaccctaccagcccatctacccccagagccaggacccctacagccacgtgaatgacccctacagcctgaaccccctgcacgcccagccccagccccagcaccctggctggccaggccagaggcagagccaggagagcggcctgctgcacacccaccggggcctgccccaccagctgagcggcctggacccccggcgggactacagaagacatgaggacctgctgcacggcccccacgccctgagcagcggcctgggggacctgagcatccacagcctgccccacgccatcgaggaggtgccccacgtggaggaccccggcatcaacatcccagaccagaccgtcatcaagaagggccctgtgtccctgagcaagagcaacagcaatgctgtgtctgccatccccatcaacaaggacaacctgtttggaggagtggtgaaccccaatgaggtgttctgcagcgtgcccggccgcctgagcctgctgagcagcaccagcaagtacaaggtgacagtggccgaggtgcagaggcggctgagccccccagagtgcctgaatgccagcctgctgggcggcgtgctgcggcgggccaagagcaagaatggaggccgcagcctgcgggagaagctggacaagattggcctgaacctgcctgctggccgcaggaaggccgccaacgtgaccctgctgaccagcctggtggaggacagatatgccaagagcagccccacctgctggctgaggacagacctgccctggggcacccacggccccacccccagctggagccctgccagcagagctgcctag

SEQ ID NO: 173608 - DNA, 1314 bp, synthetic construct; identical to SEQ ID NO: 173604
  misc_feature 1..1314: note = Description of Artificial Sequence: Synthetic coding sequence
  source 1..1314: mol_type = other DNA

SEQ ID NO: 173609 - DNA, 1410 bp, synthetic construct
  misc_feature 1..1410: note = Description of Artificial Sequence: Synthetic coding sequence
  source 1..1410: mol_type = other DNA
atgcacagccccccccgggaccaggccgccatcatgctgtggaagctggtggagaatgtgaagtatgaggacatctatgagatgctggtgcacacctacagctccatggacagacatgatggagtgcccagccacagcagccggctgagccagctgggctctgtgtcccagggcccctacagcagcgccccacccctgagccacacccccagcagtgacttccagcccccctacttccccccaccctaccagcccctgccctaccaccagagccaggacccctacagccacgtgaatgacccctacagcctgaaccccctgcaccagccccagcagcacccctggggccagaggcagaggcaggaggtgggcagcgaggccggcagcctgctgccccagccccgggccgccctgccccagctgagcggcctggacccccggcgggactaccacagcgtgcggcggccagatgtgctgctgcacagcgcccaccacggcctggatgctggcatgggagacagcctgagcctgcacggcctgggccaccctggcatggaggatgtgcagagcgtggaggatgccaacaacagcggcatgaacctgctggaccagagcgtcatcaagaaggtgcctgtgccccccaagtctgtgaccagcctgatgatgaacaaggatggcttcctgggcggcatgtctgtgaacacaggagaggtgttctgcagcgtgcccggccgcctgagcctgctgagcagcaccagcaagtacaaggtgacagtgggggaggtgcagaggcggctgagccccccagagtgcctgaatgccagcctgctgggcggcgtgctgcggcgggccaagagcaagaatggaggccgcagcctgcgggagcggctggagaagattggcctgaacctgcctgctggccgcaggaaggccgccaacgtgaccctgctgaccagcctggtggagggggaggccgtgcacctggcccgggactttggctacatctgtgaaacagagttccctgccaaggctgtgtctgagtacctgaaccggcagcacacagaccccagcgacctgcacagcaggaagaacatgctgctggccaccaagcagctgtgcaaggagttcacagacctgctggcccaggacaggacccccatcggcaacagccggcccagccccatcctggagcccggcatccagagctgcctgacccacttcagcctcatcacccacggctttggagccccagccatctgtgccgccctgacagccctgcagaactacctgacagaggccctgaagggcatggacaagatgttcctgaacaacaccaccaccaacagacacaccagcggggagggccctggcagcaagacaggagacaaggaggagaagcacaggaagtag

SEQ ID NO: 173610 - DNA, 597 bp, synthetic construct
  misc_feature 1..597: note = Description of Artificial Sequence: Synthetic coding sequence
  source 1..597: mol_type = other DNA
atgctgtggaagctggtggagaatgtgaagtatgaggacatctatgagatgctggtgcacacctacagctccatggacagacatgatggagtgcccagccacagcagccggctgagccagctgggctctgtgtcccagggcccctacagcagcgccccacccctgagccacacccccagcagtgacttccagcccccctacttccccccaccctaccagcccctgccctaccaccagagccaggacccctacagccacgtgaatgacccctacagcctgaaccccctgcaccagccccagcagcacccctggggccagaggcagaggcaggaggtgggcagcgaggccggcagcctgctgccccagcccagggctgccctgccccagctgagcggcctggacccccggcgggactaccacagcgtgagaagaccagatgtgctgctgcacagcgcccaccacggcctggatgctggcatgggagacagcctgagcctgcacggcctgggccaccctggcatggaggatgtgcagagcgtggaggatgccaacaacagcggcatgaacctgctggaccagagcgtcatcaagaagtag

SEQ ID NO: 173611 - DNA, 1383 bp, synthetic construct
  misc_feature 1..1383: note = Description of Artificial Sequence: Synthetic coding sequence
  source 1..1383: mol_type = other DNA
atgcacagccccccccgggaccaggccgccatcatgctgtggaagctggtggagaatgtgaagtatgaggacatctatgaagatagacatgatggagtgcccagccacagcagccggctgagccagctgggctctgtgtcccagggcccctacagcagcgccccacccctgagccacacccccagcagtgacttccagcccccctacttccccccaccctaccagcccctgccctaccaccagagccaggacccctacagccacgtgaatgacccctacagcctgaaccccctgcaccagccccagcagcacccctggggccagaggcagaggcaggaggtgggcagcgaggccggcagcctgctgccccagcccagggctgccctgccccagctgagcggcctggacccccggcgggactaccacagcgtgagaagaccagatgtgctgctgcacagcgcccaccacggcctggatgctggcatgggagacagcctgagcctgcacggcctgggccaccctggcatggaggatgtgcagagcgtggaggatgccaacaacagcggcatgaacctgctggaccagagcgtcatcaagaaggtgcctgtgccccccaagtctgtgaccagcctgatgatgaacaaggatggcttcctgggcggcatgtctgtgaacacaggagaggtgttctgcagcgtgcccggccgcctgagcctgctgagcagcaccagcaagtacaaggtgacagtgggggaggtgcagaggcggctgagccccccagaatgtctgaatgccagcctgctgggcggcgtgctgcggcgggccaagagcaagaatggaggccgcagcctgcgggagcggctggagaagattggcctgaacctgcctgctggaagaaggaaggccgccaacgtgaccctgctgaccagcctggtggagggggaggccgtgcacctggcccgggactttggctacatctgtgaaacagagttccctgccaaggctgtgtctgagtacctgaaccggcagcacacagaccccagcgacctgcacagcaggaagaacatgctgctggccaccaagcagctgtgcaaggagttcacagacctgctggcccaggacaggacccccatcggcaacagccggcccagccccatcctggagcccggcatccagagctgcctgacccacttcagcctcatcacccacggctttggagccccagccatctgtgccgccctgacagccctgcagaactacctgacagaggccctgaagggcatggacaagatgttcctgaacaacaccaccaccaacagacacaccagcggggagggccctggcagcaagacaggagacaaggaggagaagcacaggaagtag

SEQ ID NO: 173612 - DNA, 1359 bp, synthetic construct
  misc_feature 1..1359: note = Description of Artificial Sequence: Synthetic coding sequence
  source 1..1359: mol_type = other DNA
atgagcaccaccttccctggcctggtgcatgatgctgagatcagacatgatggcagcaacagctaccgcctgatgcagctgggctgcctggagagcgtggccaacagcacagtggcctacagcagcagcagccccctgacctacagcaccactggaacagaatttgccagcccctacttcagcaccaaccaccagtacacccccctgcaccaccagagcttccactatgagttccagcacagccaccctgctgtgaccccagatgcctacagcctgaacagcctgcaccacagccagcagtactaccagcagatccaccacggggagcccacagacttcatcaacctgcacaatgcccgggccctgaagagcagctgcctggatgagcagaggcgggagctgggctgcctggatgcctacagaagacatgacctgagcctgatgagccacggcagccagtatggcatgcacccagaccagaggctgctgcccggccccagcctgggcctggccgctgctggagcagatgacctgcagggctctgtggaggcccagtgtggcctggtgctgaatggccagggcggcgtcatccggcggggcggcacctgtgtggtgaaccccacagacctcttctgcagcgtgcccggccgcctgagcctgctgagcagcaccagcaagtacaaggtgaccatcgccgaggtgaagaggcggctgagccccccagagtgcctgaatgccagcctgctgggcggcatcctgcggcgggccaagagcaagaatggaggccgctgcctgcgggagaagctggaccggctgggcctgaacctgcctgctggccgcaggaaggccgccaacgtgaccctgctgaccagcctggtggagggggaggccctgcacctggcccgggactttggctacacctgtgaaacagagttccctgccaaggctgtgggggagcacctggcccggcagcacatggagcagaaggagcagacagccaggaagaagatgatcctggccaccaagcagatctgcaaggagttccaggacctgctgagccaggacaggagccccctgggcagcagccggcccacccccatcctggacctggacatccagaggcacctgacccacttcagcctcatcacccacggcttcggcaccccagccatctgtgccgccctgagcaccttccagacagtgctgtctgagatgctgaactacctggagaagcacaccacccacaagaatggaggagctgctgacagcggccagggccacgccaacagcgagaaggcccccctgaggaagaccagcgaggccgctgtgaaggagggcaagacagagaagacagactag

SEQ ID NO: 173613 - DNA, 1329 bp, synthetic construct
  misc_feature 1..1329: note = Description of Artificial Sequence: Synthetic coding sequence
  source 1..1329: mol_type = other DNA
atgctggtgcacacctacagcgccatggagaggccagatggcctgggcgctgctgctggaggagcccggctgagcagcctgccccaggccgcctacggccctgccccacccctgtgccacaccccagctgccacagctgctgctgagttccagcccccctacttccccccaccctacccccagccccccctgccctacggccaggccccagatgctgctgctgccttcccccacctggccggggacccctacggcggcctggcccccctggcccagccccagcccccccaggccgcctgggccgcccccagggctgctgcccgggcccacgaggagcccccaggcctgctggcccccccagcccgggccctgggcctggacccccggcgggactatgccacagctgtgccccggctgctgcacggcctggctgatggagcccacggcctggctgatgcccccctgggcctgcccggcctggccgccgcccctggcctggaggacctgcaggccatggatgagcccggcatgagcctgctggaccagagcgtcatcaagaaggtgcccatccccagcaaggccagcagcctgagcgccctgagcctggccaaggacagcctggtgggcggcatcaccaaccctggagaggtgttctgcagcgtgcccggccgcctgagcctgctgagcagcaccagcaagtacaaggtgacagtgggggaggtgcagaggcggctgagccccccagaatgtctgaatgccagcctgctgggcggcgtgctgcggcgggccaagagcaagaatggaggccgctgcctgcgggagcggctggagaagattggcctgaacctgcctgctggaagaaggaaggccgccaacgtgaccctgctgaccagcctggtggagggggaggccgtgcacctggcccgggactttggctacgtgtgtgaaacagagttccctgccaaggctgctgctgagtacctgtgccggcagcacgccgaccctggagagctgcacagcaggaagtccatgctgctggccgccaagcagatctgcaaggagtttgctgacctgatggcccaggacaggagccccctgggcaacagcaggcctgccctgatcctggagcccggggtgcagagctgcctgacccacttcagcctcatcacccacggctttggaggccctgccatctgtgccgccctgacagccttccagaactacctgctggagagcctgaagggcctggacaagatgttcctgagctctgtgggcagcggccacggggagaccaaggccagcgagaaggatgccaagcacaggaagtag

SEQ ID NO: 173614 - DNA, 1353 bp, synthetic construct
  misc_feature 1..1353: note = Description of Artificial Sequence: Synthetic coding sequence
  source 1..1353: mol_type = other DNA
atgctgtggaagatcacagacaacgtgaagtatgaggaggactgtgaggacagacatgatggcagcagcaatggaaacccccgggtgccccacctgagcagcgctggccagcacctgtacagccctgccccacccctgagccacactggagtggccgagtaccagcccccaccctacttccccccaccctaccagcagctggcctacagccagagcgctgacccctacagccacctgggggaggcctatgctgctgccatcaaccccctgcaccagcctgcccccaccggcagccagcagcaggcctggccaggccggcagagccaggagggcgccggcctgcccagccaccacggccggcctgctggcctgctgccccacctgagcggcctggaggccggggctgtgtctgccaggagagatgcctaccgccgcagtgacctgctgctgccccacgcccacgccctggatgctgctggcctggccgagaacctgggcctgcatgacatgccccaccagatggatgaggtgcagaatgtggatgaccagcacctgctgctgcatgaccagaccgtcatcaggaagggccccatctccatgaccaagaaccccctgaacctgccctgccagaaggagctggtgggcgctgtgatgaaccccacagaggtgttctgcagcgtgcccggccgcctgagcctgctgagcagcaccagcaagtacaaggtgacagtggccgaggtgcagaggcggctgagccccccagaatgtctgaatgccagcctgctgggcggcgtgctgcggcgggccaagagcaagaatggaggccgcagcctgcgggagaagctggacaagattggcctgaacctgcctgctggaagaaggaaggccgcccacgtgaccctgctgaccagcctggtggagggggaggccgtgcacctggcccgggactttgcctacgtgtgtgaggccgagttccccagcaagcctgtggccgagtacctgacccggccccacctgggcggcagaaatgagatggccgccaggaagaacatgctgctggccgcccagcagctgtgcaaggagttcacagagctgctgagccaggacaggacccctcatggcaccagccggctggcccctgtgctggagaccaacatccagaactgcctgagccacttcagcctcatcacccacggcttcggcagccaggccatctgtgccgctgtgtctgccctgcagaactacatcaaggaggccctgattgtgattgacaagagctacatgaaccctggggaccagagccctgctgacagcaacaagaccctggagaagatggagaagcacaggaagtag

SEQ ID NO: 173615 - DNA, 357 bp, synthetic construct
  misc_feature 1..357: note = Description of Artificial Sequence: Synthetic coding sequence
  source 1..357: mol_type = other DNA
atgttcctgcaggacagacatgatggcagcagcaatggaaacccccgggtgccccacctgagcagcgctggccagcacctgtacagccctgccccacccctgagccacactggagtggccgagtaccagcccccaccctacttccccccaccctaccagcagctggcctacagccagagcgctgacccctacagccacctgggggaggcctatgctgctgccatcaaccccctgcaccagcctgcccccaccggcagccagcagcaggcctggccaggccggcagagccaggagggcgccggcctgcccagccaccacggccggcctgctggcctgctgccccacctgtctggatag

SEQ ID NO: 173616 - DNA, 846 bp, synthetic construct
  misc_feature 1..846: note = Description of Artificial Sequence: Synthetic coding sequence
  source 1..846: mol_type = other DNA
atgccccaccagatggatgaggtgcagaatgtggatgaccagcacctgctgctgcatgaccagaccgtcatcaggaagggccccatctccatgaccaagaaccccctgaacctgccctgccagaaggagctggtgggcgctgtgatgaaccccacagaggtgttctgcagcgtgcccggccgcctgagcctgctgagcagcaccagcaagtacaaggtgacagtggccgaggtgcagaggcggctgagccccccagagtgcctgaatgccagcctgctgggcggcgtgctgcggcgggccaagagcaagaatggaggccgcagcctgcgggagaagctggacaagattggcctgaacctgcctgctggccgcaggaaggccgcccacgtgaccctgctgaccagcctggtggagggggaggccgtgcacctggcccgggactttgcctacgtgtgtgaggccgagttccccagcaagcctgtggccgagtacctgacccggccccacctgggcggcagaaatgagatggccgccaggaagaacatgctgctggccgcccagcagctgtgcaaggagttcacagagctgctgagccaggacaggaccccccacggcaccagccggctggcccctgtgctggagaccaacatccagaactgcctgagccacttcagcctcatcacccacggcttcggcagccaggccatctgtgccgctgtgtctgccctgcagaactacatcaaggaggccctgattgtcatcgacaagagctacatgaaccctggggaccagagccctgctgacagcaacaagaccctggagaagatggagaagcacaggaagtag

SEQ ID NO: 173617 - DNA, 1041 bp, synthetic construct
  misc_feature 1..1041: note = Description of Artificial Sequence: Synthetic coding sequence
  source 1..1041: mol_type = other DNA
atggccgccagcggcaagctgagcacctgccgcctgccccccctgcccaccatccgggagatcatcaagctgctgcggctgcaggccgccaagcagctgagccagaacttcctgctggacctgcggctgacagacaagatcgtgaggaaggccggcaacctgaccaatgcctacgtgtatgaggtgggccctggccctgggggcatcaccaggagcatcctgaatgctgatgtggccgagctgctggtggtggagaaggacacccgcttcatccctggcctgcagatgctgagtgatgctgcccctgggaagctgagaattgtgcatggagatgtgctgaccttcaaggtggagaaggccttcagcgagagcctgaagaggccctgggaggatgatcctccaaatgtgcacatcatcggcaacctgcccttctctgtgtccacccccctcatcatcaagtggctggagaacatcagctgcagagatggcccctttgtgtatggccgcacccagatgaccctgaccttccagaaggaggtggccgagcggctggccgccaacacaggcagcaagcagaggagccggctgtctgtgatggcccagtacctgtgcaatgtgcgccacatcttcaccatccctggccaggcctttgtgcccaagccagaggtggatgtgggcgtggtgcacttcacccccctcatccagcccaagattgagcagcccttcaagctggtggagaaggtggtgcagaatgtgttccagttccggaggaagtactgccaccggggcctgaggatgctgtttcctgaggcccagaggctggagagcacaggccgcctgctggagctggccgacatcgaccccaccctgcggccccggcagctgagcatcagccacttcaagagcctgtgtgatgtgtacaggaagatgtgtgatgaggacccccagctgtttgcctacaacttccgggaggagctgaagaggaggaagagcaagaatgaggagaaggaggaggatgatgctgagaactaccgcctgtag

SEQ ID NO: 173618 - DNA, 1728 bp, synthetic construct
  misc_feature 1..1728: note = Description of Artificial Sequence: Synthetic coding sequence
  source 1..1728: mol_type = other DNA
atgagccacgccgctgagcccgccagagatggagtggaggccagcgctgagggccccagggctgtgtttgtgctgctggaggagaggaggcctgctgacagcgcccagctgctgagcctgaacagcctgctgcctgagagcggcatcgtggccgacatcgagctggagaatgtgctggaccctgacagcttctatgagctgaagagccagcccctgcccctgcggagcagcctgcccatcagcctgcaggccaccccagccaccccagccaccctgagcgccagcagcagcgctgggggcagcaggaccccagccatgagcagcagcagcagcagccgggtgctgctgcggcagcagctgatgagggcccaggcccaggagcaggagcggcgggagcggcgggagcaggccgctgctgcccccttccccagccctgccccagccagccctgccatctctgtggtgggcgtgtctgctgggggccacaccctgagcaggcctcctccagcccaggtgccccgggaggtgctgaaggtgcagacccacctggagaaccccacccgctaccacctgcagcaggcccggcggcagcaggtgaagcagtacctgagcaccaccctgggccccaagctggccagccaggccctgaccccacctcctggccctgccagcgcccagcccctgcctgcccctgaggccgcccacaccaccggccccaccggcagcgcccccaacagccccatggccctgctgaccatcggcagcagcagcgagaaggagattgatgatgtgattgatgagatcatcagcctggagagcagctacaatgatgagatgctgagctacctgcccggcggcaccaccggcctgcagctgcccagcaccctgcctgtgtctggcaacctgctggatgtgtacagcagccagggcgtggccaccccagccatcaccgtgagcaacagctgcccagctgagctgcccaacatcaagcgggagatcagcgagacagaggccaaggccctgctgaaggagcggcagaagaaggacaaccacaacctgattgaaagaagaagacgcttcaacatcaatgaccgcatcaaggagctgggcaccctcatccccaagagcagtgaccctgagatgcgctggaacaagggcaccatcctgaaggcctctgtggactacatcaggaagctgcagaaggagcagcagaggagcaaggacctggagagccggcagaggagcctggagcaggccaacagaagcctgcagctgcgcatccaggagctggagctgcaggcccagatccacggcctgcctgtgccccccaccccaggcctgctgagcctggccaccaccagcgccagtgacagcctgaagccagagcagctggacatcgaggaggagggccggcctggggccgccaccttccacgtgggcggcggccctgcccagaatgccccccaccagcagcccccagcccccccatctgatgccctgctggacctgcacttccccagcgaccacctgggggacctgggggaccccttccacctgggcctggaggacatcctgatggaggaggaggagggcgtggtgggcggcctgtctggaggagccctgagccccctgcgggccgccagtgaccccctgctgagctctgtgtccccagctgtgtccaaggccagcagcagaagaagcagcttctccatggaggaggagagctag

SEQ ID NO: 173619 - DNA, 1509 bp, synthetic construct
  misc_feature 1..1509: note = Description of Artificial Sequence: Synthetic coding sequence
  source 1..1509: mol_type = other DNA
atggcctgggccctgaagctgcccctggctgatgaagtcatcgagagcggcctggtgcaggactttgatgccagcctgtctggaattggccaggagctgggcgctggggcctacagcatgtctgatgtgctggccctgcccatcttcaagcaggaggagagcagcctgcccccagacaatgaaaacaagatcctgcccttccagtatgtgctgtgtgccgccaccagccctgctgtgaagctgcatgatgagaccctgacctacctgaaccagggccagagctatgagatccgcatgctggacaacaggaagctgggggagctgcctgagatcaacgggaagctggtgaagagcatcttccgggtggtgttccatgaccggcggctgcagtacacagagcaccagcagctggagggctggcgctggaacagacctggggaccgcatcctggacatcgacatccccatgtctgtgggcatcatcgacccccgggccaaccccacccagctgaacacagtggagttcctgtgggaccctgccaagaggaccagcgtcttcatccaggtgcactgcatcagcacagagttcaccatgaggaagcatggaggagagaagggcgtgcccttccgggtgcagattgacaccttcaaggaaaatgaaaatggagagtacacagagcacctgcacagcgccagctgccagatcaaggtgttcaagcccaagggagctgacaggaagcagaagacagaccgggagaagatggagaagaggacccctcatgagaaggagaagtaccagcccagctatgagaccaccatcctgacagagtgcagcccctggccagagatcacctacgtgaacaacagccccagccctggcttcaacagcagccacagcagcttcagcctgggggagggcaatggcagccccaaccaccagcctgagcccccacctcctgtgacagacaacctgctgcccaccaccaccccccaggaggcccagcagtggctgcacaggaaccgcttcagcaccttcaccaggctcttcaccaacttctctggagctgacctgctgaagctgaccagagatgatgtgatccagatctgtggccctgcagatggcatccgcctcttcaatgccctgaagggccgcatggtgcggccccggctgaccatctacgtgtgccaggagagcctgcagctgcgggagcagcagcagcagcagcagcagcagcagcagaagcatgaagatggagacagcaatggcaccttctttgtgtaccacgccatctacctggaggagctgacagctgtggagctgacagagaagatcgcccagctgttcagcatcagcccctgccagatcagccagatctacaagcagggccccaccggcatccacgtgctgatcagtgatgagatgatccagaacttccaggaggaggcctgcttcatcctggacaccatgaaggccgagaccaatgacagctaccacatcatcctgaagtag

SEQ ID NO: 173620 - DNA, 1356 bp, synthetic construct
  misc_feature 1..1356: note = Description of Artificial Sequence: Synthetic coding sequence
  source 1..1356: mol_type = other DNA
atggcctgggccctgaagctgcccctggctgatgaagtcatcgagagcggcctggtgcaggactttgatgccagcctgtctggaattggccaggagctgggcgctggggcctacagcatgtctgatgtgctggccctgcccatcttcaagcaggaggagagcagcctgcccccagacaatgaaaacaagatcctgcccttccagtatgtgctgtgtgccgccaccagccctgctgtgaagctgcatgatgagaccctgacctacctgaaccagggccagagctatgagatccgcatgctggacaacaggaagctgggggagctgcctgagatcaacgggaagctggtgaagagcatcttccgggtggtgttccatgaccggcggctgcagtacacagagcaccagcagctggagggctggcgctggaacagacctggggaccgcatcctggacatcgacatccccatgtctgtgggcatcatcgacccccgggccaaccccacccagctgaacacagtggagttcctgtgggaccctgccaagaggaccagcgtcttcatccagcccaagggagctgacaggaagcagaagacagaccgggagaagatggagaagaggacccctcatgagaaggagaagtaccagcccagctatgagaccaccatcctgacagaatgtagcccctggccagagatcacctacgtgaacaacagccccagccctggcttcaacagcagccacagcagcttcagcctgggggagggcaatggcagccccaaccaccagcctgagcccccacctcctgtgacagacaacctgctgcccaccaccaccccccaggaggcccagcagtggctgcacaggaaccgcttcagcaccttcaccaggctcttcaccaacttcagcggggctgacctgctgaagctgaccagagatgatgtgatccagatctgtggccctgcagatggcatccgcctcttcaatgccctgaagggccgcatggtgcggccccggctgaccatctacgtgtgccaggagagcctgcagctgcgggagcagcagcagcagcagcagcagcagcagcagaagcatgaagatggagacagcaatggcaccttctttgtgtaccacgccatctacctggaggagctgacagctgtggagctgacagagaagatcgcccagctgttcagcatcagcccctgccagatcagccagatctacaagcagggccccaccggcatccacgtgctgatcagtgatgagatgatccagaacttccaggaggaggcctgcttcatcctggacaccatgaaggccgagaccaatgacagctaccacatcatcctgaagtag

SEQ ID NO: 173621 - DNA, 1353 bp, synthetic construct
  misc_feature 1..1353: note = Description of Artificial Sequence: Synthetic coding sequence
  source 1..1353: mol_type = other DNA
atggcctgggccctgaagctgcccctggctgatgaagtcatcgagagcggcctggtgcaggactttgatgccagcctgtctggaattggccaggagctgggcgctggggcctacagcatgtctgatgtgctggccctgcccatcttcaagcaggaggagagcagcctgcccccagacaatgaaaacaagatcctgcccttccagtatgtgctgtgtgccgccaccagccctgctgtgaagctgcatgatgagaccctgacctacctgaaccagggccagagctatgagatccgcatgctggacaacaggaagctgggggagctgcctgagatcaacgggaagctggtgaagagcatcttccgggtggtgttccatgaccggcggctgcagtacacagagcaccagcagctggagggctggcgctggaacagacctggggaccgcatcctggacatcgacatccccatgtctgtgggcatcatcgacccccgggccaaccccacccagctgaacacagtggagttcctgtgggaccctgccaagaggaccagcgtcttcatccagcccaagggagctgacaggaagcagaagacagaccgggagaagatggagaagaggacccctcatgagaaggagaagtaccagcccagctatgagaccaccatcctgacagaatgtagcccctggccagagatcacctacgtgaacaacagccccagccctggcttcaacagcagccacagcagcttcagcctgggggagggcaatggcagccccaaccaccagcctgagcccccacctcctgtgacagacaacctgctgcccaccaccaccccccaggaggcccagcagtggctgcacaggaaccgcttcagcaccttcaccaggctcttcaccaacttcagcggggctgacctgctgaagctgaccagagatgatgtgatccagatctgtggccctgcagatggcatccgcctcttcaatgccctgaagggccgcatggtgcggccccggctgaccatctacgtgtgccaggagagcctgcagctgcgggagcagcagcagcagcagcagcagcagcagcagaagcatgaagatggagacagcaatggcaccttctttgtgtaccacgccatctacctggaggagctgacagctgtggagctgacagagaagatcgcccagctgttcagcatcagcccctgccagatcagccagatctacaagcagggccccaccggcatccacgtgctgatcagtgatgagatgatccagaacttccaggaggaggcctgcttcatcctggacaccatgaaggagaccaatgacagctaccacatcatcctgaagtag

SEQ ID NO: 173622 - DNA, 1440 bp, synthetic construct
  misc_feature 1..1440: note = Description of Artificial Sequence: Synthetic coding sequence
  source 1..1440: mol_type = other DNA
atgctgttctggcacacccagcctgagcactacaaccagcacaacagcggcagctacctgagagatgtgctggccctgcccatcttcaagcaggaggagccccagctgagcccagaaaatgaggcccggctgccccccctgcagtatgtgctgtgtgccgccaccagccctgctgtgaagctgcacgaggagaccctgacctacctgaaccagggccagagctatgagatccggctgctggagaacaggaagctgggggacttccaggacctgaacaccaagtatgtgaagagcatcatccgggtggtgttccatgaccggcggctgcagtacacagagcaccagcagctggagggctggcgctggagcaggcctggggaccgcatcctggacatcgacatccccctgtctgtgggcatcctggacccccgggccagccccacccagctgaatgctgtggagttcctgtgggaccctgccaagagggccagcgccttcatccaggtgcactgcatcagcacagagttcacccccaggaagcatggaggagagaagggcgtgcccttccgggtgcagattgacaccttcaagcagaatgaaaatggagagtacacagagcacctgcacagcgccagctgccagatcaaggtgttcaagcccaagggagctgacaggaagcagaagacagaccgggagaagatggagaagaggacagcccaggagaaggagaagtaccagcccagctatgagaccaccatcctgacagagtgcagcccctggccagatgtggcctaccaggtgaacagcgcccccagccccagctacaacggcagccccaacagctttggcctgggggagggcaatgccagccccacccaccctgtggaggccctgcctgtgggcagtgaccacctgctgcccagcgccagcatccaggatgcccagcagtggctgcacaggaaccgcttcagccagttctgccgcctgtttgccagcttcagcggggctgacctgctgaagatgagcagagatgacctggtgcagatctgtggccctgcagatggcatccgcctcttcaatgccatcaagggcagaaatgtgcggcccaagatgaccatctacgtgtgccaggagctggagcagaacagagtgcccctgcagcagaagagagatggcagcggggacagcaacctgtctgtgtaccacgccatcttcctggaggagctgaccaccctggagctgattgagaagatcgccaacctgtacagcatcagcccccagcacatccaccgggtgtaccggcagggccccaccggcatccacgtggtggtgtccaatgagatggtgcagaacttccaggatgagagctgctttgtgctgagcaccatcaaggccgagagcaatgatggctaccacatcatcctgaagtgtggcctgtag

SEQ ID NO: 173623 - DNA, 99 bp, synthetic construct
  misc_feature 1..99: note = Description of Artificial Sequence: Synthetic coding sequence
  source 1..99: mol_type = other DNA
atggtgcagaacttccaggatgagagctgctttgtgctgagcaccatcaaggccgagagcaatgatggctaccacatcatcctgaagtgtggcctgtag

SEQ ID NO: 173624 - DNA, 1218 bp, synthetic construct
  misc_feature 1..1218: note = Description of Artificial Sequence: Synthetic coding sequence
  source 1..1218: mol_type = other DNA
atggccaagtatgtgtccctgacagaggccaatgaggagctgaaggtgctgatggatgagaaccagaccagcaggcctgtggccgtgcacaccagcacagtgaaccccctgggcaagcagctgctgcccaagaccttcggccagagctctgtgaacatcgaccagcaggtggtgattggcatgccccagaggcctgctgccagcaacatccctgtggtgggcagccccaacccccccagcacccactttgccagccagaaccagcacagctacagcagccccccctgggccggccagcacaacagaaaaggagagaagaatggcatgggcctgtgccgcctgtccatgaaggtgtgggagaccgtgcagaggaagggcaccaccagctgccaggaggtggtgggggagctggtggccaagttccgggccgccagcaaccacgccagccccaatgaaagtgcctatgatgtgaagaacatcaagaggaggacctatgatgccctgaatgtgctgatggccatgaacatcatcagccgggagaagaagaagatcaagtggattggcctgaccaccaacagcgcccagaactgccagaacctgcgggtggagcggcagaagaggctggagcgcatcaagcagaagcagagcgagctgcagcagctgatcctgcagcagatcgccttcaagaacctggtgctgaggaaccagtatgtggaggagcaggtgtcccagaggcccctgcccaacagcgtcatccacgtgcccttcatcatcatcagcagcagcaagaagacagtcatcaactgcagcatcagtgatgacaagtctgagtacctgttcaagttcaacagcagctttgagatccatgatgacacagaggtgctgatgtggatgggcatgaccttcggcctggagagcggcagctgcagcgctgaggacctgaagatggccaggaacctggtgcccaaggccctggagccctacgtgacagagatggcccagggcacctttggaggagtcttcaccacagctggcagccgcagcaatggcacctggctgagcgccagtgacctgaccaacatcgccatcggcatgctggccaccagcagcggcggcagccagtacagcggcagccgggtggagaccccagctgtggaggaggaggaggaggaggacaacaatgatgatgacctgtctgaaaatgatgaagatgactag

SEQ ID NO: 173625 - DNA, 2649 bp, synthetic construct
  misc_feature 1..2649: note = Description of Artificial Sequence: Synthetic coding sequence
  source 1..2649: mol_type = other DNA
atggagggggagagcagcagatttgagatccacacccctgtgtctgacaagaagaagaagaagtgcagcatccacaaggagcggccccagaagcacagccatgagatcttccgggacagcagcctggtgaatgagcagagccagatcaccaggaggaagaagaggaagaaggacttccagcacctgatcagcagccccctgaagaagagccgcatctgtgatgaaacagccaatgccaccagcaccctgaagaagaggaagaagaggcgctacagcgccctggaggtggatgaggaggccggcgtgacagtggtgctggtggacaaggagaacatcaacaacacccccaagcacttcaggaaggatgtggatgtggtgtgtgtggacatgagcattgagcagaagctgcccaggaagcccaagacagacaagttccaggtgctggccaagagccacgcccacaagtctgaggccctgcacagcaaggtgcgggagaagaagaacaagaagcaccagaggaaggccgcctcctgggagagccagagggcccgggacaccctgccccagagcgagagccaccaggaggagagctggctgtctgtgggccctggaggagagatcacagagctgcctgccagcgcccacaagaacaagagcaagaagaagaagaagaagagcagcaaccgggagtatgagaccctggccatgcctgagggcagccaggccggccgggaggccggcacagacatgcaggagagccagcccaccgtgggcctggatgatgagaccccccagctgctgggccccacccacaagaagaagagcaagaagaagaagaagaagaagagcaaccaccaggagtttgaggccctggccatgcctgagggcagccaggtgggcagcgaggtgggcgctgacatgcaggagagcaggcctgctgtgggcctgcatggagaaacagctggcatcccagccccagcctacaagaacaagagcaagaagaagaagaagaagagcaaccaccaggagtttgaggccgtggccatgcctgagagcctggagagcgcctacccagagggcagccaggtgggcagcgaggtgggcaccgtggagggcagcacagccctgaagggcttcaaggagagcaacagcaccaagaagaagagcaagaagaggaagctgacctctgtgaagagggcccgggtgtctggagatgacttctctgtgcccagcaagaacagcgagagcaccctgtttgattctgtggagggagatggagccatgatggaggagggcgtgaagagccggccccggcagaagaagacccaggcctgcctggccagcaagcacgtgcaggaggccccccggctggagcccgccaatgaggagcacaacgtggagacagctgaggacagcgagatccgctacctgtctgctgacagcggagatgctgatgacagtgatgctgacctgggcagcgctgtgaagcagctgcaggagttcatccccaacatcaaggaccgggccaccagcaccatcaagaggatgtacagagatgacctggagcgcttcaaggagttcaaggcccagggcgtggccatcaagtttgggaagttctctgtgaaggagaacaagcagctggagaagaatgtggaggacttcctggccctgaccggcatcgagagcgctgacaagctgctgtacacagaccgctacccagaggagaagagcgtcatcaccaacctgaagaggcgctacagcttccggctgcacatcggcaggaacatcgcccggccctggaagctgatctactaccgggccaagaagatgtttgatgtgaacaactacaagggccgctacagcgagggggacacagagaagctgaagatgtaccacagcctgctgggcaatgactggaagaccatcggggagatggtggcccggagcagcctgtctgtggccctgaagttcagccagatcagcagccagaggaacagaggagcctggagcaagtctgagaccaggaagctgatcaaggctgtggaggaggtgatcctgaagaagatgagcccccaggagctgaaggaggtggacagcaagctgcaggagaaccctgagagctgcctgagcatcgtgcgggagaagctgtacaagggcatctcctgggtggaggtggaggccaaggtgcagaccaggaactggatgcagtgcaagagcaagtggacagagatcctgaccaagaggatgaccaatggaagacgcatctactacggcatgaatgccctgcgggccaaggtgtccctgattgagcggctgtatgagatcaacgtggaggacaccaatgaaattgactgggaggacctggccagcgccatcggagatgtgccccccagctatgtgcagaccaagttcagccggctgaaggctgtgtatgtgcccttctggcagaagaagaccttccctgagatcatcgactacctgtatgagaccaccctgcccctgctgaaggagaagctggagaagatgatggagaagaagggcaccaagatccagaccccagctgcccccaagcaggtgttccccttccgggacatcttctactatgaagatgacagcgagggcggccacaggaagaggaagagaagatag

SEQ ID NO: 173626 - DNA, 2718 bp, synthetic construct
  misc_feature 1..2718: note = Description of Artificial Sequence: Synthetic coding sequence
  source 1..2718: mol_type = other DNA
atggagggggagagcagcagatttgagatccacacccctgtgtctgacaagaagaagaagaagtgcagcatccacaaggagcggccccagaagcacagccatgagatcttccgggacagcagcctggtgaatgagcagagccagatcaccaggaggaagaagaggaagaaggacttccagcacctgatcagcagccccctgaagaagagccgcatctgtgatgaaacagccaatgccaccagcaccctgaagaagaggaagaagaggcgctacagcgccctggaggtggatgaggaggccggcgtgacagtggtgctggtggacaaggagaacatcaacaacacccccaagcacttcaggaaggatgtggatgtggtgtgtgtggacatgagcattgagcagaagctgcccaggaagcccaagacagacaagttccaggtgctggccaagagccacgcccacaagtctgaggccctgcacagcaaggtgcgggagaagaagaacaagaagcaccagaggaaggccgcctcctgggagagccagagggcccgggacaccctgccccagagcgagagccaccaggaggagagctggctgtctgtgggccctggaggagagatcacagagctgcctgccagcgcccacaagaacaagagcaagaagaagaagaagaagagcagcaaccgggagtatgagaccctggccatgcctgagggcagccaggccggccgggaggccggcacagacatgcaggagagccagcccaccgtgggcctggatgatgagaccccccagctgctgggccccacccacaagaagaagagcaagaagaagaagaagaagaagagcaaccaccaggagtttgaggccctggccatgcctgagggcagccaggtgggcagcgaggtgggcgctgacatgcaggagagcaggcctgctgtgggcctgcatggagaaacagctggcatcccagccccagcctacaagaacaagagcaagaagaagaagaagaagagcaaccaccaggagtttgaggccgtggccatgcctgagagcctggagagcgcctacccagagggcagccaggtgggcagcgaggtgggcaccgtggagggcagcacagccctgaagggcttcaaggagagcaacagcaccaagaagaagagcaagaagaggaagctgacctctgtgaagagggcccgggtgtctggagatgacttctctgtgcccagcaagaacagcgagagcaccctgtttgattctgtggagggagatggagccatgatggaggagggcgtgaagagccggccccggcagaagaagacccaggcctgcctggccagcaagcacgtgcaggaggccccccggctggagcccgccaatgaggagcacaacgtggagacagctgaggacagcgagatccgctacctgtctgctgacagcggagatgctgatgacagtgatgctgacctgggcagcgctgtgaagcagctgcaggagttcatccccaacatcaaggaccgggccaccagcaccatcaagaggatgtacagagatgacctggagcgcttcaaggagttcaaggcccagggcgtggccatcaagtttgggaagttctctgtgaaggagaacaagcagctggagaagaatgtggaggacttcctggccctgaccggcatcgagagcgctgacaagctgctgtacacagaccgctacccagaggagaagagcgtcatcaccaacctgaagaggcgctacagcttccggctgcacatcggcaggaacatcgcccggccctggaagctgatctactaccgggccaagaagatgtttgatgtgaacaactacaagggccgctacagcgagggggacacagagaagctgaagatgtaccacagcctgctgggcaatgactggaagaccatcggggagatggtggcccggagcagcctgtctgtggccctgaagttcagccagatcagcagccagaggaacagaggagcctggagcaagtctgagaccaggaagctgatcaaggctgtggaggaggtgatcctgaagaagatgagcccccaggagctgaaggaggtggacagcaagctgcaggagaaccctgagagctgcctgagcatcgtgcgggagaagctgtacaagggcatctcctgggtggaggtggaggccaaggtgcagaccaggaactggatgcagtgcaagagcaagtggacagagatcctgaccaagaggatgaccaatggaagacgcatctactacggcatgaatgccctgcgggccaaggtgtccctgattgagcggctgtatgagatcaacgtggaggacaccaatgaaattgactgggaggacctggccagcgccatcggagatgtgccccccagctatgtgcagaccaagttcagccggctgaaggctgtgtatgtgcccttctggcagaagaagaccttccctgagatcatcgactacctgtatgagaccaccctgcccctgctgaaggagaagctggagaagatgatggagaagaagggcaccaagatccagaccccagctgcccccaagcaggtgttccccttccgggacatcttctactatgaagatgacagtgaaggagaagatattgagaaggagagcgagggccaggccccctgcatggcccacgcctgcaacagcagcaccctgggcggccagggccgctggatcatctag

SEQ ID NO: 173627 - DNA, 3489 bp, synthetic construct
  misc_feature 1..3489: note = Description of Artificial Sequence: Synthetic coding sequence
  source 1..3489: mol_type = other DNA
atggaggaggtgcgctgcccagagcacggcaccttctgcttcctgaagacaggagtgagagatggccccaacaagggcaagagcttctacgtgtgcagagctgacacctgcagctttgtgcgggccacagacatccctgtgagccactgcctgctgcacgaggactttgtggtggagctgcagggcctgctgctgccccaggacaagaaggagtaccgcctcttcttccgctgcatccgcagcaaggccgagggcaagcgctggtgtggcagcatcccctggcaggaccctgacagcaaggagcacagcgtgagcaacaagagccagcacgccagcgagaccttccaccacagcagcaactggctgaggaaccccttcaaggtgctggacaagaaccaggagcccgccctgtggaagcagctgatcaagggggagggggaggagaagaaggctgacaagaagcagcgggagaagggggaccagctgtttgaccagaagaaggagcagaagccagagatgatggagaaggacctgagcagcggcctggtgcccaagaagaagcagagcgtggtgcaggagaagaagcaggaggagggcgctgagatccagtgtgaggccgagaccggcggcacccacaagagggacttcagcgagatcaagagccagcagtgccagggcaatgagctgacccggcccagcgccagcagccaggagaagagcagcggcaagagccaggatgtgcagcgggagagcgagcccctgcgggagaaggtgacccagctgctgccccagaatgtgcacagccacaacagcatcagcaagccccagaagggcggccccctgaacaaggagtacaccaactgggaggccaaggagaccaaggccaaggatggccccagcatccaggccacccagaagagcctgccccagggccacttccaggagaggcctgagacccacagcgtgcctgcccctgggggccctgctgcccaggccgccccagctgcccctggcctgagcctgggggagggccgggaggccgccaccagcagtgatgatgaggaggaggatgatgtggtgtttgtgagcagcaagccaggcagccccctgctgtttgacagcaccctggacctggagaccaaggagaacctgcagttcccagacagatctgtgcagaggaaggtgtccccagccagcggcgtgtccaagaaggtggagcccagcgaccctgtggccaggagagtgtacctgaccacccagctgaagcagaagaagagcaccctggcctctgtgaacatccaggccctgcctgacaagggccagaagctgatcaagcagatccaggagctggaggaggtgctgagcggcctgaccctgagccctgagcagggcaccaatgagaagagcaacagccaggtgccccagcagagccacttcaccaagaccaccaccggccccccccacctggtgcccccccagcccctgccccggcggggcacccagcctgtgggcagcctggagctgaagagcgcctgccaggtgacagctgggggcagcagccagtgctaccggggccacaccaaccaggaccacgtgcatgctgtgtggaagatcaccagcgaggccatcggccagctgcacaggagcctggagagctgccctggagaaacagtggtggctgaagatcctgctggcctgaaggtgcccctgctgctgcaccagaagcaggccctggcctggctgctgtggagggagagccagaagccccagggcggcatcctggctgatgacatgggcctgggcaagaccctgaccatgattgccctgatcctgacccagaagaaccaggagaagaaggaggagaaggagaagagcacagccctgacctggctgagcaaggatgacagctgtgacttcaccagccacggcaccctcatcatctgcccagccagcctcatccaccactggaagaatgaggtggagaagagggtgaacagcaacaagctgcgggtgtacctgtaccacggccccaacagagacagccgggcccgggtgctgagcacctatgacatcgtcatcaccacctacagcctggtggccaaggagatccccaccaacaagcaggaggccgagatccctggggccaacctgaatgtggagggcaccagcacccccctgctgagaattgcctgggcccgcatcatcctggatgaggcccacaacgtgaagaacccccgggtgcagaccagcattgctgtgtgcaagctgcaggcctgtgcccgctgggccgtgacaggcacccccatccagaacaacctgctggacatgtacagcctgctgaagttcctgcgctgcagcccctttgatgagttcaacctgtggaggagccaggtggacaatggcagcaagaagggcggggagcggctgagcatcctgaccaagagcctgctgctgcggaggaccaaggaccagctggacagcacaggccggcccctggtgatcctgccccagaggaagttccagctgcaccacctgaagctgtctgaagatgaggagaccgtgtacaacgtgttctttgcccggagccgcagcgccctgcagagctacctgaagagacatgagagccggggcaaccagagcggccgcagccccaacaaccccttcagccgggtggccctggagtttggaagtgaggagcccaggcacagcgaggccgctgacagccccaggagcagcacagtgcacatcctgagccagctgctgcggctgcggcagtgctgctgccacctgagcctgctgaagagcgccctggaccccatggagctgaagggggagggcctggtgctgagcctggaggagcagctgagcgccctgaccctgtctgagctgcgggacagcgagcccagcagcacagtgtccctgaatggcaccttcttcaagatggagctgtttgagggcatgagggagagcaccaagatcagcagcctgctggccgagctggaggccatccagagaaattctgccagccagaagagcgtcatcgtgtcccagtggaccaacatgctgaaggtggtggccctgcacctgaagaagcacggcctgacctacgccaccattgatggctctgtgaaccccaagcagaggatggacctggtggaggccttcaaccacagccggggcccccaggtgatgctgatcagcctgctggccggcggcgtgggcctgaacctgaccggcggcaaccacctgttcctgctggacatgcactggaaccccagcctggaggaccaggcctgtgaccgcatctacagagtgggccagcagaaggatgtggtgatccacagatttgtgtgtgagggcaccgtggaggagaagatcctgcagctgcaggagaagaagaaggacctggccaagcaggtgctgagcggcagcggggagagcgtgaccaagctgaccctggccgacctgcgggtgctgtttggcatctag

SEQ ID NO: 173628 - DNA, 432 bp, synthetic construct
  misc_feature 1..432: note = Description of Artificial Sequence: Synthetic coding sequence
  source 1..432: mol_type = other DNA
aacatgctgaaggtggtggccctgcacctgaagaagcacggcctgacctacgccaccattgatggctctgtgaaccccaagcagaggatggacctggtggaggccttcaaccacagccggggcccccaggtgatgctgatcagcctgctggccggcggcgtgggcctgaacctgactggaggcaaccacctgttcctgctggacatgcactggaaccccagcctggaggaccaggcctgtgaccgcatctacagagtgggccagcagaaggatgtggtgatccacagatttgtgtgtgagggcaccgtggaggagaagatcctgcagctgcaggagaagaagaaggacctggccaagcaggtgctgagcggcagcggggagagcgtgaccaagctgaccctggccgacctgcgggtgctgtttggcatctag

SEQ ID NO: 173629 - DNA, 1263 bp, synthetic construct
  misc_feature 1..1263: note = Description of Artificial Sequence: Synthetic coding sequence
  source 1..1263: mol_type = other DNA
atggccgagctgggcaagaagtactgtgtgtactgcctggccgaggtgagccccctgcgcttccgctgcacagagtgccaggacatcgagctgtgcccagagtgcttctctgctggagctgagatcggccaccaccggcgctaccacggctaccagctggtggatggcggccgcttcaccctgtggggccctgaggccgagggcggctggaccagccgggaggagcagctgctgctggatgccatcgagcagtttggatttggaaactgggaggacatggccgcccacgtgggcgccagcaggaccccccaggaggtgatggagcactacgtgtccatgtacatccacggcaacctgggcaaggcctgcatcccagacaccatccccaacagagtgacagaccacacctgccccagcggcggccccctgagccccagcctgaccacccccctgccccccctggacatctctgtggccgagcagcagcagctgggctacatgcccctgagagatgattatgaaattgaatatgaccaggatgctgagaccctcatcagcggcctgtctgtgaactatgatgatgatgatgtggagattgagctgaagagggcccacgtggacatgtatgtgaggaagctgaaggagcggcagaggaggaagaacatcgcccgggactacaacctggtgcctgccttcctgggcaaggacaagaaggagaaggagaaggccctgaagaggaagatcaccaaggaggagaaggagctgcggctgaagctgcggcccctgtaccagttcatgagctgcaaggagtttgatgacctgtttgagaacatgcacaaggagaagatgctgcgggccaagatccgggagctgcagcgctacagaagaaatggcatcaccaagatggaggagagcgcagaatatgaggccgcccggcacaagcgggagaagaggaaggagaacaagaacctggccggcagcaagaggggcaaggaggatggcaaggacagcgagtttgctgccatcgagaacctgcccggctttgagctgctgagtgaccgggagaaggtgctgtgcagcagcctgaacctgagccctgcccgctacgtgacagtgaagaccatcatcatcaaggaccacctgcagaagaggcagggcatccccagcaagagccggctgcccagctacctggacaaggtgctgaagaagaggatcctgaacttcctgacagagagcggctggatcagcagagatgccagctag

SEQ ID NO: 173630 - DNA, 366 bp, synthetic construct
  misc_feature 1..366: note = Description of Artificial Sequence: Synthetic coding sequence
  source 1..366: mol_type = other DNA
atggccgcccacgtgggcgccagcaggaccccccaggaggtgatggagcactacgtgtccatgtacatccacggcaacctgggcaaggcctgcatcccagacaccatccccaacagagtgacagaccacacctgccccagcggcggccccctgagccccagcctgaccacccccctgccccccctggacatctctgtggccgagcagcagcagctgggctacatgcccctgagagatgattatgaaattgaatatgaccaggatgctgagaccctcatcagcggcctgtctgtgaactatgatgatgatgatgtggagattgagctgaagagggcccacgtggacatgtatgtgaggaagctgtag

SEQ ID NO: 173631 - DNA, 390 bp, synthetic construct
  misc_feature 1..390: note = Description of Artificial Sequence: Synthetic coding sequence
  source 1..390: mol_type = other DNA
atggccgcccacgtgggcgccagcaggaccccccaggaggtgatggagcactacgtgtccatgtacatccacggcaacctgggcaaggcctgcatcccagacaccatccccaacagagtgacagaccacacctgccccagcggcggccccctgagccccagcctgaccacccccctgccccccctggacatctctgtggccgagcagcagcagctgggctacatgcccctgagagatgattatgaaattgaatatgaccaggatgctgagaccctcatcagcggcctgtctgtgaactatgatgatgatgatgtggagattgagctgaagagggcccacgtggacatgtatgtgaggaagctgaaggagcggcagaggaggaagaactag

SEQ ID NO: 173632 - DNA, 1038 bp, synthetic construct
  misc_feature 1..1038: note = Description of Artificial Sequence: Synthetic coding sequence
  source 1..1038: mol_type = other DNA
atggccgagctgggcaagaagtactgtgtgtactgcctggccgaggaggacatggccgcccacgtgggcgccagcaggaccccccaggaggtgatggagcactacgtgtccatgtacatccacggcaacctgggcaaggcctgcatcccagacaccatccccaacagagtgacagaccacacctgccccagcggcggccccctgagccccagcctgaccacccccctgccccccctggacatctctgtggccgagcagcagcagctgggctacatgcccctgagagatgattatgaaattgaatatgaccaggatgctgagaccctcatcagcggcctgtctgtgaactatgatgatgatgatgtggagattgagctgaagagggcccacgtggacatgtatgtgaggaagctgaaggagcggcagaggaggaagaacatcgcccgggactacaacctggtgcctgccttcctgggcaaggacaagaaggagaaggagaaggccctgaagaggaagatcaccaaggaggagaaggagctgcggctgaagctgcggcccctgtaccagttcatgagctgcaaggagtttgatgacctgtttgagaacatgcacaaggagaagatgctgcgggccaagatccgggagctgcagcgctacagaagaaatggcatcaccaagatggaggagagcgcagaatatgaagctgcccggcacaagcgggagaagaggaaagaaaacaagaacctggccggcagcaagaggggcaaggaggatggcaaggacagcgagtttgctgccatcgagaacctgcccggctttgagctgctgagtgaccgggagaaggtgctgtgcagcagcctgaacctgagccctgcccgctacgtgacagtgaagaccatcatcatcaaggaccacctgcagaagaggcagggcatccccagcaagagccggctgcccagctacctggacaaggtgctgaagaagaggatcctgaacttcctgacagaaagtggctggatcagcagagatgccagctag

SEQ ID NO: 173633 - DNA, 987 bp, synthetic construct
  misc_feature 1..987: note = Description of Artificial Sequence: Synthetic coding sequence
  source 1..987: mol_type = other DNA
atggccgcccacgtgggcgccagcaggaccccccaggaggtgatggagcactacgtgtccatgtacatccacggcaacctgggcaaggcctgcatcccagacaccatccccaacagagtgacagaccacacctgccccagcggcggccccctgagccccagcctgaccacccccctgccccccctggacatctctgtggccgagcagcagcagctgggctacatgcccctgagagatgattatgaaattgaatatgaccaggatgctgagaccctcatcagcggcctgtctgtgaactatgatgatgatgatgtggagattgagctgaagagggcccacgtggacatgtatgtgaggaagctgaaggagcggcagaggaggaagaacatcgcccgggactacaacctggtgcctgccttcctgggcaaggacaagaaggagaaggagaaggccctgaagaggaagatcaccaaggaggagaaggagctgcggctgaagctgcggcccctgtaccagttcatgagctgcaaggagtttgatgacctgtttgagaacatgcacaaggagaagatgctgcgggccaagatccgggagctgcagcgctacagaagaaatggcatcaccaagatggaggagagcgcagaatatgaggccgcccggcacaagcgggagaagaggaaggagaacaagaacctggccggcagcaagaggggcaaggaggatggcaaggacagcgagtttgctgccatcgagaacctgcccggctttgagctgctgagtgaccgggagaaggtgctgtgcagcagcctgaacctgagccctgcccgctacgtgacagtgaagaccatcatcatcaaggaccacctgcagaagaggcagggcatccccagcaagagccggctgcccagctacctggacaaggtgctgaagaagaggatcctgaacttcctgacagagagcggctggatcagcagagatgccagctag

SEQ ID NO: 173634 - DNA, 1299 bp, synthetic construct
  misc_feature 1..1299: note = Description of Artificial Sequence: Synthetic coding sequence
  source 1..1299: mol_type = other DNA
atgtctgagctgaaggactgccccctgcagttccatgacttcaagtctgtggaccacctgaaggtgtgcccccgctacacagctgtgctggcccggagtgaagatgatggcatcggcatcgaggagctggacaccctgcagctggagctggagaccctgctgagcagcgccagccggcggctgcgggtgctggaggccgagacccagatcctgacagactggcaggacaagaagggggaccggcgcttcctgaagctgggccgggaccacgagctgggcgccccacccaagcacggcaagcccaagaagcagaagctggagggcaaggccggccacggccctggccctggccctggccggcccaagagcaagaacctgcagcccaagatccaggagtatgagttcacagatgaccccattgatgtgccccgcatccccaagaatgatgcccccaaccgcttctgggcctctgtggagccctactgtgccgacatcaccagcgaggaggtgaggaccctggaggagctgctgaagcccccagaagatgaggccgagcactacaagatcccccccctgggcaagcactacagccagcgctgggcccaggaggacctgctggaggagcagaaggatggagcccgggctgctgctgtggccgacaagaagaagggcctgatgggccccctgacagagctggacaccaaggatgtggatgccctgctgaagaagtctgaggcccagcacgagcagccagaagatggctgcccctttggagccctgacccagaggctgctgcaggccctggtggaggagaacatcatcagccccatggaggacagccccatcccagacatgtctgggaaggagagcggggctgatggagccagcaccagccccaggaaccagaacaagcccttctctgtgccccacaccaagagcctggagagccgcatcaaggaggagctgattgcccagggcctgctggagagtgaagatagacctgctgaggacagtgaagatgaggtgctggccgagctgaggaagaggcaggccgagctgaaggccctgagcgcccacaacagaaccaagaagcatgacctgctgcggctggccaaggaggaggtgtcccggcaggagctgcggcagagggtgaggatggctgacaatgaggtgatggatgccttcaggaagatcatggccgcccggcagaagaagaggacccccaccaagaaggagaaggaccaggcctggaagaccctgaaggagcgggagagcatcctgaagctgctggatggatag

SEQ ID NO: 173635 - DNA, 1110 bp, synthetic construct
  misc_feature 1..1110: note = Description of Artificial Sequence: Synthetic coding sequence
  source 1..1110: mol_type = other DNA
atgtctgagctgaaggactgccccctgcagttccatgacttcaagtctgtggaccacctgaaggtgtgcccccgctacacagctgtgctggcccggagtgaagatgatggcatcggcatcgaggagctggacaccctgcagctggagctggagaccctgctgagcagcgccagccggcggctgcgggtgctggaggccgagacccagatcctgacagactggcaggacaagaagggggaccggcgcttcctgaagctgggccgggaccacgagctgggcgccccacccaagcacggcaagcccaagaagcagaagctggagggcaaggccggccacggccctggccctggccctggccggcccaagagcaagaacctgcagcccaagatccaggagtatgagttcacagatgaccccattgatgtgccccgcatccccaagaatgatgcccccaaccgcttctgggcctctgtggagccctactgtgccgacatcaccagcgaggaggtgaggaccctggaggagctgctgaagcccccagaagatgaggccgagcactacaagatcccccccctgggcaagcactacagccagcgctgggcccaggaggacctgctggaggagcagaaggatggagcccgggctgctgctgtggccgacaagaagaagggcctgatgggccccctgacagagctggacaccaaggatgtggatgccctgctgaagaagtctgaggcccagcacgagcagccagaagatggctgcccctttggagccctgacccagaggctgctgcaggccctggtggaggagaacatcatcagccccatggaggacagccccatcccagacatgtctgggaaggagagcggggctgatggagccagcaccagccccaggaaccagaacaagcccttctctgtgccccacaccaagagcctggagagccgcatcaaggaggagctgattgcccagggcctgctggagagtgaagatagacctgctgaggacagtgaagatgaggtgctggccgagctgaggaagaggcaggccgagctgaaggccctgagcgcccacaacagaaccaagaagcatgacctgctgaggtag

SEQ ID NO: 173636 - DNA, 288 bp, synthetic construct
  misc_feature 1..288: note = Description of Artificial Sequence: Synthetic coding sequence
  source 1..288: mol_type = other DNA
atgtctgagctgaaggactgccccctgcagttccatgacttcaagtctgtggaccacctgaaggtgtgcccccgctacacagctgtgctggcccggagtgaagatgatggcatcggcatcgaggagctggacaccctgcagctggagctggagaccctgctgagcagcgccagccggcggctgcgggtgctggaggccgagacccagatcctgacagactggcaggacaagaagggggaccggcgcttcctgaagctgggccgggaccacgagctgggcgccccctag

SEQ ID NO: 173637 - DNA, 1299 bp, synthetic construct; identical to SEQ ID NO: 173634
  misc_feature 1..1299: note = Description of Artificial Sequence: Synthetic coding sequence
  source 1..1299: mol_type = other DNA

SEQ ID NO: 173638 - DNA, 1038 bp, synthetic construct
  misc_feature 1..1038: note = Description of Artificial Sequence: Synthetic coding sequence
  source 1..1038: mol_type = other DNA
atgcagctggagatccaggtggccctgaacttcatcatctcctacctgtacaacaagctgcccaggagaagagtgaacatctttggagaggagctggagcggctgctgaagaagaagtatgagggccactggtacccagagaagccctacaagggcagcggcttccgctgcatccacatcggggagaaggtggaccccgtcatcgagcaggccagcaaggagagcggcctggacattgatgatgtgcggggcaacctgccccaggacctgtctgtgtggattgacccctttgaggtgtcctaccagattggagagaagggccctgtgaaggtgctgtatgtggatgacaacaatgaaaatggctgtgagctggacaaggagatcaagaacagcttcaaccctgaggcccaggtgttcatgcccatcagtgaccctgccagctctgtgagcagcagccccagccccccatttggccacagcgctgctgtgagccccaccttcatgcccaggagcacccagcccctgaccttcaccacagccacctttgctgccaccaagtttggcagcaccaagatgaagaacagcggccgcagcaacaaggtggcccggaccagccccatcaacctgggcctgaatgtgaatgacctgctgaagcagaaggccatcagcagctccatgcacagcctgtatggcctgggcctgggcagccagcagcagccccagcagcagcagcagcctgcccagcccccacctcctcctcctccaccccagcagcagcagcagcagaagaccagcgccctgagccccaatgccaaggagttcatcttccccaacatgcagggccagggcagcagcaccaacggcatgtttcctggggacagccccctgaacctgagccccctgcagtacagcaatgcctttgatgtgtttgctgcctatggaggcctgaatgagaagagctttgtggatggcctgaacttcagcctgaacaacatgcagtacagcaaccagcagttccagcctgtgatggccaactag

SEQ ID NO: 173639 - DNA, 1038 bp, synthetic construct; identical to SEQ ID NO: 173638
  misc_feature 1..1038: note = Description of Artificial Sequence: Synthetic coding sequence
  source 1..1038: mol_type = other DNA

SEQ ID NO: 173640 - DNA, 1035 bp, synthetic construct
  misc_feature 1..1035: note = Description of Artificial Sequence: Synthetic coding sequence
  source 1..1035: mol_type = other DNA
atgcagctggagatcaaggtggccctgaacttcatcatctcctacctgtacaacaagctgcccaggagaagagctgacctgtttggagaggagctggagcggctgctgaagaagaagtatgagggccactggtacccagagaagcccctgaagggcagcggcttccgctgtgtgcacatcggggagatggtggaccctgtggtggagctggccgccaagaggagcggcctggccgtggaggatgtgcgggccaacgtgcctgaggagctgtctgtgtggattgacccctttgaggtgtcctaccagattggagagaagggagctgtgaaggtgctgtacctggatgattctgagggctgtggggcccctgagctggacaaggagatcaagagcagcttcaacccagatgcccaggtgtttgtgcccatcggcagccaggacagcagcctgagcaacagccccagccccagctttggccagagccccagccccaccttcatccccaggtctgcccagcccatcaccttcaccacagccagctttgctgccaccaagtttggcagcaccaagatgaagaagggcggcggggccgccagcggcggcggcgtggccagcagcggggccggcggccagcagcccccccagcagcccaggatggcccggagccccaccaacagcctgctgaagcacaagagcctgagcctgtccatgcacagcctgaacttcatcacagccaacccagccccccagagccagctgagccccaatgccaaggagtttgtgtacaatggaggcggcagccccagcctcttctttgatgctgctgatggccagggcagcggcaccccaggcccctttggaggcagcggggccggcacctgcaacagcagcagctttgacatggcccaggtgtttggaggaggagccaacagcctcttcctggagaagaccccatttgtggagggcctgagctacaacctgaacaccatgcagtaccccagccagcagttccagcctgtggtgctggccaactag

SEQ ID NO: 173641 - DNA, 306 bp, synthetic construct
  misc_feature 1..306: note = Description of Artificial Sequence: Synthetic coding sequence
  source 1..306: mol_type = other DNA
atgcagctggagatcaaggtggccctgaacttcatcatctcctacctgtacaacaagctgcccaggagaagagctgacctgtttggagaggagctggagcggctgctgaagaagaagtatgagggccactggtacccagagaagcccctgaagggcagcggcttccgctgtgtgcacatcggggagatggtggaccctgtggtggagctggccgccaagaggagcggcctggccgtggaggatgtgcgggccaacgtgcctgaggagctgtctgtgtggattgacccctttgaggtgtcctactag

SEQ ID NO: 173642 - DNA, 1569 bp, synthetic construct
  misc_feature 1..1569: note = Description of Artificial Sequence: Synthetic coding sequence
  source 1..1569: mol_type = other DNA
atgagcatcaccagtgatgaggtgaacttcctggtgtaccgctacctgcaggagagcggcttcagccacagcgccttcaccttcggcatcgagagccacatcagccagagcaacatcaatggcaccctggtgcccccatctgccctgatcagcatcctgcagaagggcctgcagtatgtggaggccgagatcagcatcaacaaggatggcaccgtgtttgacagccggcccatcgagagcctgagcctcatcgtggccgtcatcccagatgtggtgcagatgaggcagcaggcctttggagagaagctgacccagcagcaggccagcgctgctgccacagaggccagcgccatggccaaggccgccaccatgaccccagctgccatcagccagcagaacccccccaagaaccgggaggccaccgtgaatggagaggagaatggagcccacgagatcaacaaccacagcaagcccatggagattgatggagatgtggagatcccccccaacaaggccaccgtgctgcggggccacgagagcgaggtgttcatctgtgcctggaaccctgtgtctgacctgctggccagcggcagcggggacagcacagcccgcatctggaacctgaatgaaaacagcaatggaggcagcacccagctggtgctgcggcactgcatccgggagggcggccatgatgtgcccagcaacaaggatgtgaccagcctggactggaacagtgatggcaccctgctggccatgggcagctatgatggctttgcccgcatctggacagaaaatggaaacctggccagcaccctgggccagcacaagggccccatctttgccctgaagtggaacaagaagggcaactacgtgctgtctgctggggtggacaagaccaccatcatctgggatgcccacactggagaggccaagcagcagttccccttccacagcgccccagccctggatgtggactggcagaacaacatgacctttgccagctgcagcacagacatgtgcatccacgtgtgccgcctgggctgtgaccaccctgtgaagaccttccagggccacaccaatgaggtgaatgccatcaagtgggaccccagcggcatgctgctggccagctgcagtgatgacatgaccctgaagatctggagcatgaagcaggatgcctgtgtgcatgacctgcaggcccacagcaaggagatctacaccatcaagtggagccccaccggccctgccaccagcaaccccaacagcagcatcatgctggccagcgccagctttgacagcacagtgcggctgtgggatgtggagcagggcgtgtgcacccacaccctgatgaagcaccaggagcctgtgtacagcgtggccttctccccagatggcaagtacctggccagcggcagctttgacaagtatgtgcacatctggaacacccagagcggcagcctggtgcacagctaccagggcactggaggcatctttgaggtgtgctggaatgcccggggggacaaggtgggcgccagcgccagtgatggctctgtgtgtgtgctggacctgtag

SEQ ID NO: 173643 - DNA, 1569 bp, synthetic construct; identical to SEQ ID NO: 173642
  misc_feature 1..1569: note = Description of Artificial Sequence: Synthetic coding sequence
  source 1..1569: mol_type = other DNA

SEQ ID NO: 173644 - DNA, 1569 bp, synthetic construct; identical to SEQ ID NO: 173642
  misc_feature 1..1569: note = Description of Artificial Sequence: Synthetic coding sequence
  source 1..1569: mol_type = other DNA

SEQ ID NO: 173645 - DNA, 1095 bp, synthetic construct
  misc_feature 1..1095: note = Description of Artificial Sequence: Synthetic coding sequence
  source 1..1095: mol_type = other DNA
atggagattgatggagatgtggagatcccccccaacaaggccaccgtgctgcggggccacgagagcgaggtgttcatctgtgcctggaaccctgtgtctgacctgctggccagcggcagcggggacagcacagcccgcatctggaacctgaatgaaaacagcaatggaggcagcacccagctggtgctgcggcactgcatccgggagggcggccatgatgtgcccagcaacaaggatgtgaccagcctggactggaacagtgatggcaccctgctggccatgggcagctatgatggctttgcccgcatctggacagaaaatggaaacctggccagcaccctgggccagcacaagggccccatctttgccctgaagtggaacaagaagggcaactacgtgctgtctgctggggtggacaagaccaccatcatctgggatgcccacactggagaggccaagcagcagttccccttccacagcgccccagccctggatgtggactggcagaacaacatgacctttgccagctgcagcacagacatgtgcatccacgtgtgccgcctgggctgtgaccaccctgtgaagaccttccagggccacaccaatgaggtgaatgccatcaagtgggaccccagcggcatgctgctggccagctgcagtgatgacatgaccctgaagatctggagcatgaagcaggatgcctgtgtgcatgacctgcaggcccacagcaaggagatctacaccatcaagtggagccccaccggccctgccaccagcaaccccaacagcagcatcatgctggccagcgccagctttgacagcacagtgcggctgtgggatgtggagcagggcgtgtgcacccacaccctgatgaagcaccaggagcctgtgtacagcgtggccttctccccagatggcaagtacctggccagcggcagctttgacaagtatgtgcacatctggaacacccagagcggcagcctggtgcacagctaccagggcactggaggcatctttgaggtgtgctggaatgcccggggggacaaggtgggcgccagcgccagtgatggctctgtgtgtgtgctggacctgtag

SEQ ID NO: 173646 - DNA, 1752 bp, synthetic construct
  misc_feature 1..1752: note = Description of Artificial Sequence: Synthetic coding sequence
  source 1..1752: mol_type = other DNA
atgcccctgaggaagatgaagatccccttcctgctgctcttcttcctgtgggaggccgagagccatgctgccagccggcccaacatcatcctggtgatggctgatgacctgggcattggagaccccggctgctacggcaacaagaccatccgcacccccaacatcgaccggctggccagcggcggcgtgaagctgacccagcacctggccgccagccccctgtgcacccccagccgggccgccttcatgacaggccgctaccctgtgcgcagcggcatggcctcctggagcaggactggagtcttcctgttcaccgccagcagcggcggcctgcccacagatgagatcacctttgccaagctgctgaaggaccagggctacagcacagccctgattggcaagtggcacctgggcatgagctgccacagcaagacagacttctgccaccaccccctgcaccacggcttcaactacttctacggcatcagcctgaccaacctgcgggactgcaagccaggagagggcagcgtcttcaccaccggcttcaagaggctggtgttcctgcccctgcagatcgtgggcgtgaccctgctgaccctggccgccctgaactgcctgggcctgctgcacgtgcccctgggcgtcttcttcagcctgctcttcctggccgccctgatcctgaccctcttcctgggcttcctgcactacttccggcccctgaactgcttcatgatgaggaactatgagatcatccagcagcccatgtcctatgacaacctgacccagaggctgactgtggaggccgcccagttcatccagaggaacacagagacccccttcctgctggtgctgagctacctgcacgtgcacacagccctcttcagcagcaaggactttgctgggaagagccagcacggcgtgtatggagatgctgtggaggagatggactggagcgtgggccagatcctgaacctgctggatgagctgcggctggccaatgacaccctcatctacttcaccagtgaccagggcgcccacgtggaggaggtgagcagcaaaggagagatccatggaggcagcaatggcatctacaagggcggcaaggccaacaactgggagggcggcatccgggtgcccggcatcctgcgctggcccagggtcatccaggccggccagaagattgatgagcccaccagcaacatggacatcttccccaccgtggccaagctggccggggcccccctgcctgaagatcgcatcattgatggccgggacctgatgcccctgctggagggcaagagccagaggagtgaccacgagttcctgttccactactgcaatgcctacctgaatgctgtgcgctggcacccccagaacagcaccagcatctggaaggccttcttcttcacccccaacttcaaccctgtgggcagcaatggctgctttgccacccacgtgtgcttctgcttcggcagctatgtgacccaccacgacccccccctgctgtttgacatcagcaaggacccccgggagaggaaccccctgaccccagccagcgagccccgcttctatgagatcctgaaggtgatgcaggaggccgctgacagacacacccagaccctgcctgaggtgcctgaccagttctcctggaacaacttcctgtggaagccctggctgcagctgtgctgccccagcacaggcctgagctgccagtgtgaccgggagaagcaggacaagaggctgagcaggtag

SEQ ID NO: 173647 - DNA, 1581 bp, synthetic construct
  misc_feature 1..1581: note = Description of Artificial Sequence: Synthetic coding sequence
  source 1..1581: mol_type = other DNA
atgagcatcaccagtgatgaggtgaacttcctggtgtaccgctacctgcaggagagcggcttcagccacagcgccttcaccttcggcatcgagagccacatcagccagagcaacatcaatggcaccctggtgcccccagctgccctgatcagcatcctgcagaagggcctgcagtatgtggaggccgagatcagcatcaatgaagatggcaccgtgtttgatggccggcccatcgagagcctgagcctgattgatgctgtgatgccagatgtggtgcagacccggcagcaggccttccgggagaagctggcccagcagcaggccagcgctgctgctgctgctgctgctgccacagctgctgccacagctgccaccaccaccagcgctggggtgagccaccagaaccccagcaagaaccgggaggccaccgtgaatggagaggagaacagagcccacagcgtgaacaaccacgccaagcccatggagattgatggagaggtggagatccccagcagcaaggccaccgtgctgcggggccacgagagcgaggtgttcatctgtgcctggaaccctgtgtctgacctgctggccagcggcagcggggacagcacagcccgcatctggaacctgaatgaaaacagcaatggaggcagcacccagctggtgctgcggcactgcatccgggagggcggccatgatgtgcccagcaacaaggatgtgaccagcctggactggaacaccaacggcaccctgctggccaccggcagctatgatggctttgcccgcatctggacagaagatggcaacctggccagcaccctgggccagcacaagggccccatctttgccctgaagtggaacagaaaaggaaactacatcctgtctgctggggtggacaagaccaccatcatctgggatgcccacactggagaggccaagcagcagttccccttccacagcgccccagccctggatgtggactggcagaacaacaccacctttgccagctgcagcacagacatgtgcatccacgtgtgccgcctgggctgtgacaggcctgtgaagaccttccagggccacaccaatgaggtgaatgccatcaagtgggaccccagcggcatgctgctggccagctgcagtgatgacatgaccctgaagatctggagcatgaagcaggaggtgtgcatccatgacctgcaggcccacaacaaggagatctacaccatcaagtggagccccaccggccctgccaccagcaaccccaacagcaacatcatgctggccagcgccagctttgacagcacagtgcggctgtgggacatcgagcggggcgtgtgcacccacaccctgaccaagcaccaggagcctgtgtacagcgtggccttctccccagatggcaagtacctggccagcggcagctttgacaagtgtgtgcacatctggaacacccagagcggcaacctggtgcacagctaccggggcactggaggcatctttgaggtgtgctggaatgcccggggggacaaggtgggcgccagcgccagtgatggctctgtgtgtgtgctggacctgaggaagtag

SEQ ID NO: 173648 - DNA, 1734 bp, synthetic construct; identical to SEQ ID NO: 165306
  misc_feature 1..1734: note = Description of Artificial Sequence: Synthetic coding sequence
  source 1..1734: mol_type = other DNA

SEQ ID NO: 173649 - DNA, 228 bp, synthetic construct
  misc_feature 1..228: note = Description of Artificial Sequence: Synthetic coding sequence
  source 1..228: mol_type = other DNA
atgagcatcaccagtgatgaggtgaacttcctggtgtaccgctacctgcaggagagcggcttcagccacagcgccttcaccttcggcatcgagagccacatcagccagagcaacatcaatggcaccctggtgcccccagctgccctgatcagcatcctgcagaagggcctgcagtatgtggaggccgagatcagcatcaatgaagatggcaccgtgtttgatggatag

SEQ ID NO: 173650 - DNA, 138 bp, synthetic construct
  misc_feature 1..138: note = Description of Artificial Sequence: Synthetic coding sequence
  source 1..138: mol_type = other DNA
atgagcatcaccagtgatgaggtgaacttcctggtgtaccgctacctgcaggagagcggcttcagccacagcgccttcaccttcggcatcgagagccacatcagccagagcaacatcaatggcaccctggtgccctag

SEQ ID NO: 173651 - DNA, 1581 bp, synthetic construct; identical to SEQ ID NO: 173647
  misc_feature 1..1581: note = Description of Artificial Sequence: Synthetic coding sequence
  source 1..1581: mol_type = other DNA

SEQ ID NO: 173652 - DNA, 180 bp, synthetic construct
  misc_feature 1..180: note = Description of Artificial Sequence: Synthetic coding sequence
  source 1..180: mol_type = other DNA
atgacagagctggccggggccagcagcagctgctgccacaggcctgctggccgcggggccatgcagagcgtgctgcaccacttccagaggctgcggggccgggagggcggcagccacttcatcaacaccagcagccccagaggagaggccaagatgagcatcaccagtgatgaggtgtag

SEQ ID NO: 173653 - DNA, 243 bp, synthetic construct
  misc_feature 1..243: note = Description of Artificial Sequence: Synthetic coding sequence
  source 1..243: mol_type = other DNA
atgacagagctggccggggccagcagcagctgctgccacaggcctgctggccgcggggccatgcagagcgtgctgcaccacttccagaggctgcggggccgggagggcggcagccacttcatcaacaccagcagccccagaggagaggccaagatgagcatcaccagtgatgaggtgaacttcctggtgtaccgctacctgcaggagagcggcttcagccacagcgccttcacctttggatag

SEQ ID NO: 173654 - DNA, 1581 bp, synthetic construct; identical to SEQ ID NO: 173647
  misc_feature 1..1581: note = Description of Artificial Sequence: Synthetic coding sequence
  source 1..1581: mol_type = other DNA

SEQ ID NO: 173655 - DNA, 1344 bp, synthetic construct
  misc_feature 1..1344: note = Description of Artificial Sequence: Synthetic coding sequence
  source 1..1344: mol_type = other DNA
atggagctgagccagatgtctgagctgatgggcctgtctgtgctgctgggcctgctggccctgatggccacagctgctgtggcccggggctggctgcgggccggggaggagaggagcggccggcctgcctgccagaaggccaacggcttccccccagacaagagcagcggcagcaagaagcagaagcagtaccagaggatcaggaaggagaagccccagcagcacaacttcacccaccggctgctggccgccgccctgaagagccacagcggcaacatcagctgcatggacttcagcagcaatggcaagtacctggccacctgtgctgatgacaggaccatccgcatctggagcaccaaggacttcctgcagcgggagcaccgctccatgagggccaacgtggagctggaccacgccaccctggtgcgcttctccccagactgccgggccttcatcgtgtggctggccaatggagacaccctgcgggtcttcaagatgaccaagcgggaggatggcggctacaccttcaccgccaccccagaggacttccccaagaagcacaaggcccctgtgattgacatcggcatcgccaacacaggcaagttcatcatgacagccagcagtgacaccaccgtgctgatctggagcctgaagggccaggtgctgagcaccatcaacaccaaccagatgaacaacacccatgctgctgtgagcccctgtggccgctttgtggccagctgtggcttcaccccagatgtgaaggtgtgggaggtgtgcttcggcaagaagggggagttccaggaggtggtgcgggcctttgagctgaagggccacagcgctgctgtgcacagctttgccttcagcaatgacagcaggaggatggcctctgtgtccaaggatggcacctggaagctgtgggacacagatgtggagtacaagaagaagcaggacccctacctgctgaagacaggccgctttgaggaggccgccggggccgccccctgccgcctggccctgagccccaatgcccaggtgctggccctggccagcggcagcagcatccacctgtacaacacccggcggggggagaaggaggagtgctttgagcgggtgcacggggagtgcatcgccaacctgagctttgacatcaccggccgcttcctggccagctgtggggacagagctgtgcggctcttccacaacaccccaggccaccgggccatggtggaggagatgcagggccacctgaagagggccagcaatgaaagcacccggcagaggctgcagcagcagctgacccaggcccaggagaccctgaagagcctgggcgccctgaagaagtag

SEQ ID NO: 173656 - DNA, 1341 bp, synthetic construct
  misc_feature 1..1341: note = Description of Artificial Sequence: Synthetic coding sequence
  source 1..1341: mol_type = other DNA
atggagctgagccagatgtctgagctgatgggcctgtctgtgctgctgggcctgctggccctgatggccacagctgctgtggcccggggctggctgcgggccggggaggagaggagcggccggcctgcctgccagaaggccaacggcttccccccagacaagagcagcggcagcaagaagcagaagcagtaccagaggatcaggaaggagaagccccagcagcacaacttcacccaccggctgctggccgccgccctgaagagccacagcggcaacatcagctgcatggacttcagcagcaatggcaagtacctggccacctgtgctgatgacaggaccatccgcatctggagcaccaaggacttcctgcagcgggagcaccgctccatgagggccaacgtggagctggaccacgccaccctggtgcgcttctccccagactgccgggccttcatcgtgtggctggccaatggagacaccctgcgggtcttcaagatgaccaagcgggaggatggcggctacaccttcaccgccaccccagaggacttccccaagaagcacaaggcccctgtgattgacatcggcatcgccaacacaggcaagttcatcatgacagccagcagtgacaccaccgtgctgatctggagcctgaagggccaggtgctgagcaccatcaacaccaaccagatgaacaacacccatgctgctgtgagcccctgtggccgctttgtggccagctgtggcttcaccccagatgtgaaggtgtgggaggtgtgcttcggcaagaagggggagttccaggaggtggtgcgggcctttgagctgaagggccacagcgctgctgtgcacagctttgccttcagcaatgacagcaggaggatggcctctgtgtccaaggatggcacctggaagctgtgggacacagatgtggagtacaagaagaagcaggacccctacctgctgaagacaggccgctttgaggaggccgccggggccgccccctgccgcctggccctgagccccaatgcccaggtgctggccctggccagcggcagcagcatccacctgtacaacacccggcggggggagaaggaggagtgctttgagcgggtgcacggggagtgcatcgccaacctgagctttgacatcaccggccgcttcctggccagctgtggggacagagctgtgcggctcttccacaacaccccaggccaccgggccatggtggaggagatgcagggccacctgaagagggccagcaatgaaagcacccggcagaggctgcagcagcagctgacccaggcccaggtgaccctgggcggccctggagcagaagattag

SEQ ID NO: 173657 - DNA, 2427 bp, synthetic construct
  misc_feature 1..2427: note = Description of Artificial Sequence: Synthetic coding sequence
  source 1..2427: mol_type = other DNA
atggccgagacagctgctggggtgggccgcttcaagaccaactatgctgtggagaggaagattgagcccttctacaagggcggcaaggcccagctggaccagacaggccagcacctgttctgtgtgtgtggcaccagggtgaacatcctggaggtggccagcggggctgtgctgcggagcctggagcaggaggaccaggaggacatcacagcctttgacctgagcccagacaatgaggtgctggtgacagccagccgggccctgctgctggcccagtgggcctggcaggagggctctgtgacccggctgtggaaggccatccacacagcccctgtggccaccatggcctttgaccccaccagcaccctgctggccaccggcggctgtgatggagctgtgcgggtgtgggacatcgtgcgccactacggcacccaccacttccggggcagccctggggtggtgcacctggtggccttccacccagaccccacccggctgctgctcttcagcagcgccacagatgctgccatccgggtgtggagcctgcaggacaggagctgcctggccgtgctgacagcccactacagcgctgtgaccagcctggccttcagcgcagatggccacaccatgctgagcagcggccgggacaagatctgcatcatctgggacctgcagagctgccaggccaccaggacagtgcctgtgtttgagagcgtggaggccgctgtgctgctgcctgaggagcctgtgtcccagctgggcgtgaagagccctggcctgtacttcctgacagctggggaccagggcaccctgcgggtgtgggaggccgccagcggccagtgtgtgtacacccaggcccagcccccaggccctggccaggagctgacccactgcaccctggcccacacagctggggtggtgctgacagccacagctgaccacaacctgctgctgtatgaggcccggagcctgcggctgcagaagcagtttgctggctacagcgaggaggtgctggatgtgcgcttcctgggccctgaggacagccacgtggtggtggccagcaacagcccctgcctgaaggtgtttgagctgcagaccagcgcctgccagatcctgcacggccacacagacatcgtgctggccctggatgtgttcaggaagggctggctgtttgccagctgtgccaaggaccagagcgtgcgcatctggaggatgaacaaggccggccaggtgatgtgtgtggcccagggcagcggccacacccacagcgtgggcaccgtgtgctgcagccggctgaaggagagcttcctggtgacaggcagccaggactgcaccgtgaagctgtggcccctgcccaaggccctgctgagcaagaacacagccccagacaatggccccatcctgctgcaggcccagaccacccagcgctgccacgacaaggacatcaacagcgtggccatcgccccaaatgacaagctgctggccaccggcagccaggacagaacagccaagctgtgggccctgccccagtgccagctgctgggcgtcttcagcggccacagaagaggcctgtggtgtgtgcagttcagccccatggaccaggtgctggccacagccagcgcagatggcaccatcaagctgtgggccctgcaggacttcagctgcctgaagacctttgagggccatgatgcctctgtgctgaaggtggcctttgtgtcccggggcacccagctgctgagcagcggcagtgatggcctggtgaagctgtggaccatcaagaacaatgaatgtgtgaggaccctggatgcccacgaggacaaggtgtggggcctgcactgcagccggctggatgaccacgccctgaccggggccagtgacagcagggtcatcctgtggaaggatgtgacagaggccgagcaggccgaggagcaggcccggcaggaggagcaggtggtgcggcagcaggagctggacaacctgctgcacgagaagcgctacctgcgggccctgggcctggccatcagcctggaccggccccacacagtgctgaccgtcatccaggccatccggcgggaccctgaggcctgtgagaagctggaggccaccatgctgcggctgcggcgggaccagaaggaggccctgctgcgcttctgtgtgacctggaacaccaacagccgccactgccacgaggcccaggccgtgctgggcgtgctgctgcggcgggaggcccctgaggagctgctggcctatgagggcgtgcgggccgccctggaggccctgctgccctacacagagcggcacttccagaggctgagcaggaccctgcaggccgccgccttcctggacttcctgtggcacaacatgaagctgcctgtgcctgctgctgcccccaccccctgggagacccacaagggggccctgccctag

SEQ ID NO: 173658 - DNA, 2427 bp, synthetic construct; identical to SEQ ID NO: 173657
  misc_feature 1..2427: note = Description of Artificial Sequence: Synthetic coding sequence
  source 1..2427: mol_type = other DNA

SEQ ID NO: 173659 - DNA, 729 bp, synthetic construct
  misc_feature 1..729: note = Description of Artificial Sequence: Synthetic coding sequence
  source 1..729: mol_type = other DNA
atgttcccccagagccgccaccccaccccccaccaggccgccggccagcccttcaagttcaccatccctgagagcctggaccgcatcaaggaggagttccagttcctgcaggcccagtaccacagcctgaagctggagtgtgagaagctggccagcgagaagacagagatgcagaggcactacgtgatgtactatgagatgtcctatggcctgaacatcgagatgcacaagcagacagaaattgccaagaggctgaacaccatctgtgcccaggtgatccccttcctgagccaggagcaccagcagcaggtggcccaggccgtggagcgggccaagcaggtgaccatggccgagctgaatgccatcattggagtgcggggcctgcccggcctgccccccacccagcagcagctgcaggcccagcacctgagccacggccacggcccccctgtgcccctgaccccccaccccagcggcctgcagcccccaggcatcccccccctgggcggcagcgctggcctgctggccctgagcagcgccctgagcggccagagccacctggccatcaaggatgacaagaagcaccatgatgctgagcaccacagaggagagaggcctgggaagagcaacagcctgctggtgcctgacagcctgcggggcacagacaagagaagaaatggacctgagttcagcaatgacatcaagaagaggaaggtggatgacaagtag

SEQ ID NO: 173660 - DNA, 435 bp, synthetic construct
  misc_feature 1..435: note = Description of Artificial Sequence: Synthetic coding sequence
  source 1..435: mol_type = other DNA
atgcagaggcactacgtgatgtactatgagatgtcctatggcctgaacatcgagatgcacaagcagacagaaattgccaagaggctgaacaccatctgtgcccaggtgatccccttcctgagccaggagcaccagcagcaggtggcccaggccgtggagcgggccaagcaggtgaccatggccgagctgaatgccatcatcggccagcagcagctgcaggcccagcacctgagccacggccacggcccccctgtgcccctgaccccccaccccagcggcctgcagcccccaggcatcccccccctgggcggcagcgctggcctgctggccctgagcagcgccctgagcggccagagccacctggccatcaaggatgacaagaagcaccatgatgctgagcaccacagaggagagaggcctgggaagccagactag

SEQ ID NO: 173661 - DNA, 384 bp, synthetic construct
  misc_feature 1..384: note = Description of Artificial Sequence: Synthetic coding sequence
  source 1..384: mol_type = other DNA
atgcccaccccaggcaccagcgccaccccaggcctgcggcccggcctgggcaagcccccagccatcgaccccctggtgaaccaggccgctgctggcctgcggacccccctggccgtgcccggcccctacccagcccccttcggcatggtgccccatgctggcatgaatggagagctgaccagccctggggccgcctatgccagcctgcacaacatgagcccccagatgtctgctgctgctgctgctgctgctgtggtggcctacggccgcagccccatggtgggctttgaccccccaccccacatgagggtgcccaccatcccccccaacctggccggcatccctgggggcaagcccagcctggtgcctgccccagcccactag

SEQ ID NO: 173662 - DNA, 384 bp, synthetic construct; identical to SEQ ID NO: 173661
  misc_feature 1..384: note = Description of Artificial Sequence: Synthetic coding sequence
  source 1..384: mol_type = other DNA

SEQ ID NO: 173663 - DNA, 2313 bp, synthetic construct
  misc_feature 1..2313: note = Description of Artificial Sequence: Synthetic coding sequence
  source 1..2313: mol_type = other DNA
atgttcccccagagccgccaccccaccccccaccaggccgccggccagcccttcaagttcaccatccctgagagcctggaccgcatcaaggaggagttccagttcctgcaggcccagtaccacagcctgaagctggagtgtgagaagctggccagcgagaagacagagatgcagaggcactacgtgatgtactatgagatgtcctatggcctgaacatcgagatgcacaagcagacagaaattgccaagaggctgaacaccatctgtgcccaggtgatccccttcctgagccaggagcaccagcagcaggtggcccaggccgtggagcgggccaagcaggtgaccatggccgagctgaatgccatcatcggccagcagcagctgcaggcccagcacctgagccacggccacggcccccctgtgcccctgaccccccaccccagcggcctgcagcccccaggcatcccccccctgggcggcagcgctggcctgctggccctgagcagcgccctgagcggccagagccacctggccatcaaggatgacaagaagcaccatgatgctgagcaccaccgggaccgggagcccggcaccagcaacagcctgctggtgcctgacagcctgcggggcacagacaagagaagaaatggacctgagttcagcaatgacatcaagaagaggaaggtggatgacaaggacagcagccactatgacagtgatggagacaagagtgatgacaacctggtggtggatgtgtccaatgaagaccccagcagcccccgggccagccctgcccacagcccccgggagaatggaattgacaagaaccggctgctgaagaaggatgccagcagcagccctgccagcacagccagcagcgccagcagcaccagcctgaagagcaaggagatgagcctgcacgagaaggccagcacccctgtgctgaagagcagcacccccacccccaggagtgacatgcccaccccaggcaccagcgccaccccaggcctgcggcccggcctgggcaagcccccagccatcgaccccctggtgaaccaggccgccgccggcctgcggacccccctggccgtgcccggcccctacccagcccccttcggcatggtgccccacgccggcatgaatggagagctgaccagccctggagctgcctatgccagcctgcacaacatgagcccccagatgtctgctgctgctgctgctgctgctgtggtggcctacggccgcagccccatggtgggctttgatcctccaccccacatgagggtgcccaccatcccccccaacctggccggcatccctgggggcaagccagcctacagcttccacgtgacagcagatggccagatgcagcctgtgcccttccccccagatgccctgattggccctggcatccccaggcatgcccggcagatcaacaccctgaaccacggggaggtggtgtgtgctgtgaccatcagcaaccccaccaggcatgtgtacacaggaggcaagggctgtgtgaaggtgtgggacatcagccaccctggcaacaagagccctgtgtcccagctggactgcctgaacagagacaactacatccgcagctgcaagctgctgcctgatggctgcaccctcatcgtgggcggggaggccagcaccctgagcatctgggacctggccgcccccaccccccgcatcaaggccgagctgaccagcagcgccccagcctgctacgccctggccatcagcccagacagcaaggtgtgcttcagctgctgcagtgatggcaacattgctgtgtgggacctgcacaaccagaccctggtgcggcagttccagggccacacagatggagccagctgcatcgacatcagcaatgatggcaccaagctgtggacaggaggcctggacaacacagtgcgctcctgggacctgcgggagggccggcagctgcagcagcacgacttcaccagccagatcttcagcctgggctactgccccaccggggagtggctggccgtgggcatggagagcagcaatgtggaggtgctgcacgtgaacaagccagacaagtaccagctgcacctgcacgagagctgtgtgctgagcctgaagtttgcctactgcggcaagtggtttgtgtccacaggcaaggacaacctgctgaatgcctggaggaccccctatggagccagcatcttccagagcaaggagagcagctctgtgctgagctgtgacatctctgtggatgacaagtacatcgtgacaggcagcggggacaagaaggccaccgtgtatgaggtgatctactag

SEQ ID NO: 173664 - DNA, 729 bp, synthetic construct
  misc_feature 1..729: note = Description of Artificial Sequence: Synthetic coding sequence
  source 1..729: mol_type = other DNA
atgttcccccagagccgccaccccaccccccaccaggccgccggccagcccttcaagttcaccatccctgagagcctggaccgcatcaaggaggagttccagttcctgcaggcccagtaccacagcctgaagctggagtgtgagaagctggccagcgagaagacagagatgcagaggcactacgtgatgtactatgagatgtcctatggcctgaacatcgagatgcacaagcagacagaaattgccaagaggctgaacaccatctgtgcccaggtgatccccttcctgagccaggagcaccagcagcaggtggcccaggccgtggagcgggccaagcaggtgaccatggccgagctgaatgccatcattggagtgcggggcctgcccggcctgccccccacccagcagcagctgcaggcccagcacctgagccacggccacggcccccctgtgcccctgaccccccaccccagcggcctgcagcccccaggcatcccccccctgggcggcagcgctggcctgctggccctgagcagcgccctgagcggccagagccacctggccatcaaggatgacaagaagcaccatgatgctgagcaccaccgggaccgggagcccggcaccagcaacagcctgctggtgcctgacagcctgcggggcacagacaagagaagaaatggacctgagttcagcaatgacatcaagaagaggaaggtggatgacaagtag

SEQ ID NO: 173665 - DNA, 2121 bp, synthetic construct
  misc_feature 1..2121: note = Description of Artificial Sequence: Synthetic coding sequence
  source 1..2121: mol_type = other DNA
atggtgcagagccggctgacagccaccagcgccagccaggacagccctgccagcggcctgcagacccccctgcagagcggccagcccttcaagttcagcatcctggagatctgtgaccgcatcaaggaggagttccagttcctgcaggcccagtaccacagcctgaagctggagtgtgagaagctggccagcgagaagacagagatgcagaggcactacgtgatgtactatgagatgtcctatggcctgaacatcgagatgcacaagcaggccgagatcgtgaagaggctgagcggcatctgtgcccagatcatccccttcctgacccaggagcaccagcagcaggtgctgcaggccgtggagcgggccaagcaggtgacagtgggggagctgaacagcctgattggccagcagcagctgcagcccctgagccaccacgcccctcctgtgcccctgacccccaggcctgctggcctggtgggcggcagcgccaccggcctgctggccctgagcggggccctggccgcccaggcccagctggccgctgctgtgaaggaggacagagctggggtggaggccgagggcagccgggtggagcgggcccccagccgcagcgccagccccagccccccagagagcctggtggaggaggagcggcccagcggccctgggggcggcggcaagcagagagcagatgagaaggagcccagcggcccctatgaaagtgatgaggacaagagtgactacaacctggtggtggatgaggaccagcccagcgagccccccagccctgccaccaccccctgtgggaaggtgcccatctgcatcccagcccggcgggacctggtggacagccctgccagcctggccagcagcctgggcagccccctgccccgggccaaggagctgatcctgaatgacctgcctgccagcaccccagccagcaagagctgtgacagcagccccccccaggatgccagcaccccaggccccagcagcgccagccacctgtgccagctggccgccaagccagcccccagcacagacagcgtggccctgcggagccccctgaccctgagcagccccttcaccaccagcttcagcctgggcagccacagcaccctgaatggagacctgtctgtgcccagcagctatgtgtccctgcacctgagcccccaggtgagcagctctgtggtgtatggccgcagccctgtgatggcctttgagagccacccccacctgcggggcagctctgtgagcagcagcctgcccagcatccctgggggcaagccagcctacagcttccacgtgtctgcagatggccagatgcagcctgtgcccttccccagtgatgccctggtgggcgccggcatccccaggcatgcccggcagctgcacaccctggcccacggggaggtggtgtgtgctgtgaccatcagcggcagcacccagcacgtgtacacaggaggcaagggctgtgtgaaggtgtgggatgtgggccagcccggggccaagacccctgtggcccagctggactgcctgaacagagacaactacatccgcagctgcaagctgctgcctgatggccgcagcctgattgtgggcggggaggccagcaccctgagcatctgggacctggccgcccccaccccccgcatcaaggccgagctgaccagcagcgccccagcctgctacgccctggccgtgtccccagatgccaaggtgtgcttcagctgctgcagtgatggcaacatcgtggtgtgggacctgcagaaccagaccatggtgcggcagttccagggccacacagatggagccagctgcatcgacatcagtgactatggcacccggctgtggacaggaggcctggacaacacagtgcgctgctgggacctgcgggagggccggcagctgcagcagcacgacttcagcagccagatcttcagcctgggccactgccccaaccaggactggctggccgtgggcatggagagcagcaatgtggagatcctgcacgtgaggaagccagagaagtaccagctgcacctgcacgagagctgtgtgctgagcctgaagtttgccagctgtgtgcagggcgtggtgctgagccctgagctgtag

SEQ ID NO: 173666 - DNA, 2232 bp, synthetic construct
  misc_feature 1..2232: note = Description of Artificial Sequence: Synthetic coding sequence
  source 1..2232: mol_type = other DNA
atgtacccccagggccgccaccccacccccctgcagagcggccagcccttcaagttcagcatcctggagatctgtgaccgcatcaaggaggagttccagttcctgcaggcccagtaccacagcctgaagctggagtgtgagaagctggccagcgagaagacagagatgcagaggcactacgtgatgtactatgagatgtcctatggcctgaacatcgagatgcacaagcaggccgagatcgtgaagaggctgagcggcatctgtgcccagatcatccccttcctgacccaggagcaccagcagcaggtgctgcaggccgtggagcgggccaagcaggtgacagtgggggagctgaacagcctcatcggccagcagctgcagcccctgagccaccacgcccctcctgtgcccctgacccccaggcctgctggcctggtgggcggcagcgccaccggcctgctggccctgagcggggccctggccgcccaggcccagctggccgctgctgtgaaggaggacagagctggggtggaggccgagggcagccgggtggagcgggcccccagccgcagcgccagccccagccccccagagagcctggtggaggaggagcggcccagcggccctgggggcggcggcaagcagagagcagatgagaaggagcccagcggcccctatgaaagtgatgaggacaagagtgactacaacctggtggtggatgaggaccagcccagcgagccccccagccctgccaccaccccctgtgggaaggtgcccatctgcatcccagcccggcgggacctggtggacagccctgccagcctggccagcagcctgggcagccccctgccccgggccaaggagctgatcctgaatgacctgcctgccagcaccccagccagcaagagctgtgacagcagccccccccaggatgccagcaccccaggccccagcagcgccagccacctgtgccagctggccgccaagccagcccccagcacagacagcgtggccctgcggagccccctgaccctgagcagccccttcaccaccagcttcagcctgggcagccacagcaccctgaatggagacctgtctgtgcccagcagctatgtgtccctgcacctgagcccccaggtgagcagctctgtggtgtatggccgcagccctgtgatggcctttgagagccacccccacctgcggggcagctctgtgagcagcagcctgcccagcatccctgggggcaagccagcctacagcttccacgtgtctgcagatggccagatgcagcctgtgcccttccccagtgatgccctggtgggcgccggcatccccaggcatgcccggcagctgcacaccctggcccacggggaggtggtgtgtgctgtgaccatcagcggcagcacccagcacgtgtacacaggaggcaagggctgtgtgaaggtgtgggatgtgggccagcccggggccaagacccctgtggcccagctggactgcctgaacagagacaactacatccgcagctgcaagctgctgcctgatggccgcagcctgattgtgggcggggaggccagcaccctgagcatctgggacctggccgcccccaccccccgcatcaaggccgagctgaccagcagcgccccagcctgctacgccctggccgtgtccccagatgccaaggtgtgcttcagctgctgcagtgatggcaacatcgtggtgtgggacctgcagaaccagaccatggtgcggcagttccagggccacacagatggagccagctgcatcgacatcagtgactatggcacccggctgtggacaggaggcctggacaacacagtgcgctgctgggacctgcgggagggccggcagctgcagcagcacgacttcagcagccagatcttcagcctgggccactgccccaaccaggactggctggccgtgggcatggagagcagcaatgtggagatcctgcacgtgaggaagccagagaagtaccagctgcacctgcacgagagctgtgtgctgagcctgaagtttgccagctgtggccgctggtttgtgtccacaggcaaggacaacctgctgaatgcctggaggaccccctacggggccagcatcttccagagcaaggagagcagctctgtgctgagctgtgacatcagcaggaacaacaagtacatcgtgactggaagtggggacaagaaggccaccgtgtatgaggtggtgtactag

SEQ ID NO: 173667 - DNA, 879 bp, synthetic construct
  misc_feature 1..879: note = Description of Artificial Sequence: Synthetic coding sequence
  source 1..879: mol_type = other DNA
ctggcccatggagaggtggtgtgtgctgtgaccatcagcggcagcacccagcacgtgtacacaggaggcaagggctgtgtgaaggtgtgggatgtggatggagctgtgtttgctggccagaggggcggggcccaccagcccatccggaacagagacaactacatccgcagctgcaagctgctgcctgatggccgcagcctcatcgtgggcggggaggccagcaccctgagcatctgggacctggccgcccccaccccccgcatcaaggccgagctgaccagcagcgccccagcctgctacgccctggccgtgtccccagatgccaaggtgtgcttcagctgctgcagtgatggcaacatcgtggtgtgggacctgcagaaccagaccatggtgcggcagttccagggccacacagatggagccagctgcatcgacatcagtgactatggcacccggctgtggacaggaggcctggacaacacagtgcgctgctgggacctgcgggagggccggcagctgcagcagcacgacttcagcagccagatcttcagcctgggccactgccccaaccaggactggctggccgtgggcatggagagcagcaatgtggagatcctgcacgtgaggaagccagagaagtaccagctgcacctgcacgagagctgtgtgctgagcctgaagtttgccagctgtggccgctggtttgtgtccacaggcaaggacaacctgctgaatgcctggaggaccccctatggagccagcatcttccagagcaaggagagcagctctgtgctgagctgtgacatcagcaggaacaacaagtacatcgtgacaggcagcggggacaagaaggccaccgtgtatgaggtggtgtactag

SEQ ID NO: 173668 - DNA, 2121 bp, synthetic construct; identical to SEQ ID NO: 173665
  misc_feature 1..2121: note = Description of Artificial Sequence: Synthetic coding sequence
  source 1..2121: mol_type = other DNA

SEQ ID NO: 173669 - DNA, 1083 bp, synthetic construct
  misc_feature 1..1083: note = Description of Artificial Sequence: Synthetic coding sequence
  source 1..1083: mol_type = other DNA
atgtacccccagggccgccaccccacccccctgcagagcggccagcccttcaagttcagcatcctggagatctgtgaccgcatcaaggaggagttccagttcctgcaggcccagtaccacagcctgaagctggagtgtgagaagctggccagcgagaagacagagatgcagaggcactacgtgatgtactatgagatgtcctatggcctgaacatcgagatgcacaagcaggccgagatcgtgaagaggctgagcggcatctgtgcccagatcatccccttcctgacccaggagagcgccagccccagccccccagagagcctggtggaggaggagcggcccagcggccctgggggcggcggcaagcagagagcagatgagaaggagcccagcggcccctatgaaagtgatgaggacaagagtgactacaacctggtggtggatgaggaccagcccagcgagccccccagccctgccaccaccccctgtgggaaggtgcccatctgcatcccagcccggcgggacctggtggacagccctgccagcctggccagcagcctgggcagccccctgccccgggccaaggagctgatcctgaatgacctgcctgccagcaccccagccagcaagagctgtgacagcagccccccccaggatgccagcaccccaggccccagcagcgccagccacctgtgccagctggccgccaagccagcccccagcacagacagcgtggccctgcggagccccctgaccctgagcagccccttcaccaccagcttcagcctgggcagccacagcaccctgaatggagacctgtctgtgcccagcagctatgtgtccctgcacctgagcccccaggtgagcagctctgtggtgtatggccgcagccctgtgatggcctttgagagccacccccacctgcggggcagctctgtgagcagcagcctgcccagcatccctgggggcaagccagcctacagcttccacgtgtctgcagatggccagatgcagcctgtgcccttccccagtgatgccctggtgggcgccggcatccccccctggcccagcagcacagcctag

SEQ ID NO: 173670 - DNA, 1866 bp, synthetic construct
  misc_feature 1..1866: note = Description of Artificial Sequence: Synthetic coding sequence
  source 1..1866: mol_type = other DNA
atgcagaggcactacgtgatgtactatgagatgtcctatggcctgaacatcgagatgcacaagcaggccgagatcgtgaagaggctgagcggcatctgtgcccagatcatccccttcctgacccaggagcaccagcagcaggtgctgcaggccgtggagcgggccaagcaggtgacagtgggggagctgaacagcctgattggcagcgccagccccagccccccagagagcctggtggaggaggagcggcccagcggccctgggggcggcggcaagcagagagcagatgagaaggagcccagcggcccctatgaaagtgatgaggacaagagtgactacaacctggtggtggatgaggaccagcccagcgagccccccagccctgccaccaccccctgtgggaaggtgcccatctgcatcccagcccggcgggacctggtggacagccctgccagcctggccagcagcctgggcagccccctgccccgggccaaggagctgatcctgaatgacctgcctgccagcaccccagccagcaagagctgtgacagcagccccccccaggatgccagcaccccaggccccagcagcgccagccacctgtgccagctggccgccaagccagcccccagcacagacagcgtggccctgcggagccccctgaccctgagcagccccttcaccaccagcttcagcctgggcagccacagcaccctgaatggagacctgtctgtgcccagcagctatgtgtccctgcacctgagcccccaggtgagcagctctgtggtgtatggccgcagccctgtgatggcctttgagagccacccccacctgcggggcagctctgtgagcagcagcctgcccagcatccctgggggcaagccagcctacagcttccacgtgtctgcagatggccagatgcagcctgtgcccttccccagtgatgccctggtgggcgccggcatccccaggcatgcccggcagctgcacaccctggcccacggggaggtggtgtgtgctgtgaccatcagcggcagcacccagcacgtgtacacaggaggcaagggctgtgtgaaggtgtgggatgtgggccagcccggggccaagacccctgtggcccagctggactgcctgaacagagacaactacatccgcagctgcaagctgctgcctgatggccgcagcctgattgtgggcggggaggccagcaccctgagcatctgggacctggccgcccccaccccccgcatcaaggccgagctgaccagcagcgccccagcctgctacgccctggccgtgtccccagatgccaaggtgtgcttcagctgctgcagtgatggcaacatcgtggtgtgggacctgcagaaccagaccatggtgcggcagttccagggccacacagatggagccagctgcatcgacatcagtgactatggcacccggctgtggacaggaggcctggacaacacagtgcgctgctgggacctgcgggagggccggcagctgcagcagcacgacttcagcagccagatcttcagcctgggccactgccccaaccaggactggctggccgtgggcatggagagcagcaatgtggagatcctgcacgtgaggaagccagagaagtaccagctgcacctgcacgagagctgtgtgctgagcctgaagtttgccagctgtggccgctggtttgtgtccacaggcaaggacaacctgctgaatgcctggaggaccccctacggggccagcatcttccagagcaaggagagcagctctgtgctgagctgtgacatcagcaggaacaacaagtacatcgtgactggaagtggggacaagaaggccaccgtgtatgaggtggtgtactag

SEQ ID NO: 173671 - DNA, 1233 bp, synthetic construct
  misc_feature 1..1233: note = Description of Artificial Sequence: Synthetic coding sequence
  source 1..1233: mol_type = other DNA
atgaccttccccccagccctgctgccccccaaccctgtgaccccaccccggcccaggaccctgcccccacctggccctgcccggcctgtgaccagcgccagcctgctgcccagccagcacctgcccaggacagcctctgtgagcagctctgtggtgtatggccgcagccctgtgatggcctttgagagccacccccacctgcggggcagctctgtgagcagcagcctgcccagcatccctgggggcaagccagcctacagcttccacgtgtctgcagatggccagatgcagcctgtgcccttccccagtgatgccctggtgggcgccggcatccccaggcatgcccggcagctgcacaccctggcccatggagaggtggtgtgtgctgtgaccatcagcggcagcacccagcacgtgtacacaggaggcaagggctgtgtgaaggtgtgggatgtgggccagcccggggccaagacccctgtggcccagctggactgcctgaacagagacaactacatccgcagctgcaagctgctgcctgatggccgcagcctcatcgtgggcggggaggccagcaccctgagcatctgggacctggccgcccccaccccccgcatcaaggccgagctgaccagcagcgccccagcctgctacgccctggccgtgtccccagatgccaaggtgtgcttcagctgctgcagtgatggcaacatcgtggtgtgggacctgcagaaccagaccatggtgcggcagttccagggccacacagatggagccagctgcatcgacatcagtgactatggcacccggctgtggacaggaggcctggacaacacagtgcgctgctgggacctgcgggagggccggcagctgcagcagcacgacttcagcagccagatcttcagcctgggccactgccccaaccaggactggctggccgtgggcatggagagcagcaatgtggagatcctgcacgtgaggaagccagagaagtaccagctgcacctgcacgagagctgtgtgctgagcctgaagtttgccagctgtggccgctggtttgtgtccacaggcaaggacaacctgctgaatgcctggaggaccccctatggagccagcatcttccagagcaaggagagcagctctgtgctgagctgtgacatcagcaggaacaacaagtacatcgtgacaggcagcggggacaagaaggccaccgtgtatgaggtggtgtactag

SEQ ID NO: 173672 - DNA, 2061 bp, synthetic construct
  misc_feature 1..2061: note = Description of Artificial Sequence: Synthetic coding sequence
  source 1..2061: mol_type = other DNA
cagacccccctgcagagcggccagcccttcaagttcagcatcctggagatctgtgaccgcatcaaggaggagttccagttcctgcaggcccagtaccacagcctgaagctggagtgtgagaagctggccagcgagaagacagagatgcagaggcactacgtgatgtactatgagatgtcctatggcctgaacatcgagatgcacaagcaggccgagatcgtgaagaggctgagcggcatctgtgcccagatcatccccttcctgacccaggagcaccagcagcaggtgctgcaggccgtggagcgggccaagcaggtgacagtgggggagctgaacagcctgattggccagcagcagctgcagcccctgagccaccacgcccctcctgtgcccctgacccccaggcctgctggcctggtgggcggcagcgccaccggcctgctggccctgagcggggccctggccgcccaggcccagctggccgctgctgtgaaggaggacagagctggggtggaggccgagggcagccgggtggagcgggcccccagccgcagcgccagccccagccccccagagagcctggtggaggaggagcggcccagcggccctgggggcggcggcaagcagagagcagatgagaaggagcccagcggcccctatgaaagtgatgaggacaagagtgactacaacctggtggtggatgaggaccagcccagcgagccccccagccctgccaccaccccctgtgggaaggtgcccatctgcatcccagcccggcgggacctggtggacagccctgccagcctggccagcagcctgggcagccccctgccccgggccaaggagctgatcctgaatgacctgcctgccagcaccccagccagcaagagctgtgacagcagccccccccaggatgccagcaccccaggccccagcagcgccagccacctgtgccagctggccgccaagccagcccccagcacagacagcgtggccctgcggagccccctgaccctgagcagccccttcaccaccagcttcagcctgggcagccacagcaccctgaatggagacctgtctgtgcccagcagctatgtgtccctgcacctgagcccccaggtgagcagctctgtggtgtatggccgcagccctgtgatggcctttgagagccacccccacctgcggggcagctctgtgagcagcagcctgcccagcatccctgggggcaagccagcctacagcttccacgtgtctgcagatggccagatgcagcctgtgcccttccccagtgatgccctggtgggcgccggcatccccaggcatgcccggcagctgcacaccctggcccacggggaggtggtgtgtgctgtgaccatcagcggcagcacccagcacgtgtacacaggaggcaagggctgtgtgaaggtgtgggatgtgggccagcccggggccaagacccctgtggcccagctggactgcctgaacagagacaactacatccgcagctgcaagctgctgcctgatggccgcagcctgattgtgggcggggaggccagcaccctgagcatctgggacctggccgcccccaccccccgcatcaaggccgagctgaccagcagcgccccagcctgctacgccctggccgtgtccccagatgccaaggtgtgcttcagctgctgcagtgatggcaacatcgtggtgtgggacctgcagaaccagaccatggtgcggcagttccagggccacacagatggagccagctgcatcgacatcagtgactatggcacccggctgtggacaggaggcctggacaacacagtgcgctgctgggacctgcgggagggccggcagctgcagcagcacgacttcagcagccagatcttcagcctgggccactgccccaaccaggactggctggccgtgggcatggagagcagcaatgtggagatcctgcacgtgaggaagccagagaagtaccagctgcacctgcacgagagctgtgtgctgagcctgaagtttgccagctgtgtgcagggcgtggtgctgagccctgagctgtag

SEQ ID NO: 173673 - DNA, 1866 bp, synthetic construct; identical to SEQ ID NO: 173670
  misc_feature 1..1866: note = Description of Artificial Sequence: Synthetic coding sequence
  source 1..1866: mol_type = other DNA

SEQ ID NO: 173674 - DNA, 2283 bp, synthetic construct
  misc_feature 1..2283: note = Description of Artificial Sequence: Synthetic coding sequence
  source 1..2283: mol_type = other DNA
atgtacccccagggccgccacccagccccccaccagcccggccagcccggcttcaagttcaccgtggccgagagctgtgaccgcatcaaggatgagttccagttcctgcaggcccagtaccacagcctgaaggtggagtatgacaagctggccaatgagaagacagagatgcagaggcactacgtgatgtactatgagatgtcctatggcctgaacatcgagatgcacaagcagacagaaattgccaagaggctgaacaccatcctggcccagatcatgcccttcctgagccaggagcaccagcagcaggtggcccaggccgtggagcgggccaagcaggtgaccatgacagagctgaatgccatcatcggccagcagcagctgcaggcccagcacctgagccacgccacccacggcccccctgtgcagctgcccccccaccccagcggcctgcagcccccaggcatcccccctgtgacaggcagcagcagcggcctgctggccctgggcgccctgggcagccaggcccacctgactgtgaaggatgagaagaaccaccacgagctggaccaccgggagcgggagagcagcgccaacaacagcgtgagccccagcgagagcctgcgggccagcgagaagcaccggggcagcgctgactacagcatggaggccaagaagaggaaggccgaggagaaggacagcctgagccgctatgacagtgatggagacaagagtgatgacctggtggtggatgtgtccaatgaagatcctgccaccccccgggtgtccccagcccacagccccccagaaaatggcctggacaaggcccggagcctgaagaaggatgcccccaccagccctgcctctgtggccagcagcagcagcacccccagcagcaagaccaaggacctgggccacaatgacaagagcagcaccccaggcctgaagagcaacacccccaccccaagaaatgatgcccccaccccaggcaccagcaccaccccaggcctgcgctccatgcctgccagcgccctgcggacccccatcagcatcaccagcagctatgctgccccctttgccatgatgagccaccacgagatgaatggcagcctgaccagccctggggcctatgccggcctgcacaacatccccccccagatgtctgctgctgctgctgctgctgctgctgcctacggccgcagccccatggtgtcctttggagctgtgggctttgacccccacccccccatgagggccaccggcctgcccagcagcctggccagcatccctgggggcaagccagcctacagcttccacgtgtctgcagatggccagatgcagcctgtgcccttcccccatgatgccctggccggccctggcatccccaggcatgcccggcagatcaacaccctgagccatggagaggtggtgtgtgctgtgaccatcagcaaccccaccaggcatgtgtacacaggaggcaagggctgtgtgaagatctgggacatcagccagcccggcagcaagagccccatcagccagctggactgcctgaacagagacaactacatccgcagctgcaagctgctgcctgatggccgcaccctcatcgtgggcggggaggccagcaccctgaccatctgggacctggccagccccaccccccgcatcaaggccgagctgaccagcagcgccccagcctgctacgccctggccatcagcccagatgccaaggtgtgcttcagctgctgcagtgatggcaacattgctgtgtgggacctgcacaaccagaccctggtgcggcagttccagggccacacagatggagccagctgcatcgacatcagccatgatggcaccaagctgtggacaggaggcctggacaacacagtgcgctcctgggacctgcgggagggccggcagctgcagcagcacgacttcaccagccagatcttcagcctgggctactgccccaccggggagtggctggccgtgggcatggagagcagcaatgtggaggtgctgcaccacaccaagccagacaagtaccagctgcacctgcacgagagctgtgtgctgagcctgaagtttgcctactgcggcaagtggtttgtgtccacaggcaaggacaacctgctgaatgcctggaggaccccctatggagccagcatcttccagagcaaggagagcagctctgtgctgagctgtgacatctctgcagatgacaagtacatcgtgacaggcagcggggacaagaaggccaccgtgtatgaggtgatctactag

SEQ ID NO: 173675 - DNA, 2289 bp, synthetic construct
  misc_feature 1..2289: note = Description of Artificial Sequence: Synthetic coding sequence
  source 1..2289: mol_type = other DNA
atggccccccaccagcccggccagcccggcttcaagttcaccgtggccgagagctgtgaccgcatcaaggatgagttccagttcctgcaggcccagtaccacagcctgaaggtggagtatgacaagctggccaatgagaagacagagatgcagaggcactacgtgatgtactatgagatgtcctatggcctgaacatcgagatgcacaagcagacagagatcgccaagaggctgaacaccatcctggcccagatcatgcccttcctgagccaggagcaccagcagcaggtggcccaggccgtggagcgggccaagcaggtgaccatgacagagctgaatgccatcatcggccagcagcagctgcaggcccagcacctgagccacgccacccacggcccccctgtgcagctgcccccccaccccagcggcctgcagcccccaggcatcccccctgtgacaggcagcagcagcggcctgctggccctgggcgccctgggcagccaggcccacctgactgtgaaggatgagaagaaccaccacgagctggaccaccgggagcgggagagcagcgccaacaacagcgtgagccccagcgagagcctgcgggccagcgagaagcaccggggcagcgctgactacagcatggaggccaagaagaggaaggccgaggagaaggacagcctgagccgctatgacagtgatggagacaagagtgatgacctggtggtggatgtgtccaatgaagatcctgccaccccccgggtgtccccagcccacagccccccagaaaatggcctggacaaggcccggagcctgaagaaggatgcccccaccagccctgcctctgtggccagcagcagcagcacccccagcagcaagaccaaggacctgggccacaatgacaagagcagcaccccaggcctgaagagcaacacccccaccccaagaaatgatgcccccaccccaggcaccagcaccaccccaggcctgcgctccatgcctgggaagcccccaggcatggaccccatcgccagcgccctgcggacccccatcagcatcaccagcagctatgctgccccctttgccatgatgagccaccacgagatgaatggcagcctgaccagccctggggcctatgccggcctgcacaacatccccccccagatgtctgctgctgctgctgctgctgctgctgcctacggccgcagccccatggtgtcctttggagctgtgggctttgacccccacccccccatgagggccaccggcctgcccagcagcctggccagcatccctgggggcaagccagcctacagcttccacgtgtctgcagatggccagatgcagcctgtgcccttcccccatgatgccctggccggccctggcatccccaggcatgcccggcagatcaacaccctgagccatggagaggtggtgtgtgctgtgaccatcagcaaccccaccaggcatgtgtacacaggaggcaagggctgtgtgaagatctgggacatcagccagcccggcagcaagagccccatcagccagctggactgcctgaacagagacaactacatccgcagctgcaagctgctgcctgatggccgcaccctcatcgtgggcggggaggccagcaccctgaccatctgggacctggccagccccaccccccgcatcaaggccgagctgaccagcagcgccccagcctgctacgccctggccatcagcccagatgccaaggtgtgcttcagctgctgcagtgatggcaacattgctgtgtgggacctgcacaaccagaccctggtgcggcagttccagggccacacagatggagccagctgcatcgacatcagccatgatggcaccaagctgtggacaggaggcctggacaacacagtgcgctcctgggacctgcgggagggccggcagctgcagcagcacgacttcaccagccagatcttcagcctgggctactgccccaccggggagtggctggccgtgggcatggagagcagcaatgtggaggtgctgcaccacaccaagccagacaagtaccagctgcacctgcacgagagctgtgtgctgagcctgaagtttgcctactgcggcaagtggtttgtgtccacaggcaaggacaacctgctgaatgcctggaggaccccctatggagccagcatcttccagagcaaggagagcagctctgtgctgagctgtgacatctctgcagatgacaagtacatcgtgacaggcagcggggacaagaaggccaccgtgtatgaggtgatctactag

SEQ ID NO: 173676 - DNA, 2295 bp, synthetic construct
  misc_feature 1..2295: note = Description of Artificial Sequence: Synthetic coding sequence
  source 1..2295: mol_type = other DNA
atgtacccccagggccgccacccagccccccaccagcccggccagcccggcttcaagttcaccgtggccgagagctgtgaccgcatcaaggatgagttccagttcctgcaggcccagtaccacagcctgaaggtggagtatgacaagctggccaatgagaagacagagatgcagaggcactacgtgatgtactatgagatgtcctatggcctgaacatcgagatgcacaagcagacagaaattgccaagaggctgaacaccatcctggcccagatcatgcccttcctgagccaggagcaccagcagcaggtggcccaggccgtggagcgggccaagcaggtgaccatgacagagctgaatgccatcatcggccagcagcagctgcaggcccagcacctgagccacgccacccacggcccccctgtgcagctgcccccccaccccagcggcctgcagcccccaggcatcccccctgtgacaggcagcagcagcggcctgctggccctgggcgccctgggcagccaggcccacctgactgtgaaggatgagaagaaccaccacgagctggaccaccgggagaggagcagcgccagcaacaacagcgtgagccccagcgagagcctgcgggccagcgagaagcaccggggcagcgctgactacagcatggaggccaagaagaggaaggccgaggagaaggacagcctgagccgctatgacagtgatggagacaagagtgatgacctggtggtggatgtgtccaatgaagatcctgccaccccccgggtgtccccagcccacagccccccagaaaatggcctggacaaggcccggagcctgaagaaggatgcccccaccagccctgcctctgtggccagcagcagcagcacccccagcagcaagaccaaggacctgggccacaatgacaagagcagcaccccaggcctgaagagcaacacccccaccccaagaaatgatgcccccaccccaggcaccagcaccaccccaggcctgcgctccatgcctgggaagcccccaggcatggaccccatcgccagcgccctgcggacccccatcagcatcaccagcagctatgctgccccctttgccatgatgagccaccacgagatgaatggcagcctgaccagccctggggcctatgccggcctgcacaacatccccccccagatgtctgctgctgctgctgctgctgctgctgcctacggccgcagccccatggtgggctttgacccccacccccccatgagggccaccggcctgcccagcagcctggccagcatccctgggggcaagccagcctacagcttccacgtgtctgcagatggccagatgcagcctgtgcccttcccccatgatgccctggccggccctggcatccccaggcatgcccggcagatcaacaccctgagccatggagaggtggtgtgtgctgtgaccatcagcaaccccaccaggcatgtgtacacaggaggcaagggctgtgtgaagatctgggacatcagccagcccggcagcaagagccccatcagccagctggactgcctgaacagagacaactacatccgcagctgcaagctgctgcctgatggccgcaccctcatcgtgggcggggaggccagcaccctgaccatctgggacctggccagccccaccccccgcatcaaggccgagctgaccagcagcgccccagcctgctacgccctggccatcagcccagatgccaaggtgtgcttcagctgctgcagtgatggcaacattgctgtgtgggacctgcacaaccagaccctggtgcggcagttccagggccacacagatggagccagctgcatcgacatcagccatgatggcaccaagctgtggacaggaggcctggacaacacagtgcgctcctgggacctgcgggagggccggcagctgcagcagcacgacttcaccagccagatcttcagcctgggctactgccccaccggggagtggctggccgtgggcatggagagcagcaatgtggaggtgctgcaccacaccaagccagacaagtaccagctgcacctgcacgagagctgtgtgctgagcctgaagtttgcctactgcggcaagtggtttgtgtccacaggcaaggacaacctgctgaatgcctggaggaccccctatggagccagcatcttccagagcaaggagagcagctctgtgctgagctgtgacatctctgcagatgacaagtacatcgtgacaggcagcggggacaagaaggccaccgtgtatgaggtgatctactag

SEQ ID NO: 173677 - DNA, 2310 bp, synthetic construct
  misc_feature 1..2310: note = Description of Artificial Sequence: Synthetic coding sequence
  source 1..2310: mol_type = other DNA
atgtacccccagggccgccacccagccccccaccagcccggccagcccggcttcaagttcaccgtggccgagagctgtgaccgcatcaaggatgagttccagttcctgcaggcccagtaccacagcctgaaggtggagtatgacaagctggccaatgagaagacagagatgcagaggcactacgtgatgtactatgagatgtcctatggcctgaacatcgagatgcacaagcagacagaaattgccaagaggctgaacaccatcctggcccagatcatgcccttcctgagccaggagcaccagcagcaggtggcccaggccgtggagcgggccaagcaggtgaccatgacagagctgaatgccatcatcggccagcagcagctgcaggcccagcacctgagccacgccacccacggcccccctgtgcagctgcccccccaccccagcggcctgcagcccccaggcatcccccctgtgacaggcagcagcagcggcctgctggccctgggcgccctgggcagccaggcccacctgactgtgaaggatgagaagaaccaccacgagctggaccaccgggagcgggagagcagcgccaacaacagcgtgagccccagcgagagcctgcgggccagcgagaagcaccggggcagcgctgactacagcatggaggccaagaagaggaaggccgaggagaaggacagcctgagccgctatgacagtgatggagacaagagtgatgacctggtggtggatgtgtccaatgaagatcctgccaccccccgggtgtccccagcccacagccccccagaaaatggcctggacaaggcccggagcctgaagaaggatgcccccaccagccctgcctctgtggccagcagcagcagcacccccagcagcaagaccaaggacctgggccacaatgacaagagcagcaccccaggcctgaagagcaacacccccaccccaagaaatgatgcccccaccccaggcaccagcaccaccccaggcctgcgctccatgcctgggaagcccccaggcatggaccccatcgccagcgccctgcggacccccatcagcatcaccagcagctatgctgccccctttgccatgatgagccaccacgagatgaatggcagcctgaccagccctggggcctatgccggcctgcacaacatccccccccagatgtctgctgctgctgctgctgctgctgctgcctacggccgcagccccatggtgtcctttggagctgtgggctttgacccccacccccccatgagggccaccggcctgcccagcagcctggccagcatccctgggggcaagccagcctacagcttccacgtgtctgcagatggccagatgcagcctgtgcccttcccccatgatgccctggccggccctggcatccccaggcatgcccggcagatcaacaccctgagccacggggaggtggtgtgtgctgtgaccatcagcaaccccaccaggcatgtgtacacaggaggcaagggctgtgtgaagatctgggacatcagccagcccggcagcaagagccccatcagccagctggactgcctgaacagagacaactacatccgcagctgcaagctgctgcctgatggccgcaccctgattgtgggcggggaggccagcaccctgaccatctgggacctggccagccccaccccccgcatcaaggccgagctgaccagcagcgccccagcctgctacgccctggccatcagcccagatgccaaggtgtgcttcagctgctgcagtgatggcaacattgctgtgtgggacctgcacaaccagaccctggtgcggcagttccagggccacacagatggagccagctgcatcgacatcagccatgatggcaccaagctgtggacaggaggcctggacaacacagtgcgctcctgggacctgcgggagggccggcagctgcagcagcacgacttcaccagccagatcttcagcctgggctactgccccactggagagtggctggccgtgggcatggagagcagcaatgtggaggtgctgcaccacaccaagccagacaagtaccagctgcacctgcacgagagctgtgtgctgagcctgaagtttgcctactgtgggaagtggtttgtgtccacaggcaaggacaacctgctgaatgcctggaggaccccctacggggccagcatcttccagagcaaggagagcagctctgtgctgagctgtgacatctctgcagatgacaagtacatcgtgactggaagtggggacaagaaggccaccgtgtatgaagtcatctactag

SEQ ID NO: 173678 - DNA, 2295 bp, synthetic construct
  misc_feature 1..2295: note = Description of Artificial Sequence: Synthetic coding sequence
  source 1..2295: mol_type = other DNA
atgtacccccagggccgccacccagccccccaccagcccggccagcccggcttcaagttcaccgtggccgagagctgtgaccgcatcaaggatgagttccagttcctgcaggcccagtaccacagcctgaaggtggagtatgacaagctggccaatgagaagacagagatgcagaggcactacgtgatgtactatgagatgtcctatggcctgaacatcgagatgcacaagcagacagaaattgccaagaggctgaacaccatcctggcccagatcatgcccttcctgagccaggagcaccagcagcaggtggcccaggccgtggagcgggccaagcaggtgaccatgacagagctgaatgccatcatcggccagcagcagctgcaggcccagcacctgagccacgccacccacggcccccctgtgcagctgcccccccaccccagcggcctgcagcccccaggcatcccccctgtgacaggcagcagcagcggcctgctggccctgggcgccctgggcagccaggcccacctgactgtgaaggatgagaagaaccaccacgagctggaccaccgggagcgggagagcagcgccaacaacagcgtgagccccagcgagagcctgcgggccagcgagaagcaccggggcagcgctgactacagcatggaggccaagaagaggaaggccgaggagaaggacagcctgagccgctatgacagtgatggagacaagagtgatgacctggtggtggatgtgtccaatgaagatcctgccaccccccgggtgtccccagcccacagccccccagaaaatggcctggacaaggcccggagcctgaagaaggatgcccccaccagccctgcctctgtggccagcagcagcagcacccccagcagcaagaccaaggacctgggccacaatgacaagagcagcaccccaggcctgaagagcaacacccccaccccaagaaatgatgcccccaccccaggcaccagcaccaccccaggcctgcgctccatgcctgggaagcccccaggcatggaccccatcgccagcgccctgcggacccccatcagcatcaccagcagctatgctgccccctttgccatgatgagccaccacgagatgaatggcagcctgaccagccctggggcctatgccggcctgcacaacatccccccccagatgtctgctgctgctgctgctgctgctgctgcctacggccgcagccccatggtgggctttgacccccacccccccatgagggccaccggcctgcccagcagcctggccagcatccctgggggcaagccagcctacagcttccacgtgtctgcagatggccagatgcagcctgtgcccttcccccatgatgccctggccggccctggcatccccaggcatgcccggcagatcaacaccctgagccatggagaggtggtgtgtgctgtgaccatcagcaaccccaccaggcatgtgtacacaggaggcaagggctgtgtgaagatctgggacatcagccagcccggcagcaagagccccatcagccagctggactgcctgaacagagacaactacatccgcagctgcaagctgctgcctgatggccgcaccctcatcgtgggcggggaggccagcaccctgaccatctgggacctggccagccccaccccccgcatcaaggccgagctgaccagcagcgccccagcctgctacgccctggccatcagcccagatgccaaggtgtgcttcagctgctgcagtgatggcaacattgctgtgtgggacctgcacaaccagaccctggtgcggcagttccagggccacacagatggagccagctgcatcgacatcagccatgatggcaccaagctgtggacaggaggcctggacaacacagtgcgctcctgggacctgcgggagggccggcagctgcagcagcacgacttcaccagccagatcttcagcctgggctactgccccaccggggagtggctggccgtgggcatggagagcagcaatgtggaggtgctgcaccacaccaagccagacaagtaccagctgcacctgcacgagagctgtgtgctgagcctgaagtttgcctactgcggcaagtggtttgtgtccacaggcaaggacaacctgctgaatgcctggaggaccccctatggagccagcatcttccagagcaaggagagcagctctgtgctgagctgtgacatctctgcagatgacaagtacatcgtgacaggcagcggggacaagaaggccaccgtgtatgaggtgatctactag

SEQ ID NO: 173679 - DNA, 2319 bp, synthetic construct
  misc_feature 1..2319: note = Description of Artificial Sequence: Synthetic coding sequence
  source 1..2319: mol_type = other DNA
atgtacccccagggccgccacccagccccccaccagcccggccagcccggcttcaagttcaccgtggccgagagctgtgaccgcatcaaggatgagttccagttcctgcaggcccagtaccacagcctgaaggtggagtatgacaagctggccaatgagaagacagagatgcagaggcactacgtgatgtactatgagatgtcctatggcctgaacatcgagatgcacaagcagacagaaattgccaagaggctgaacaccatcctggcccagatcatgcccttcctgagccaggagcaccagcagcaggtggcccaggccgtggagcgggccaagcaggtgaccatgacagagctgaatgccatcatcggccagcagcagctgcaggcccagcacctgagccacgccacccacggcccccctgtgcagctgcccccccaccccagcggcctgcagcccccaggcatcccccctgtgacaggcagcagcagcggcctgctggccctgggcgccctgggcagccaggcccacctgactgtgaaggatgagaagaaccaccacgagctggaccaccgggagcgggagagcagcgccaacaacagcgtgagccccagcgagagcctgcgggccagcgagaagcaccggggcagcgctgactacagcatggaggccaagaagaggaaggccgaggagaaggacagcctgagccgctatgacagtgatggagacaagagtgatgacctggtggtggatgtgtccaatgaagatcctgccaccccccgggtgtccccagcccacagccccccagaaaatggcctggacaaggcccggagcctgaagaaggatgcccccaccagccctgcctctgtggccagcagcagcagcacccccagcagcaagaccaaggacctgggccacaatgacaagagcagcaccccaggcctgaagagcaacacccccaccccaagaaatgatgcccccaccccaggcaccagcaccaccccaggcctgcgctccatgcctgggaagcccccaggcatggaccccatcggcatcatggccagcgccctgcggacccccatcagcatcaccagcagctatgctgccccctttgccatgatgagccaccacgagatgaatggcagcctgaccagccctggggcctatgccggcctgcacaacatccccccccagatgtctgctgctgctgctgctgctgctgctgcctacggccgcagccccatggtgtcctttggagctgtgggctttgacccccacccccccatgagggccaccggcctgcccagcagcctggccagcatccctgggggcaagccagcctacagcttccacgtgtctgcagatggccagatgcagcctgtgcccttcccccatgatgccctggccggccctggcatccccaggcatgcccggcagatcaacaccctgagccatggagaggtggtgtgtgctgtgaccatcagcaaccccaccaggcatgtgtacacaggaggcaagggctgtgtgaagatctgggacatcagccagcccggcagcaagagccccatcagccagctggactgcctgaacagagacaactacatccgcagctgcaagctgctgcctgatggccgcaccctcatcgtgggcggggaggccagcaccctgaccatctgggacctggccagccccaccccccgcatcaaggccgagctgaccagcagcgccccagcctgctacgccctggccatcagcccagatgccaaggtgtgcttcagctgctgcagtgatggcaacattgctgtgtgggacctgcacaaccagaccctggtgcggcagttccagggccacacagatggagccagctgcatcgacatcagccatgatggcaccaagctgtggacaggaggcctggacaacacagtgcgctcctgggacctgcgggagggccggcagctgcagcagcacgacttcaccagccagatcttcagcctgggctactgccccaccggggagtggctggccgtgggcatggagagcagcaatgtggaggtgctgcaccacaccaagccagacaagtaccagctgcacctgcacgagagctgtgtgctgagcctgaagtttgcctactgcggcaagtggtttgtgtccacaggcaaggacaacctgctgaatgcctggaggaccccctatggagccagcatcttccagagcaaggagagcagctctgtgctgagctgtgacatctctgcagatgacaagtacatcgtgacaggcagcggggacaagaaggccaccgtgtatgaggtgatctactag

SEQ ID NO: 173680 - DNA, 2319 bp, synthetic construct
  misc_feature 1..2319: note = Description of Artificial Sequence: Synthetic coding sequence
  source 1..2319: mol_type = other DNA
atgcctcctcctccacccctgagctgcctgcggggcctgcaggccccccaccagcccggccagcccggcttcaagttcaccgtggccgagagctgtgaccgcatcaaggatgagttccagttcctgcaggcccagtaccacagcctgaaggtggagtatgacaagctggccaatgagaagacagagatgcagaggcactacgtgatgtactatgagatgtcctatggcctgaacatcgagatgcacaagcagacagaaattgccaagaggctgaacaccatcctggcccagatcatgcccttcctgagccaggagcaccagcagcaggtggcccaggccgtggagcgggccaagcaggtgaccatgacagagctgaatgccatcatcggccagcagctgcaggcccagcacctgagccacgccacccacggcccccctgtgcagctgcccccccaccccagcggcctgcagcccccaggcatcccccctgtgacaggcagcagcagcggcctgctggccctgggcgccctgggcagccaggcccacctgactgtgaaggatgagaagaaccaccacgagctggaccaccgggagcgggagagcagcgccaacaacagcgtgagccccagcgagagcctgcgggccagcgagaagcaccggggcagcgctgactacagcatggaggccaagaagaggaaggccgaggagaaggacagcctgagccgctatgacagtgatggagacaagagtgatgacctggtggtggatgtgtccaatgaagatcctgccaccccccgggtgtccccagcccacagccccccagaaaatggcctggacaaggcccggagcctgaagaaggatgcccccaccagccctgcctctgtggccagcagcagcagcacccccagcagcaagaccaaggacctgggccacaatgacaagagcagcaccccaggcctgaagagcaacacccccaccccaagaaatgatgcccccaccccaggcaccagcaccaccccaggcctgcgctccatgcctgggaagcccccaggcatggaccccatcggcatcatggccagcgccctgcggacccccatcagcatcaccagcagctatgctgccccctttgccatgatgagccaccacgagatgaatggcagcctgaccagccctggggcctatgccggcctgcacaacatccccccccagatgtctgctgctgctgctgctgctgctgctgcctacggccgcagccccatggtgggctttgacccccacccccccatgagggccaccggcctgcccagcagcctggccagcatccctgggggcaagccagcctacagcttccacgtgtctgcagatggccagatgcagcctgtgcccttcccccatgatgccctggccggccctggcatccccaggcatgcccggcagatcaacaccctgagccatggagaggtggtgtgtgctgtgaccatcagcaaccccaccaggcatgtgtacacaggaggcaagggctgtgtgaagatctgggacatcagccagcccggcagcaagagccccatcagccagctggactgcctgaacagagacaactacatccgcagctgcaagctgctgcctgatggccgcaccctcatcgtgggcggggaggccagcaccctgaccatctgggacctggccagccccaccccccgcatcaaggccgagctgaccagcagcgccccagcctgctacgccctggccatcagcccagatgccaaggtgtgcttcagctgctgcagtgatggcaacattgctgtgtgggacctgcacaaccagaccctggtgcggcagttccagggccacacagatggagccagctgcatcgacatcagccatgatggcaccaagctgtggacaggaggcctggacaacacagtgcgctcctgggacctgcgggagggccggcagctgcagcagcacgacttcaccagccagatcttcagcctgggctactgccccaccggggagtggctggccgtgggcatggagagcagcaatgtggaggtgctgcaccacaccaagccagacaagtaccagctgcacctgcacgagagctgtgtgctgagcctgaagtttgcctactgcggcaagtggtttgtgtccacaggcaaggacaacctgctgaatgcctggaggaccccctatggagccagcatcttccagagcaaggagagcagctctgtgctgagctgtgacatctctgcagatgacaagtacatcgtgacaggcagcggggacaagaaggccaccgtgtatgaggtgatctactag

SEQ ID NO: 173681 - DNA, 2325 bp, synthetic construct
  misc_feature 1..2325: note = Description of Artificial Sequence: Synthetic coding sequence
  source 1..2325: mol_type = other DNA
atgcctcctcctccacccctgagctgcctgcggggcctgcaggccccccaccagcccggccagcccggcttcaagttcaccgtggccgagagctgtgaccgcatcaaggatgagttccagttcctgcaggcccagtaccacagcctgaaggtggagtatgacaagctggccaatgagaagacagagatgcagaggcactacgtgatgtactatgagatgtcctatggcctgaacatcgagatgcacaagcagacagaaattgccaagaggctgaacaccatcctggcccagatcatgcccttcctgagccaggagcaccagcagcaggtggcccaggccgtggagcgggccaagcaggtgaccatgacagagctgaatgccatcatcggccagcagctgcaggcccagcacctgagccacgccacccacggcccccctgtgcagctgcccccccaccccagcggcctgcagcccccaggcatcccccctgtgacaggcagcagcagcggcctgctggccctgggcgccctgggcagccaggcccacctgactgtgaaggatgagaagaaccaccacgagctggaccaccgggagcgggagagcagcgccaacaacagcgtgagccccagcgagagcctgcgggccagcgagaagcaccggggcagcgctgactacagcatggaggccaagaagaggaaggccgaggagaaggacagcctgagccgctatgacagtgatggagacaagagtgatgacctggtggtggatgtgtccaatgaagatcctgccaccccccgggtgtccccagcccacagccccccagaaaatggcctggacaaggcccggagcctgaagaaggatgcccccaccagccctgcctctgtggccagcagcagcagcacccccagcagcaagaccaaggacctgggccacaatgacaagagcagcaccccaggcctgaagagcaacacccccaccccaagaaatgatgcccccaccccaggcaccagcaccaccccaggcctgcgctccatgcctgggaagcccccaggcatggaccccatcgccagcgccctgcggacccccatcagcatcaccagcagctatgctgccccctttgccatgatgagccaccacgagatgaatggcagcctgaccagccctggggcctatgccggcctgcacaacatccccccccagatgtctgctgctgctgctgctgctgctgctgcctacggccgcagccccatggtgtcctttggagctgtgggctttgacccccacccccccatgagggccaccggcctgcccagcagcctggccagcatccctgggggcaagccagcctacagcttccacgtgtctgcagatggccagatgcagcctgtgcccttcccccatgatgccctggccggccctggcatccccaggcatgcccggcagatcaacaccctgagccatggagaggtggtgtgtgctgtgaccatcagcaaccccaccaggcatgtgtacacaggaggcaagggctgtgtgaagatctgggacatcagccagcccggcagcaagagccccatcagccagctggactgcctgaacagagacaactacatccgcagctgcaagctgctgcctgatggccgcaccctcatcgtgggcggggaggccagcaccctgaccatctgggacctggccagccccaccccccgcatcaaggccgagctgaccagcagcgccccagcctgctacgccctggccatcagcccagatgccaaggtgtgcttcagctgctgcagtgatggcaacattgctgtgtgggacctgcacaaccagaccctggtgcggcagttccagggccacacagatggagccagctgcatcgacatcagccatgatggcaccaagctgtggacaggaggcctggacaacacagtgcgctcctgggacctgcgggagggccggcagctgcagcagcacgacttcaccagccagatcttcagcctgggctactgccccaccggggagtggctggccgtgggcatggagagcagcaatgtggaggtgctgcaccacaccaagccagacaagtaccagctgcacctgcacgagagctgtgtgctgagcctgaagtttgcctactgcggcaagtggtttgtgtccacaggcaaggacaacctgctgaatgcctggaggaccccctatggagccagcatcttccagagcaaggagagcagctctgtgctgagctgtgacatctctgcagatgacaagtacatcgtgacaggcagcggggacaagaaggccaccgtgtatgaggtgatctactag

SEQ ID NO: 173682 - DNA, 1719 bp, synthetic construct
  misc_feature 1..1719: note = Description of Artificial Sequence: Synthetic coding sequence
  source 1..1719: mol_type = other DNA
atgaccagccgggaccagccccggcccaagggcccccccaagagcaccagcccctgccccggcatcagcaacagcgagagcagccccaccctgaactaccagggcatcctgaaccggctgaagcagttcccccgcttcagcccccactttgctgctgagctggagagcatctactacagcctgcacaagatccagcaggatgtggccgagcaccacaagcagattggaaatgtgctgcagatcgtggagagctgcagccagctgcagggcttccagagcgaggaggtgtccccagctgagcccgccagccctggcaccccccagcaggtgaaggacaagaccctgcaggagagcagctttgaggacatcatggccaccaggagcagtgactggctgcggcggcccctgggggaggacaaccagcctgagacccagctgttctgggacaaggagccctggttctggcatgacaccctgacagagcagctgtggaggatctttgctggggtgcatgatgagaaggccaagccccgggaccggcagcaggcccctggcctgggccaggagagcaaggcccctggcagctgtgaccccggcacagacccctgcccagaagatgccagcaccccccggcccccagaggccagcagcagccccccagagggcagccaggacaggaacacctcctggggcgtggtgcaggagcccccaggccgggccagccgcttcctgcagagcatctcctgggaccctgaggactttgaagatgcctggaagaggccagatgccctgcccggccagagcaagaggctggccgtgccctgcaagctggagaagatgaggatcctggcccatggagagctggtgctggccacagccatcagcagcttcaccaggcatgtgttcacctgtggccggcggggcatcaaggtgtggagcctgaccggccaggtggccgaggaccgcttccctgagagccacctgcccatccagacccctggggccttcctgcggacctgcctgctgagcagcaacagccgcagcctgctgactggaggctacaacctggcctctgtgtctgtgtgggacctggccgcccccagcctgcacgtgaaggagcagctgccctgtgccggcctgaactgccaggccctggatgccaacctggatgccaacctggcctttgccagcttcaccagcggcgtggtgcgcatctgggacctgcgggaccagagcgtggtgcgggacctgaagggctacccagatggagtgaagagcatcgtggtgaagggctacaacatctggacaggaggcccagatgcctgcctgcgctgctgggaccagaggaccatcatgaagcccctggagtaccagttcaagagccagatcatgagcctgagccacagcccccaggaggactgggtgctgctgggcatggccaacggccagcagtggctgcagagcaccagcggcagccagaggcacatggtgggccagaaggacagcgtcatcctgtctgtgaagttcagccccttcggccagtggtgggcctctgtgggcatggatgacttcctgggcgtgtacagcatgcctgctggcaccaaggtgtttgaggtgcctgagatgagccctgtgacctgctgtgatgtgagcagcaacaaccggctggtggtgactggaagtggagagcacgcctctgtgtaccagatcacctactag

SEQ ID NO: 173683 - DNA, 1251 bp, synthetic construct
  misc_feature 1..1251: note = Description of Artificial Sequence: Synthetic coding sequence
  source 1..1251: mol_type = other DNA
atggccaccaggagcagtgactggctgcggcggcccctgggggaggacaaccagcctgagacccagctgttctgggacaaggagccctggttctggcatgacaccctgacagagcagctgtggaggatctttgctggggtgcatgatgagaaggccaagccccgggaccggcagcaggcccctggcctgggccaggagagcaaggcccctggcagctgtgaccctggaacagacccctgcccagaagatgccagcacccccaggcctcctgaggccagcagcagccccccagagggcagccaggacaggaacacctcctggggcgtggtgcaggagcccccaggccgggccagccgcttcctgcagagcatctcctgggaccctgaagattttgaagatgcctggaagaggccagatgccctgcccggccagagcaagaggctggccgtgccctgcaagctggagaagatgaggatcctggcccacggggagctggtgctggccacagccatcagcagcttcaccaggcatgtgttcacctgtggcagaagaggcatcaaggtgtggagcctgaccggccaggtggctgaagatcgcttccctgagagccacctgcccatccagacccctggggccttcctgcggacctgcctgctgagcagcaacagccgcagcctgctgaccggcggctacaacctggcctctgtgtctgtgtgggacctggccgcccccagcctgcacgtgaaggagcagctgccctgtgccggcctgaactgccaggccctggatgccaacctggatgccaacctggcctttgccagcttcaccagcggcgtggtgcgcatctgggacctgcgggaccagagcgtggtgcgggacctgaagggctacccagatggagtgaagagcatcgtggtgaagggctacaacatctggacaggaggcccagatgcctgcctgcgctgctgggaccagaggaccatcatgaagcccctggagtaccagttcaagagccagatcatgagcctgagccacagcccccaggaggactgggtgctgctgggcatggccaacggccagcagtggctgcagagcaccagcggcagccagaggcacatggtgggccagaggcagaggcaccctgagcggcaggtgctgcccctgtggcctgtggtgggcaagcgctggaatggccgcctgccctggaggctgcagcacgccggcggggacaagtctgtgcggggggcctag

SEQ ID NO: 173684 - DNA, 1719 bp, synthetic construct
  misc_feature 1..1719: note = Description of Artificial Sequence: Synthetic coding sequence
  source 1..1719: mol_type = other DNA
atgaccagccgggaccagccccggcccaagggcccccccaagagcaccagcccctgccccggcatcagcaacagcgagagcagccccaccctgaactaccagggcatcctgaaccggctgaagcagttcccccgcttcagcccccactttgctgctgagctggagagcatctactacagcctgcacaagatccagcaggatgtggccgagcaccacaagcagattggaaatgtgctgcagatcgtggagagctgcagccagctgcagggcttccagagcgaggaggtgtccccagctgagcccgccagccctggcaccccccagcaggtgaaggacaagaccctgcaggagagcagctttgaggacatcatggccaccaggagcagtgactggctgcggcggcccctgggggaggacaaccagcctgagacccagctgttctgggacaaggagccctggttctggcatgacaccctgacagagcagctgtggaggatctttgctggggtgcatgatgagaaggccaagccccgggacagacacttcagcatcttccagggccaggagagcaaggcccctggcagctgtgaccccggcacagacccctgcccagaagatgccagcaccccccggcccccagaggccagcagcagccccccagagggcagccaggacaggaacacctcctggggcgtggtgcaggagcccccaggccgggccagccgcttcctgcagagcatctcctgggaccctgaggactttgaagatgcctggaagaggccagatgccctgcccggccagagcaagaggctggccgtgccctgcaagctggagaagatgaggatcctggcccatggagagctggtgctggccacagccatcagcagcttcaccaggcatgtgttcacctgtggccggcggggcatcaaggtgtggagcctgaccggccaggtggccgaggaccgcttccctgagagccacctgcccatccagacccctggggccttcctgcggacctgcctgctgagcagcaacagccgcagcctgctgactggaggctacaacctggcctctgtgtctgtgtgggacctggccgcccccagcctgcacgtgaaggagcagctgccctgtgccggcctgaactgccaggccctggatgccaacctggatgccaacctggcctttgccagcttcaccagcggcgtggtgcgcatctgggacctgcgggaccagagcgtggtgcgggacctgaagggctacccagatggagtgaagagcatcgtggtgaagggctacaacatctggacaggaggcccagatgcctgcctgcgctgctgggaccagaggaccatcatgaagcccctggagtaccagttcaagagccagatcatgagcctgagccacagcccccaggaggactgggtgctgctgggcatggccaacggccagcagtggctgcagagcaccagcggcagccagaggcacatggtgggccagaaggacagcgtcatcctgtctgtgaagttcagccccttcggccagtggtgggcctctgtgggcatggatgacttcctgggcgtgtacagcatgcctgctggcaccaaggtgtttgaggtgcctgagatgagccctgtgacctgctgtgatgtgagcagcaacaaccggctggtggtgactggaagtggagagcacgcctctgtgtaccagatcacctactag

SEQ ID NO: 173685 - DNA, 1350 bp, synthetic construct
  misc_feature 1..1350: note = Description of Artificial Sequence: Synthetic coding sequence
  source 1..1350: mol_type = other DNA
atggccaccaggagcagtgactggctgcggcggcccctgggggaggacaaccagcctgagacccagctgttctgggacaaggagccctggttctggcatgacaccctgacagagcagctgtggaggatctttgctggggtgcatgatgagaaggccaagccccgggaccggcagcaggcccctggcctgggccaggagagcaaggcccctggcagctgtgaccctggaacagacccctgcccagaagatgccagcacccccaggcctcctgaggccagcagcagccccccagagggcagccaggacaggaacacctcctggggcgtggtgcaggagcccccaggccgggccagccgcttcctgcagagcatctcctgggaccctgaagattttgaagatgcctggaagaggccagatgccctgcccggccagagcaagaggctggccgtgccctgcaagctggagaagatgaggatcctggcccacggggagctggtgctggccacagccatcagcagcttcaccaggcatgtgttcacctgtggcagaagaggcatcaaggtgtggagcctgaccggccaggtggctgaagatcgcttccctgagagccacctgcccatccagacccctggggccttcctgcggacctgcctgctgagcagcaacagccgcagcctgctgaccggcggctacaacctggcctctgtgtctgtgtgggacctggccgcccccagcctgcacgtgaaggagcagctgccctgtgccggcctgaactgccaggccctggatgccaacctggatgccaacctggcctttgccagcttcaccagcggcgtggtgcgcatctgggacctgcgggaccagagcgtggtgcgggacctgaagggctacccagatggagtgaagagcatcgtggtgaagggctacaacatctggacaggaggcccagatgcctgcctgcgctgctgggaccagaggaccatcatgaagcccctggagtaccagttcaagagccagatcatgagcctgagccacagcccccaggaggactgggtgctgctgggcatggccaacggccagcagtggctgcagagcaccagcggcagccagaggcacatggtgggccagaaggacagcgtcatcctgtctgtgaagttcagccccttcggccagtggtgggcctctgtgggcatggatgacttcctgggcgtgtacagcatgcctgctggcaccaaggtgtttgaggtgcctgagatgagccctgtgacctgctgtgatgtgagcagcaacaaccggctggtggtgacaggcagcggggagcacgcctctgtgtaccagatcacctactag

SEQ ID NO: 173686 - DNA, 1716 bp, synthetic construct
  misc_feature 1..1716: note = Description of Artificial Sequence: Synthetic coding sequence
  source 1..1716: mol_type = other DNA
atgaaccagctgcggggcaagaagagctgccacacaggcctgggccgctctgctggctggaacatccccatcggcctgctgtactgtgacctgcctgagcccaggaagcccctggagaaggctgtggccaacttcttcagcggcagctgtgccccctgtgctgatggaacagacttcccccagctgtgccagctgtgccccggctgcggctgcagcaccctgaaccagtacttcggctacagcggggccttcaagtgcctgaaggatggagctggagatgtggcctttgtgaagcacagcaccatctttgagaacctggccaacaaggctgaccgggaccagtatgagctgctgtgcctggacaacaccaggaagcctgtggatgagtacaaggactgccacctggcccaggtgcccagccacacagtggtggcccgctccatgggcggcaaggaggacctgatctgggagctgctgaaccaggcccaggagcactttgggaaggacaagagcaaggagttccagctgttcagcagcccccacggcaaggacctgctcttcaaggacagcgcccacggcttcctgaaggtgccccccaggatggatgccaagatgtacctgggctatgaatatgtgacagccatccggaacctgcgggagggcacctgcccagaggcccccacagatgagtgcaagcctgtgaagtggtgtgccctgagccaccacgagcggctgaagtgtgatgagtggagcgtgaacagcgtgggcaagattgaatgtgtgtctgctgagaccacagaggactgcatcgccaagatcatgaatggagaggctgatgccatgagcctggatggcggctttgtgtacatcgccgggaaatgtggcctggtgcctgtgctggccgagaactacaacaagagtgacaactgtgaggacaccccagaggccggctactttgccatcgctgtggtgaagaagagcgccagtgacctgacctgggacaacctgaagggcaagaagagctgccacacagctgtgggccgcacagctggctggaacatccccatgggcctgctgtacaacaagatcaaccactgccgctttgatgagttcttcagcgagggctgtgcccctggcagcaagaaggacagcagcctgtgcaagctgtgcatgggcagcggcctgaacctgtgtgagcccaacaacaaggagggctactacggctacaccggggccttccgctgcctggtggagaagggagatgtggcctttgtgaagcaccagacagtgccccagaacacaggaggcaagaacccagacccctgggccaagaacctgaatgagaaggactatgagctgctgtgcctggatggcaccaggaagcctgtggaggagtatgccaactgccacctggcccgggcccccaaccacgctgtggtgaccaggaaggacaaggaggcctgtgtgcacaagatcctgcggcagcagcagcacctgtttggcagcaatgtgacagactgcagcggcaacttctgcctcttccgctctgagaccaaggacctgctcttcagagatgacacagtgtgcctggccaagctgcatgacaggaacacctatgagaagtacctgggggaggagtatgtgaaggctgtgggcaacctgaggaagtgcagcaccagcagcctgctggaggcctgcaccttcagaagaccctag

SEQ ID NO: 173687 - DNA, 2097 bp, synthetic construct
  misc_feature 1..2097: note = Description of Artificial Sequence: Synthetic coding sequence
  source 1..2097: mol_type = other DNA
atgaggctggccgtgggcgccctgctggtgtgtgctgtgctgggcctgtgcctggccgtgcctgacaagacagtgcgctggtgtgctgtgtctgaacatgaggccaccaagtgccagagcttccgggaccacatgaagagcgtcatccccagtgatggccccagcgtggcctgtgtgaagaaggccagctacctggactgcatccgggccatcgccgccaatgaagcagatgctgtgaccctggatgctggcctggtgtatgatgcctacctggcccccaacaacctgaagcctgtggtggccgagttctacggcagcaaggaggacccccagaccttctactatgctgtggccgtggtgaagaaggacagcggcttccagatgaaccagctgcggggcaagaagagctgccacacaggcctgggccgctctgctggctggaacatccccatcggcctgctgtactgtgacctgcctgagcccaggaagcccctggagaaggctgtggccaacttcttcagcggcagctgtgccccctgtgctgatggaacagacttcccccagctgtgccagctgtgccccggctgcggctgcagcaccctgaaccagtacttcggctacagcggggccttcaagtgcctgaaggatggagctggagatgtggcctttgtgaagcacagcaccatctttgagaacctggccaacaaggctgaccgggaccagtatgagctgctgtgcctggacaacaccaggaagcctgtggatgagtacaaggactgccacctggcccaggtgcccagccacacagtggtggcccgctccatgggcggcaaggaggacctgatctgggagctgctgaaccaggcccaggagcactttgggaaggacaagagcaaggagttccagctgttcagcagcccccacggcaaggacctgctcttcaaggacagcgcccacggcttcctgaaggtgccccccaggatggatgccaagatgtacctgggctatgaatatgtgacagccatccggaacctgcgggagggcacctgcccagaggcccccacagatgagtgcaagcctgtgaagtggtgtgccctgagccaccacgagcggctgaagtgtgatgagtggagcgtgaacagcgtgggcaagattgaatgtgtgtctgctgagaccacagaggactgcatcgccaagatcatgaatggagaggctgatgccatgagcctggatggcggctttgtgtacatcgccgggaaatgtggcctggtgcctgtgctggccgagaactacaacaagagtgacaactgtgaggacaccccagaggccggctactttgccatcgctgtggtgaagaagagcgccagtgacctgacctgggacaacctgaagggcaagaagagctgccacacagctgtgggccgcacagctggctggaacatccccatgggcctgctgtacaacaagatcaaccactgccgctttgatgagttcttcagcgagggctgtgcccctggcagcaagaaggacagcagcctgtgcaagctgtgcatgggcagcggcctgaacctgtgtgagcccaacaacaaggagggctactacggctacacaggagccttccgctgcctggtggagaagggagatgtggcctttgtgaagcaccagacagtgccccagaacacaggaggcaagaacccagacccctgggccaagaacctgaatgagaaggactatgagctgctgtgcctggatggcaccaggaagcctgtggaggagtatgccaactgccacctggcccgggcccccaaccacgctgtggtgaccaggaaggacaaggaggcctgtgtgcacaagatcctgcggcagcagcagcacctgtttggcagcaatgtgacagactgcagcggcaacttctgcctcttccgctctgagaccaaggacctgctcttcagagatgacacagtgtgcctggccaagctgcatgacaggaacacctatgagaagtacctgggggaggagtatgtgaaggctgtgggcaacctgaggaagtgcagcaccagcagcctgctggaggcctgcaccttccggcggccctag

SEQ ID NO: 173688 - DNA, 2283 bp, synthetic construct
  misc_feature 1..2283: note = Description of Artificial Sequence: Synthetic coding sequence
  source 1..2283: mol_type = other DNA
atgatggaccaggcccggagcgccttcagcaacctgtttggaggagagcccctgagctacacccgcttcagcctggcccggcaggtggatggagacaacagccacgtggagatgaagctggccgtggatgaggaggagaatgctgacaacaacaccaaggccaacgtgaccaagcccaagcgctgcagcggcagcatctgctacggcaccatcgccgtcatcgtgttcttcctgattggcttcatgattggctacctgggctactgcaagggcgtggagcccaagacagaatgtgagcggctggccggcacagagagccctgtgcgggaggagcccggggaggacttccctgctgcccggcggctgtactgggatgacctgaagaggaagctgtctgagaagctggacagcacagacttcaccggcaccatcaagctgctgaatgaaaattcctatgtgccccgggaggccggcagccagaaggatgagaacctggccctgtatgtggagaaccagttccgggagttcaagctgagcaaggtgtggagggaccagcactttgtgaagatccaggtgaaggacagcgcccagaacagcgtcatcatcgtggacaagaatggccgcctggtgtacctggtggagaaccctgggggctacgtggcctacagcaaggccgccaccgtgacaggcaagctggtgcacgccaactttggcaccaagaaggactttgaggacctgtacacccctgtgaatggcagcatcgtcatcgtgcgggccggcaagatcacctttgctgagaaggtggccaatgctgagagcctgaatgccatcggcgtgctgatctacatggaccagaccaagttccccatcgtgaatgctgagctgtccttcttcggccacgcccacctgggcactggagacccctacaccccaggcttccccagcttcaaccacacccagttcccccccagccgcagcagcggcctgcccaacatccctgtgcagaccatcagcagagctgctgctgagaagctgtttggaaacatggagggggactgccccagcgactggaagacagacagcacctgcaggatggtgaccagcgagagcaagaatgtgaagctgactgtgtccaatgtgctgaaggagatcaagatcctgaacatctttggagtcatcaagggctttgtggagccagaccactacgtggtggtgggcgcccagagagatgcctggggccctggggccgccaagtctggagtgggcacagccctgctgctgaagctggcccagatgttcagtgacatggtgctgaaggatggcttccagcccagccgcagcatcatctttgcctcctggagcgctggggactttggatctgtgggcgccacagagtggctggagggctacctgagcagcctgcacctgaaggccttcacctacatcaacctggacaaggctgtgctgggcaccagcaacttcaaggtgtctgccagccccctgctgtacaccctcatcgagaagaccatgcagaatgtgaagcaccctgtgacaggccagttcctgtaccaggacagcaactgggccagcaaggtggagaagctgaccctggacaatgctgccttccccttcctggcctacagcggcatcccagctgtgtccttctgcttctgtgaggacacagactacccctacctgggcaccaccatggacacctacaaggagctgattgagcgcatccctgagctgaacaaggtggcccgggctgctgctgaggtggccggccagtttgtgatcaagctgacccatgatgtggagctgaacctggactatgagcgctacaacagccagctgctgagctttgtgcgggacctgaaccagtacagagctgacatcaaggagatgggcctgagcctgcagtggctgtacagcgcccggggggacttcttccgggccaccagccggctgaccacagactttggaaatgctgagaagacagacagatttgtgatgaagaagctgaatgacagagtgatgagggtggagtaccacttcctgagcccctacgtgagccccaaggagagccccttcagacatgtgttctggggcagcggcagccacaccctgcctgccctgctggagaacctgaagctgaggaagcagaacaatggagccttcaatgagaccctcttcaggaaccagctggccctggccacctggaccatccagggcgccgccaatgccctgtctggagatgtgtgggacatcgacaatgagttctag

SEQ ID NO: 173689 - DNA, 2283 bp, synthetic construct; identical to SEQ ID NO: 173688
  misc_feature 1..2283: note = Description of Artificial Sequence: Synthetic coding sequence
  source 1..2283: mol_type = other DNA

SEQ ID NO: 173690 - DNA, 1437 bp, synthetic construct
  misc_feature 1..1437: note = Description of Artificial Sequence: Synthetic coding sequence
  source 1..1437: mol_type = other DNA
atggaccagaccaagttccccatcgtgaatgctgagctgtccttcttcggccacgcccacctgggcactggagacccctacaccccaggcttccccagcttcaaccacacccagttcccccccagccgcagcagcggcctgcccaacatccctgtgcagaccatcagcagagctgctgctgagaagctgtttggaaacatggagggggactgccccagcgactggaagacagacagcacctgcaggatggtgaccagcgagagcaagaatgtgaagctgactgtgtccaatgtgctgaaggagatcaagatcctgaacatctttggagtcatcaagggctttgtggagccagaccactacgtggtggtgggcgcccagagagatgcctggggccctggggccgccaagtctggagtgggcacagccctgctgctgaagctggcccagatgttcagtgacatggtgctgaaggatggcttccagcccagccgcagcatcatctttgcctcctggagcgctggggactttggatctgtgggcgccacagagtggctggagggctacctgagcagcctgcacctgaaggccttcacctacatcaacctggacaaggctgtgctgggcaccagcaacttcaaggtgtctgccagccccctgctgtacaccctcatcgagaagaccatgcagaatgtgaagcaccctgtgacaggccagttcctgtaccaggacagcaactgggccagcaaggtggagaagctgaccctggacaatgctgccttccccttcctggcctacagcggcatcccagctgtgtccttctgcttctgtgaggacacagactacccctacctgggcaccaccatggacacctacaaggagctgattgagcgcatccctgagctgaacaaggtggcccgggctgctgctgaggtggccggccagtttgtgatcaagctgacccatgatgtggagctgaacctggactatgagcgctacaacagccagctgctgagctttgtgcgggacctgaaccagtacagagctgacatcaaggagatgggcctgagcctgcagtggctgtacagcgcccggggggacttcttccgggccaccagccggctgaccacagactttggaaatgctgagaagacagacagatttgtgatgaagaagctgaatgacagagtgatgagggtggagtaccacttcctgagcccctacgtgagccccaaggagagccccttcagacatgtgttctggggcagcggcagccacaccctgcctgccctgctggagaacctgaagctgaggaagcagaacaatggagccttcaatgagaccctcttcaggaaccagctggccctggccacctggaccatccagggcgccgccaatgccctgtctggagatgtgtgggacatcgacaatgagttctag

SEQ ID NO: 173691 - DNA, 42 bp, synthetic construct
  misc_feature 1..42: note = Description of Artificial Sequence: Synthetic coding sequence
  source 1..42: mol_type = other DNA
atggaccaggcccggagcgccttcagcaacctggacctgtag

SEQ ID NO: 173692 - DNA, 11493 bp, synthetic construct
  misc_feature 1..11493: note = Description of Artificial Sequence: Synthetic coding sequence
  source 1..11493: mol_type = other DNA
atggcctttgtggccacccagggcgccaccgtggtggaccagaccaccctgatgaagaagtacctgcagtttgtggccgccctgacagatgtgaacaccccagatgagaccaagctgaagatgatgcaggaggtgtctgaaaattttgaaaatgtgaccagcagcccccagtacagcaccttcctggagcacatcatcccccgcttcctgaccttcctgcaggatggagaggtgcagttcctgcaggagaagccagcccagcagctgaggaagctggtgctggagatcatccaccgcatccccaccaatgagcacctgcggccccacaccaagaatgtgctgtctgtgatgttccgcttcctggagacagaaaatgaagaaaatgtgctgatctgcctgcgcatcatcatcgagctgcacaagcagttccggccccccatcacccaggagatccaccacttcctggactttgtgaagcagatctacaaggagctgcccaaggtggtgaaccgctactttgagaacccccaggtgatcccagaaaatacagtgcccccacctgagatggtgggcatgatcaccaccatcgctgtgaaggtgaaccctgagagagaagattctgagaccaggacccacagcatcatcccccggggcagcctgagcctgaaggtgctggccgagctgcccatcatcgtggtgctgatgtaccagctgtacaagctgaacatccacaacgtggtggccgagtttgtgcccctcatcatgaacaccatcgccatccaggtgtctgcccaggcccggcagcacaagctgtacaacaaggagctgtatgctgacttcatcgccgcccagatcaagaccctgtccttcctggcctacatcatccgcatctaccaggagctggtgaccaagtacagccagcagatggtgaagggcatgctgcagctgctgagcaactgcccagctgagacagcccacctgaggaaggagctgctgattgctgccaagcacatcctgaccacagagctgaggaaccagttcatcccctgcatggacaagctgtttgatgagagcatcctgattggcagcggctacacagcccgggagaccctgcggcccctggcctacagcaccctggccgacctggtgcaccacgtgcggcagcacctgcccctgagtgacctgagcctggccgtgcagctgtttgccaagaacattgatgatgagagcctgcccagcagcatccagaccatgagctgcaagctgctgctgaacctggtggactgcatccgcagcaagtctgagcaggagagcggaaatggaagagatgtgctgatgaggatgctggaggtgtttgtgctgaagttccacaccatcgcccgctaccagctgagcgccatcttcaagaagtgcaagccccagagcgagctgggcgctgtggaggccgccctgcccggggtgcccacagccccagctgcccctggccctgcccccagccctgcccctgtgcctgcccctcctcctcctcctcctcctcctcctccagccacccctgtgaccccagcccctgtgcccccatttgagaagcagggcgagaaggacaaggaggacaagcagaccttccaggtgacagactgccgcagcctggtgaagaccctggtgtgtggggtgaagaccatcacctggggcatcaccagctgcaaggcccctggagaggcccagttcatccccaacaagcagctgcagcccaaggagacccagatctacatcaagctggtgaagtatgccatgcaggccctggacatctaccaggtgcagattgctggaaatggccagacctacatccgggtggccaactgccagacagtgaggatgaaggaggagaaggaggtgctggagcactttgctggggtcttcaccatgatgaaccccctgaccttcaaggagatcttccagaccaccgtgccctacatggtggagcgcatcagcaagaactatgccctgcagatcgtggccaacagcttcctggccaaccccaccaccagcgccctgtttgccaccatcctggtggagtacctgctggaccggctgcctgagatgggcagcaatgtggagctgagcaacctgtacctgaagctgttcaagctggtgtttggatctgtgtccctgtttgctgctgaaaatgagcagatgctgaagccccacctgcacaagatcgtgaacagctccatggagctggcccagacagccaaggagccctacaactacttcctgctgctgcgggccctcttccgcagcattggaggcggcagccatgacctgctgtaccaggagttcctgcccctgctgcccaacctgctgcagggcctgaacatgctgcagagcggcctgcacaagcagcacatgaaggacctgtttgtggagctgtgcctgactgtgcctgtgcggctgagcagcctgctgccctacctgcccatgctgatggaccccctggtgtctgccctgaatggcagccagaccctggtgtcccagggcctgcggaccctggagctgtgtgtggacaacctgcagcctgacttcctgtatgaccacatccagcctgtgcgggcagagctgatgcaggccctgtggaggaccctgagaaatcctgctgacagcatcagccacgtggcctacagagtgctgggcaagtttggaggcagcaacaggaagatgctgaaggagagccagaagctgcactacgtggtgacagaggtgcagggccccagcatcaccgtggagttcagtgactgcaaggccagcctgcagctgcccatggagaaggccattgaaacagccctggactgcctgaagagcgccaacacagagccctactaccgccggcaggcctgggaggtgatcaagtgcttcctggtggccatgatgagcctggaggacaacaagcacgccctgtaccagctgctggcccaccccaacttcacagagaagaccatccccaacgtcatcatcagccaccgctacaaggcccaggacaccccagccaggaagacctttgagcaggccctgactggagccttcatgtctgctgtgatcaaggacctgcggcccagcgccctgccctttgtggccagcctcatccgccactacaccatggtggccgtggcccagcagtgtggccccttcctgctgccctgctaccaggtgggcagccagcccagcacagccatgttccacagtgaagaaaatggcagcaagggcatggaccccctggtgctgattgatgccatcgccatctgcatggcctatgaggagaaggagctgtgcaagatcggggaggtggccctggccgtcatctttgatgtggccagcatcatcctgggcagcaaggagcgggcctgccagctgcccctcttctcctacatcgtggagcggctgtgtgcctgctgctatgagcaggcctggtacgccaagctgggcggcgtggtgtccatcaagttcctgatggagcggctgcccctgacctgggtgctgcagaaccagcagaccttcctgaaggccctgctgtttgtgatgatggacctgactggagaggtgtccaatggagctgtggccatggccaagaccaccctggagcagctgctgatgagatgtgccacccccctgaaggatgaggagagagctgaggagatcgtggccgcccaggagaagagcttccaccacgtgacccatgacctggtgcgggaggtgaccagccccaacagcacagtgaggaagcaggccatgcacagcctgcaggtgctggcccaggtgacaggcaagtctgtgaccgtcatcatggagccccacaaggaggtgctgcaggacatggtgccccccaagaagcacctgctgcggcaccagcctgccaatgcccagatcggcctgatggagggcaacaccttctgcaccaccctgcagcccaggctcttcaccatggacctgaatgtggtggagcacaaggtgttctacacagagctgctgaacctgtgtgaggccgaggacagcgccctgaccaagctgccctgctacaagagcctgcccagcctggtgcccctgagaattgctgccctgaatgccctggccgcctgcaactacctgccccagagccgggagaagatcatcgccgccctcttcaaggccctgaacagcaccaacagcgagctgcaggaggccggggaggcctgcatgaggaagttcctggagggcgccaccatcgaggtggaccagatccacacccacatgaggcccctgctgatgatgctgggggactaccgcagcctgaccctgaatgtggtgaaccggctgacctctgtgaccaggctcttccccaacagcttcaatgacaagttctgtgaccagatgatgcagcacctgaggaagtggatggaggtggtggtgatcacccacaagggcggccagaggagtgatggaaatgagatgaagatctgcagcgccatcatcaacctcttccacctgatcccagctgccccccagaccctggtgaagcccctgctggaggtggtgatgaagacagagcgggccatgctgattgaggccggcagccccttccgggagcccctcatcaagttcctgaccaggcaccccagccagacagtggagctgttcatgatggaggccaccctgaatgacccccagtggagcaggatgttcatgtccttcctgaagcacaaggatgcccggcccctgagagatgtgctggccgccaaccccaaccgcttcatcaccctgctgctgcctggaggagcccagacagctgtgcggcccggcagccccagcaccagcaccatgaggctggacctgcagttccaggccatcaagatcatcagcatcatcgtgaagaatgatgacagctggctggccagccagcacagcctggtgtcccagctgcggcgggtgtgggtgtctgagaacttccaggagcggcacaggaaagaaaacatggccgccaccaactggaaggagcccaagctgctggcctactgcctgctgaactactgcaagaggaactacggggacatcgagctgctcttccagctgctgcgggccttcaccggccgcttcctgtgcaacatgaccttcctgaaggagtacatggaggaggagatccccaagaactacagcatcgcccagaagagggccctcttcttccgctttgtggacttcaatgaccccaactttggagatgagctgaaggccaaggtgctgcagcacatcctgaacccagccttcctgtacagctttgagaagggggagggggagcagctgctgggcccccccaaccctgagggggacaaccctgagagcatcacctctgtgttcatcaccaaggtgctggaccctgagaagcaggccgacatgctggacagcctgcgcatctacctgctgcagtatgccaccctgctggtggagcacgccccccaccacatccatgacaacaacaagaacagaaacagcaagctgcggcggctgatgacctttgcctggccctgcctgctgagcaaggcctgtgtggaccctgcctgcaagtacagcggccacctgctgctggcccacatcatcgccaagtttgccatccacaagaagatcgtgctgcaggtgttccacagcctgctgaaggcccacgccatggaggcccgggccatcgtgcggcaggccatggccatcctgaccccagctgtgcctgccaggatggaggatggccaccagatgctgacccactggaccaggaagatcatcgtggaggagggccacacagtgccccagctggtgcacatcctgcacctgattgtgcagcacttcaaggtgtactaccctgtgcgccaccacctggtgcagcacatggtgtctgccatgcagaggctgggcttcaccccatctgtgaccatcgagcagaggcggctggccgtggacctgtctgaggtggtgatcaagtgggagctgcagaggatcaaggaccagcagcctgacagcgacatggaccccaacagcagtggagagggcgtgaacagcgtgagcagcagcatcaagaggggcctgtctgtggacagcgcccaggaggtgaagcgcttcagaacagccactggagccatctctgctgtgtttggccgcagccagagcctgcctggagctgacagcctgctggccaagcccatcgacaagcagcacacagacacagtggtgaacttcctgatccgggtggcctgccaggtgaatgacaacaccaacacagctggcagccctggagaggtgctgagccgccgctgtgtgaacctgctgaagacagccctgcggccagacatgtggcccaagtctgagctgaagctgcagtggtttgacaagctgctgatgacagtggagcagcccaaccaggtgaactacggcaacatctgcaccggcctggaggtgctgtccttcctgctgactgtgctgcagagccctgccatcctgagcagcttcaagcccctgcagaggggcattgctgcctgcatgacctgtggcaacaccaaggtgctgcgggctgtgcacagcctgctgagccggctgatgagcatcttccccacagagcccagcaccagctctgtggccagcaaatatgaggagctggagtgcctgtatgctgctgtgggcaaggtgatctatgagggcctgaccaactatgagaaggccaccaatgccaaccccagccagctgtttggcaccctgatgatcctgaagagcgcctgcagcaacaaccccagctacatcgacaggctcatctctgtgttcatgaggagcctgcagaagatggtgcgggagcacctgaacccccaggccgccagcggcagcacagaggccaccagcggcaccagcgagctggtgatgctgagcctggagctggtgaagacccggctggccgtgatgtccatggagatgaggaagaacttcatccaggccatcctgaccagcctgattgagaagagcccagatgccaagatcctgcgggctgtggtgaagatcgtggaggagtgggtgaagaacaacagccccatggccgccaaccagacccccaccctgcgggagaagagcatcctgctggtgaagatgatgacctacatcgagaagcgcttccctgaggacctggagctgaatgcccagttcctggacctggtgaactacgtgtacagagatgagaccctgagcggcagcgagctgacagccaagctggagcccgccttcctgagcggcctgcgctgtgcccagcccctcatccgggccaagttctttgaggtgtttgacaacagcatgaagagaagagtgtatgagcggctgctgtatgtgacctgcagccagaactgggaggccatgggcaaccacttctggatcaagcagtgcatcgagctgctgctggccgtgtgtgagaagagcacccccatcggcaccagctgccagggcgccatgctgcccagcatcaccaacgtcatcaacctggccgacagccatgaccgggccgcctttgccatggtgacccacgtgaagcaggagccccgggagcgggagaacagcgagagcaaggaggaggatgtggagattgatattgagctggcccctggggaccagaccagcacccccaagaccaaggagctgtctgagaaggacatcggcaaccagctgcacatgctgaccaacagacatgacaagttcctggacaccctgcgggaggtgaagacaggagccctgctgagcgcctttgtgcagctgtgccacatcagcaccaccctggccgagaagacctgggtgcagctgttcccccggctgtggaagatcctgagtgaccggcagcagcacgccctggccggggagatcagccccttcctgtgcagcggcagccaccaggtgcagagggactgccagcccagcgccctgaactgctttgtggaggccatgagccagtgtgtgccccccatccccatccggccctgtgtgctgaagtacctgggcaagacccacaacctgtggttccgcagcaccctgatgctggagcaccaggcctttgagaagggcctgagcctgcagatcaagcccaagcagaccacagagttctatgagcaggagagcatcaccccaccccagcaggagatcctggacagcctggccgagctgtacagcctgctgcaggaggaggacatgtgggccggcctgtggcagaagcgctgcaagtacagcgagacagccacagccatcgcctatgagcagcacggcttctttgagcaggcccaggagagctatgagaaggccatggacaaggccaagaaggagcacgagaggagcaatgccagccctgccatcttccctgagtaccagctgtgggaggaccactggatccgctgcagcaaggagctgaaccagtgggaggccctgacagaatatggccagagcaagggccacatcaacccctacctggtgctggagtgtgcctggagggtgagcaactggacagccatgaaggaggccctggtgcaggtggaggtgtcctgccccaaggagatggcctggaaggtgaacatgtaccggggctacctggccatctgccaccctgaggagcagcagctgtccttcatcgagcggctggtggagatggccagcagcctggccatccgggagtggaggcggctgccccacgtggtgagccacgtgcacacccccctgctgcaggccgcccagcagatcatcgagctgcaggaggccgcccagatcaatgccggcctgcagcccaccaacctgggcaggaacaacagcctgcatgacatgaagacagtggtgaagacctggaggaaccggctgcccatcgtgtctgatgacctgagccactggagcagcatcttcatgtggaggcagcaccactaccaggccatcgtgacagcctatgagaacagcagccagcacgaccccagcagcaacaatgccatgctgggcgtgcacgccagcgccagcgccatcatccagtatggcaagatcgccaggaagcagggcctggtgaatgtggccctggacatcctgagccgcatccacaccatccccaccgtgcccatcgtggactgcttccagaagatccggcagcaggtgaagtgctacctgcagctggccggcgtgatgggcaagaatgaatgcatgcagggcctggaggtgattgagagcaccaacctgaagtacttcaccaaggagatgacagctgagttctacgccctgaagggcatgttcctggcccagatcaacaagtctgaggaggccaacaaggccttctctgctgctgtgcagatgcatgatgtgctggtgaaggcctgggccatgtggggagactacctggagaacatctttgtgaaggagcggcagctgcacctgggcgtgtctgccatcacctgctacctgcacgcctgccgccaccagaatgaaagcaagagcaggaagtacctggccaaggtgctgtggctgctgagctttgatgatgacaagaacaccctggctgatgctgtggacaagtactgcattggagtgccccccatccagtggctggcctggatcccccagctgctgacctgcctggtgggcagcgagggcaagctgctgctgaacctgatcagccaggtgggccgggtgtacccccaggccgtgtacttccccatccgcaccctgtacctgaccctgaagattgagcagcgggagcgctacaagagtgaccccggccccatccgggccacagcccccatgtggcgctgcagccgcatcatgcacatgcagcgggagctgcaccccaccctgctgagcagcctggagggcatcgtggaccagatggtgtggttccgggagaactggcatgaggaggtgctgcggcagctgcagcagggcctggccaagtgctacagcgtggcctttgagaagagcggggctgtgtctgatgccaagatcaccccccacaccctgaactttgtgaagaagctggtgtccacctttggagtgggcctggagaatgtgtccaatgtgtccaccatgttcagcagcgctgccagcgagagcctggcccggcgggcccaggccacagcccaggaccccgtcttccagaagctgaagggccagttcaccacagactttgacttctctgtgcccggctccatgaagctgcacaacctgatcagcaagctgaagaagtggatcaagatcctggaggccaagaccaagcagctgcccaagttcttcctgattgaggagaagtgccgcttcctgagcaacttcagcgcccagacagctgaggtggagatccctggagagttcctgatgcccaagcccacccactactacatcaagatcgcccgcttcatgccccgggtggagatcgtgcagaagcacaacacagctgcccggcggctgtacatccggggccacaacgggaagatctacccctacctggtgatgaatgatgcctgcctgacagagagcagaagagaggagcgggtgctgcagctgctgcggctgctgaacccctgcctggagaagaggaaggagaccaccaagaggcacctgttcttcaccgtgccccgggtggtggccgtgagcccccagatgaggctggtggaggacaaccccagcagcctgagcctggtggagatctacaagcagagatgtgccaagaagggcattgaacatgacaaccccatcagccgctactatgaccggctggccaccgtgcaggcccggggcacccaggccagccaccaggtgctgcgggacatcctgaaggaggtgcagagcaacatggtgcccaggtccatgctgaaggagtgggccctgcacaccttccccaatgccacagactactggaccttcaggaagatgttcaccatccagctggccctgattggatttgctgagtttgtgctgcacctgaaccggctgaaccctgagatgctgcagatcgcccaggacaccgggaagctgaatgtggcctacttccgctttgacatcaatgatgccactggagacctggatgccaacagacctgtgcccttccggctgacccccaacatcagcgagttcctgaccaccatcggcgtgtctggccccctgacagcctccatgattgctgtggcccgctgctttgcccagcccaacttcaaggtggatggcatcctgaagacagtgctgagagatgagatcatcgcctggcacaagaagacccaggaggacaccagcagccccctgtctgctgctggccagcctgagaacatggacagccagcagctggtgtccctggtgcagaaggctgtgacagccatcatgacccggctgcacaacctggcccagtttgaaggaggagagagcaaggtgaacaccctggtggccgccgccaacagcctggacaacctgtgcaggatggaccctgcctggcacccctggctgtag

SEQ ID NO: 173693 - DNA, 11580 bp, synthetic construct
  misc_feature 1..11580: note = Description of Artificial Sequence: Synthetic coding sequence
  source 1..11580: mol_type = other DNA
atggcctttgtggccacccagggcgccaccgtggtggaccagaccaccctgatgaagaagtacctgcagtttgtggccgccctgacagatgtgaacaccccagatgagaccaagctgaagatgatgcaggaggtgtctgaaaattttgaaaatgtgaccagcagcccccagtacagcaccttcctggagcacatcatcccccgcttcctgaccttcctgcaggatggagaggtgcagttcctgcaggagaagccagcccagcagctgaggaagctggtgctggagatcatccaccgcatccccaccaatgagcacctgcggccccacaccaagaatgtgctgtctgtgatgttccgcttcctggagacagaaaatgaagaaaatgtgctgatctgcctgcgcatcatcatcgagctgcacaagcagttccggccccccatcacccaggagatccaccacttcctggactttgtgaagcagatctacaaggagctgcccaaggtggtgaaccgctactttgagaacccccaggtgatcccagaaaatacagtgcccccacctgagatggtgggcatgatcaccaccatcgctgtgaaggtgaaccctgagagagaagattctgagaccaggacccacagcatcatcccccggggcagcctgagcctgaaggtgctggccgagctgcccatcatcgtggtgctgatgtaccagctgtacaagctgaacatccacaacgtggtggccgagtttgtgcccctcatcatgaacaccatcgccatccaggtgtctgcccaggcccggcagcacaagctgtacaacaaggagctgtatgctgacttcatcgccgcccagatcaagaccctgtccttcctggcctacatcatccgcatctaccaggagctggtgaccaagtacagccagcagatggtgaagggcatgctgcagctgctgagcaactgcccagctgagacagcccacctgaggaaggagctgctgattgctgccaagcacatcctgaccacagagctgaggaaccagttcatcccctgcatggacaagctgtttgatgagagcatcctgattggcagcggctacacagcccgggagaccctgcggcccctggcctacagcaccctggccgacctggtgcaccacgtgcggcagcacctgcccctgagtgacctgagcctggccgtgcagctgtttgccaagaacattgatgatgagagcctgcccagcagcatccagaccatgagctgcaagctgctgctgaacctggtggactgcatccgcagcaagtctgagcaggagagcggaaatggaagagatgtgctgatgaggatgctggaggtgtttgtgctgaagttccacaccatcgcccgctaccagctgagcgccatcttcaagaagtgcaagccccagagcgagctgggcgctgtggaggccgccctgcccggggtgcccacagccccagctgcccctggccctgcccccagccctgcccctgtgcctgcccctcctcctcctcctcctcctcctcctccagccacccctgtgaccccagcccctgtgcccccatttgagaagcagggcgagaaggacaaggaggacaagcagaccttccaggtgacagactgccgcagcctggtgaagaccctggtgtgtggggtgaagaccatcacctggggcatcaccagctgcaaggcccctggagaggcccagttcatccccaacaagcagctgcagcccaaggagacccagatctacatcaagctggtgaagtatgccatgcaggccctggacatctaccaggtgcagattgctggaaatggccagacctacatccgggtggccaactgccagacagtgaggatgaaggaggagaaggaggtgctggagcactttgctggggtcttcaccatgatgaaccccctgaccttcaaggagatcttccagaccaccgtgccctacatggtggagcgcatcagcaagaactatgccctgcagatcgtggccaacagcttcctggccaaccccaccaccagcgccctgtttgccaccatcctggtggagtacctgctggaccggctgcctgagatgggcagcaatgtggagctgagcaacctgtacctgaagctgttcaagctggtgtttggatctgtgtccctgtttgctgctgaaaatgagcagatgctgaagccccacctgcacaagatcgtgaacagctccatggagctggcccagacagccaaggagccctacaactacttcctgctgctgcgggccctcttccgcagcattggaggcggcagccatgacctgctgtaccaggagttcctgcccctgctgcccaacctgctgcagggcctgaacatgctgcagagcggcctgcacaagcagcacatgaaggacctgtttgtggagctgtgcctgactgtgcctgtgcggctgagcagcctgctgccctacctgcccatgctgatggaccccctggtgtctgccctgaatggcagccagaccctggtgtcccagggcctgcggaccctggagctgtgtgtggacaacctgcagcctgacttcctgtatgaccacatccagcctgtgcgggcagagctgatgcaggccctgtggaggaccctgagaaatcctgctgacagcatcagccacgtggcctacagagtgctgggcaagtttggaggcagcaacaggaagatgctgaaggagagccagaagctgcactacgtggtgacagaggtgcagggccccagcatcaccgtggagttcagtgactgcaaggccagcctgcagctgcccatggagaaggccattgaaacagccctggactgcctgaagagcgccaacacagagccctactaccgccggcaggcctgggaggtgatcaagtgcttcctggtggccatgatgagcctggaggacaacaagcacgccctgtaccagctgctggcccaccccaacttcacagagaagaccatccccaacgtcatcatcagccaccgctacaaggcccaggacaccccagccaggaagacctttgagcaggccctgactggagccttcatgtctgctgtgatcaaggacctgcggcccagcgccctgccctttgtggccagcctcatccgccactacaccatggtggccgtggcccagcagtgtggccccttcctgctgccctgctaccaggtgggcagccagcccagcacagccatgttccacagtgaagaaaatggcagcaagggcatggaccccctggtgctgattgatgccatcgccatctgcatggcctatgaggagaaggagctgtgcaagatcggggaggtggccctggccgtcatctttgatgtggccagcatcatcctgggcagcaaggagcgggcctgccagctgcccctcttctcctacatcgtggagcggctgtgtgcctgctgctatgagcaggcctggtacgccaagctgggcggcgtggtgtccatcaagttcctgatggagcggctgcccctgacctgggtgctgcagaaccagcagaccttcctgaaggccctgctgtttgtgatgatggacctgactggagaggtgtccaatggagctgtggccatggccaagaccaccctggagcagctgctgatgagatgtgccacccccctgaaggatgaggagagagctgaggagatcgtggccgcccaggagaagagcttccaccacgtgacccatgacctggtgcgggaggtgaccagccccaacagcacagtgaggaagcaggccatgcacagcctgcaggtgctggcccaggtgacaggcaagtctgtgaccgtcatcatggagccccacaaggaggtgctgcaggacatggtgccccccaagaagcacctgctgcggcaccagcctgccaatgcccagatcggcctgatggagggcaacaccttctgcaccaccctgcagcccaggctcttcaccatggacctgaatgtggtggagcacaaggtgttctacacagagctgctgaacctgtgtgaggccgaggacagcgccctgaccaagctgccctgctacaagagcctgcccagcctggtgcccctgagaattgctgccctgaatgccctggccgcctgcaactacctgccccagagccgggagaagatcatcgccgccctcttcaaggccctgaacagcaccaacagcgagctgcaggaggccggggaggcctgcatgaggaagttcctggagggcgccaccatcgaggtggaccagatccacacccacatgaggcccctgctgatgatgctgggggactaccgcagcctgaccctgaatgtggtgaaccggctgacctctgtgaccaggctcttccccaacagcttcaatgacaagttctgtgaccagatgatgcagcacctgaggaagtggatggaggtggtggtgatcacccacaagggcggccagaggagtgatggaaatgaaagcatcagtgaatgtggccgctgccccctgagccccttctgccagtttgaggagatgaagatctgcagcgccatcatcaacctcttccacctgatcccagctgccccccagaccctggtgaagcccctgctggaggtggtgatgaagacagagcgggccatgctgattgaggccggcagccccttccgggagcccctcatcaagttcctgaccaggcaccccagccagacagtggagctgttcatgatggaggccaccctgaatgacccccagtggagcaggatgttcatgtccttcctgaagcacaaggatgcccggcccctgagagatgtgctggccgccaaccccaaccgcttcatcaccctgctgctgcctggaggagcccagacagctgtgcggcccggcagccccagcaccagcaccatgaggctggacctgcagttccaggccatcaagatcatcagcatcatcgtgaagaatgatgacagctggctggccagccagcacagcctggtgtcccagctgcggcgggtgtgggtgtctgagaacttccaggagcggcacaggaaagaaaacatggccgccaccaactggaaggagcccaagctgctggcctactgcctgctgaactactgcaagaggaactacggggacatcgagctgctcttccagctgctgcgggccttcaccggccgcttcctgtgcaacatgaccttcctgaaggagtacatggaggaggagatccccaagaactacagcatcgcccagaagagggccctcttcttccgctttgtggacttcaatgaccccaactttggagatgagctgaaggccaaggtgctgcagcacatcctgaacccagccttcctgtacagctttgagaagggggagggggagcagctgctgggcccccccaaccctgagggggacaaccctgagagcatcacctctgtgttcatcaccaaggtgctggaccctgagaagcaggccgacatgctggacagcctgcgcatctacctgctgcagtatgccaccctgctggtggagcacgccccccaccacatccatgacaacaacaagaacagaaacagcaagctgcggcggctgatgacctttgcctggccctgcctgctgagcaaggcctgtgtggaccctgcctgcaagtacagcggccacctgctgctggcccacatcatcgccaagtttgccatccacaagaagatcgtgctgcaggtgttccacagcctgctgaaggcccacgccatggaggcccgggccatcgtgcggcaggccatggccatcctgaccccagctgtgcctgccaggatggaggatggccaccagatgctgacccactggaccaggaagatcatcgtggaggagggccacacagtgccccagctggtgcacatcctgcacctgattgtgcagcacttcaaggtgtactaccctgtgcgccaccacctggtgcagcacatggtgtctgccatgcagaggctgggcttcaccccatctgtgaccatcgagcagaggcggctggccgtggacctgtctgaggtggtgatcaagtgggagctgcagaggatcaaggaccagcagcctgacagcgacatggaccccaacagcagtggagagggcgtgaacagcgtgagcagcagcatcaagaggggcctgtctgtggacagcgcccaggaggtgaagcgcttcagaacagccactggagccatctctgctgtgtttggccgcagccagagcctgcctggagctgacagcctgctggccaagcccatcgacaagcagcacacagacacagtggtgaacttcctgatccgggtggcctgccaggtgaatgacaacaccaacacagctggcagccctggagaggtgctgagccgccgctgtgtgaacctgctgaagacagccctgcggccagacatgtggcccaagtctgagctgaagctgcagtggtttgacaagctgctgatgacagtggagcagcccaaccaggtgaactacggcaacatctgcaccggcctggaggtgctgtccttcctgctgactgtgctgcagagccctgccatcctgagcagcttcaagcccctgcagaggggcattgctgcctgcatgacctgtggcaacaccaaggtgctgcgggctgtgcacagcctgctgagccggctgatgagcatcttccccacagagcccagcaccagctctgtggccagcaaatatgaggagctggagtgcctgtatgctgctgtgggcaaggtgatctatgagggcctgaccaactatgagaaggccaccaatgccaaccccagccagctgtttggcaccctgatgatcctgaagagcgcctgcagcaacaaccccagctacatcgacaggctcatctctgtgttcatgaggagcctgcagaagatggtgcgggagcacctgaacccccaggccgccagcggcagcacagaggccaccagcggcaccagcgagctggtgatgctgagcctggagctggtgaagacccggctggccgtgatgtccatggagatgaggaagaacttcatccaggccatcctgaccagcctgattgagaagagcccagatgccaagatcctgcgggctgtggtgaagatcgtggaggagtgggtgaagaacaacagccccatggccgccaaccagacccccaccctgcgggagaagagcatcctgctggtgaagatgatgacctacatcgagaagcgcttccctgaggacctggagctgaatgcccagttcctggacctggtgaactacgtgtacagagatgagaccctgagcggcagcgagctgacagccaagctggagcccgccttcctgagcggcctgcgctgtgcccagcccctcatccgggccaagttctttgaggtgtttgacaacagcatgaagagaagagtgtatgagcggctgctgtatgtgacctgcagccagaactgggaggccatgggcaaccacttctggatcaagcagtgcatcgagctgctgctggccgtgtgtgagaagagcacccccatcggcaccagctgccagggcgccatgctgcccagcatcaccaacgtcatcaacctggccgacagccatgaccgggccgcctttgccatggtgacccacgtgaagcaggagccccgggagcgggagaacagcgagagcaaggaggaggatgtggagattgatattgagctggcccctggggaccagaccagcacccccaagaccaaggagctgtctgagaaggacatcggcaaccagctgcacatgctgaccaacagacatgacaagttcctggacaccctgcgggaggtgaagacaggagccctgctgagcgcctttgtgcagctgtgccacatcagcaccaccctggccgagaagacctgggtgcagctgttcccccggctgtggaagatcctgagtgaccggcagcagcacgccctggccggggagatcagccccttcctgtgcagcggcagccaccaggtgcagagggactgccagcccagcgccctgaactgctttgtggaggccatgagccagtgtgtgccccccatccccatccggccctgtgtgctgaagtacctgggcaagacccacaacctgtggttccgcagcaccctgatgctggagcaccaggcctttgagaagggcctgagcctgcagatcaagcccaagcagaccacagagttctatgagcaggagagcatcaccccaccccagcaggagatcctggacagcctggccgagctgtacagcctgctgcaggaggaggacatgtgggccggcctgtggcagaagcgctgcaagtacagcgagacagccacagccatcgcctatgagcagcacggcttctttgagcaggcccaggagagctatgagaaggccatggacaaggccaagaaggagcacgagaggagcaatgccagccctgccatcttccctgagtaccagctgtgggaggaccactggatccgctgcagcaaggagctgaaccagtgggaggccctgacagaatatggccagagcaagggccacatcaacccctacctggtgctggagtgtgcctggagggtgagcaactggacagccatgaaggaggccctggtgcaggtggaggtgtcctgccccaaggagatggcctggaaggtgaacatgtaccggggctacctggccatctgccaccctgaggagcagcagctgtccttcatcgagcggctggtggagatggccagcagcctggccatccgggagtggaggcggctgccccacgtggtgagccacgtgcacacccccctgctgcaggccgcccagcagatcatcgagctgcaggaggccgcccagatcaatgccggcctgcagcccaccaacctgggcaggaacaacagcctgcatgacatgaagacagtggtgaagacctggaggaaccggctgcccatcgtgtctgatgacctgagccactggagcagcatcttcatgtggaggcagcaccactaccagggcaagcccacctggagcggcatgcacagcagcagcatcgtgacagcctatgagaacagcagccagcacgaccccagcagcaacaatgccatgctgggcgtgcacgccagcgccagcgccatcatccagtatggcaagatcgccaggaagcagggcctggtgaatgtggccctggacatcctgagccgcatccacaccatccccaccgtgcccatcgtggactgcttccagaagatccggcagcaggtgaagtgctacctgcagctggccggcgtgatgggcaagaatgaatgcatgcagggcctggaggtgattgagagcaccaacctgaagtacttcaccaaggagatgacagctgagttctacgccctgaagggcatgttcctggcccagatcaacaagtctgaggaggccaacaaggccttctctgctgctgtgcagatgcatgatgtgctggtgaaggcctgggccatgtggggagactacctggagaacatctttgtgaaggagcggcagctgcacctgggcgtgtctgccatcacctgctacctgcacgcctgccgccaccagaatgaaagcaagagcaggaagtacctggccaaggtgctgtggctgctgagctttgatgatgacaagaacaccctggctgatgctgtggacaagtactgcatcggcgtgccccccatccagtggctggcctggatcccccagctgctgacctgcctggtgggcagcgagggcaagctgctgctgaacctgatcagccaggtgggccgggtgtacccccaggccgtgtacttccccatccgcaccctgtacctgaccctgaagattgagcagcgggagcgctacaagagtgaccccggccccatccgggccacagcccccatgtggcgctgcagccgcatcatgcacatgcagcgggagctgcaccccaccctgctgagcagcctggagggcatcgtggaccagatggtgtggttccgggagaactggcatgaggaggtgctgcggcagctgcagcagggcctggccaagtgctacagcgtggcctttgagaagtctggagctgtgtctgatgccaagatcaccccccacaccctgaactttgtgaagaagctggtgtccaccttcggcgtgggcctggagaatgtgtccaatgtgtccaccatgttcagcagcgctgccagcgagagcctggcccggcgggcccaggccacagcccaggaccctgtgttccagaagctgaagggccagttcaccacagactttgacttctctgtgcccggctccatgaagctgcacaacctgatcagcaagctgaagaagtggatcaagatcctggaggccaagaccaagcagctgcccaagttcttcctgattgaggagaagtgccgcttcctgagcaacttcagcgcccagacagctgaggtggagatccctggagagttcctgatgcccaagcccacccactactacatcaagatcgcccgcttcatgccccgggtggagatcgtgcagaagcacaacacagctgcccggcggctgtacatccggggccacaacgggaagatctacccctacctggtgatgaatgatgcctgcctgacagagagccggcgggaggagcgggtgctgcagctgctgcggctgctgaacccctgcctggagaagaggaaggagaccaccaagaggcacctgttcttcaccgtgccccgggtggtggccgtgagcccccagatgaggctggtggaggacaaccccagcagcctgagcctggtggagatctacaagcagagatgtgccaagaagggcatcgagcatgacaaccccatcagccgctactatgaccggctggccaccgtgcaggcccggggcacccaggccagccaccaggtgctgcgggacatcctgaaggaggtgcagagcaacatggtgcccaggtccatgctgaaggagtgggccctgcacaccttccccaatgccacagactactggaccttcaggaagatgttcaccatccagctggccctgattggatttgctgagtttgtgctgcacctgaaccggctgaaccctgagatgctgcagatcgcccaggacaccgggaagctgaatgtggcctacttccgctttgacatcaatgatgccaccggggacctggatgccaacagacctgtgcccttccggctgacccccaacatcagcgagttcctgaccaccatcggcgtgtctggccccctgacagcctccatgattgctgtggcccgctgctttgcccagcccaacttcaaggtggatggcatcctgaagacagtgctgagagatgagatcatcgcctggcacaagaagacccaggaggacaccagcagccccctgtctgctgctggccagcctgagaacatggacagccagcagctggtgtccctggtgcagaaggctgtgacagccatcatgacccggctgcacaacctggcccagtttgagggcggggagagcaaggtgaacaccctggtggccgccgccaacagcctggacaacctgtgcaggatggaccctgcctggcacccctggctgtag

SEQ ID NO: 173694 - DNA, 216 bp, synthetic construct
  misc_feature 1..216: note = Description of Artificial Sequence: Synthetic coding sequence
  source 1..216: mol_type = other DNA
atggcctttgtggccacccagggcgccaccgtggtggaccagaccaccctgatgaagaagtacctgcagtttgtggccgccctgacagatgtgaacaccccagatgagaccaagctgaagatgatgcaggaggtgtctgaaaattttgaaaatgtgaccagcagcccccagtacagcaccttcctggagcacatcatcccccgcttcctgacctag

SEQ ID NO: 173695 - DNA, 117 bp, synthetic construct
  misc_feature 1..117: note = Description of Artificial Sequence: Synthetic coding sequence
  source 1..117: mol_type = other DNA
atgtctgacagcggggagcagaactatggagagcgggtgaatgtggaggagggcaaatgtggcagccgccacctgaccagcttcatcaatgagtacctgaagctgaggaacaagtag

SEQ ID NO: 173696 - DNA, 567 bp, synthetic construct
  misc_feature 1..567: note = Description of Artificial Sequence: Synthetic coding sequence
  source 1..567: mol_type = other DNA
atgagcaccaggagaagacatgtgggcaacagagccaacccagaccccaactgctgcctgggcgtgtttggcctgagcctgtacaccacagagcgggacctgcgggaggtgttcagcaaatatggccccatcgcagatgtgtccatcgtgtatgaccagcagagccgccgcagccggggctttgcctttgtgtactttgaaaatgtggatgatgccaaggaggccaaggagcgggccaacggcatggagctggatggaagacgcatccgggtggacttcagcatcaccaagaggccccacacccccaccccaggcatctacatgggccggcccacctacggcagcagcagaagaagagactactatgaccggggctatgaccggggctatgatgaccgggactactacagccgcagctaccggggcggcggcggcggcggcggcggctggagggctgcccaggaccgggaccagatctacagaagaagaagccccagcccctactacagccggggcggctaccgcagccgcagccgcagccgcagctacagcccccggcgctactag

SEQ ID NO: 173697 - DNA, 867 bp, synthetic construct
  misc_feature 1..867: note = Description of Artificial Sequence: Synthetic coding sequence
  source 1..867: mol_type = other DNA
atgtctgacagcggggagcagaactatggagagcgggagagccgcagcgccagccgcagcggcagcgcccacggcagcggcaagagcgcccggcacaccccagcccggagccgcagcaaagaagacagccgccgcagccgcagcaagagccgcagccgctctgagagccgcagccgcagcagaagaagcagcagaagacactacaccaggagccgcagccgcagccgcagccacagaagaagccgcagccgcagctacagccgggactacagaagaagacacagccacagccacagccccatgagcaccaggagaagacatgtgggcaacagagccaacccagaccccaactgctgcctgggcgtgtttggcctgagcctgtacaccacagagcgggacctgcgggaggtgttcagcaaatatggccccatcgcagatgtgtccatcgtgtatgaccagcagagccgccgcagccggggctttgcctttgtgtactttgaaaatgtggatgatgccaaggaggccaaggagcgggccaacggcatggagctggatggaagacgcatccgggtggacttcagcatcaccaagaggccccacacccccaccccaggcatctacatgggccggcccacctacggcagcagcagaagaagagactactatgaccggggctatgaccggggctatgatgaccgggactactacagccgcagctaccggggcggcggcggcggcggcggcggctggagggctgcccaggaccgggaccagatctacagaagaagaagccccagcccctactacagccggggcggctaccgcagccgcagccgcagccgcagctacagcccccggcgctactag

SEQ ID NO: 173698 - DNA, 483 bp, synthetic construct
  misc_feature 1..483: note = Description of Artificial Sequence: Synthetic coding sequence
  source 1..483: mol_type = other DNA
atggtgcccagcgctggccagctggccctgtttgccctgggcatcgtgctggccgcctgccaggccctggagaacagcaccagccccctgtctgctgacccccctgtggccgctgctgtggtgagccacttcaatgactgcccagacagccacacccagttctgcttccacggcacctgccgcttcctggtgcaggaggacaagccagcctgtgtgtgccacagcggctacgtgggcgcccgctgtgagcacgccgacctgctggccgtggtggccgccagccagaagaagcaggccatcacagccctggtggtggtgtccatcgtggccctggccgtgctgatcatcacctgtgtgctgatccactgctgccaggtgaggaagcactgtgagtggtgccgggccctgatctgcagacatgagaagcccagcgccctgctgaagggccgcacagcctgctgccacagcgagaccgtggtgtag

SEQ ID NO: 173699 - DNA, 480 bp, synthetic construct
  misc_feature 1..480: note = Description of Artificial Sequence: Synthetic coding sequence
  source 1..480: mol_type = other DNA
atggtgcccagcgctggccagctggccctgtttgccctgggcatcgtgctggccgcctgccaggccctggagaacagcaccagccccctgagtgacccccctgtggccgctgctgtggtgagccacttcaatgactgcccagacagccacacccagttctgcttccacggcacctgccgcttcctggtgcaggaggacaagccagcctgtgtgtgccacagcggctacgtgggcgcccgctgtgaacatgctgacctgctggccgtggtggccgccagccagaagaagcaggccatcacagccctggtggtggtgtccatcgtggccctggccgtgctgatcatcacctgtgtgctgatccactgctgccaggtgaggaagcactgtgagtggtgccgggccctgatctgcagacatgagaagcccagcgccctgctgaagggccgcacagcctgctgccacagcgagaccgtggtgtag

SEQ ID NO: 173700 - DNA, 2583 bp, synthetic construct
  misc_feature 1..2583: note = Description of Artificial Sequence: Synthetic coding sequence
  source 1..2583: mol_type = other DNA
atgatgagcatcaaggccttcaccctggtgtctgctgtggagcgggagctgctgatgggagacaaggagcgggtgaacattgaatgtgtggagtgctgcggccgggacctgtatgtgggcaccaatgactgctttgtgtaccacttcctgctggaggagaggcctgtgcctgctggccctgccaccttcaccgccaccaagcagctgcagaggcacctgggcttcaagaagcctgtgaatgagctgcgggccgccagcgccctgaaccggctgctggtgctgtgtgacaacagcatcagcctggtgaacatgctgaacctggagcctgtgcccagcggggcccgcatcaagggagctgccacctttgccctgaatgaaaatcctgtgtctggggaccccttctgtgtggaggtgtgcatcatctctgtgaagaggaggaccatccagatgttcctggtgtatgaagatagagtgcagatcgtgaaggaggtgtccacagctgagcagcccctggccgtggccgtggatggccacttcctgtgcctggccctgaccacccagtacatcatccacaactacagcactggagtgtcccaggacctcttcccctactgcagcgaggagcggccccccatcgtgaagagaattggccggcaggagttcctgctggccggccctgggggcctgggcatgtttgccaccgtggccggcatcagccagagggcccctgtgcactggagcgaaaatgtgattggagctgctgtgtccttcccctacgtgattgccctggatgatgagttcatcaccgtgcacagcatgctggaccagcagcagaagcagaccctgcccttcaaggagggccacatcctgcaggactttgagggccgggtcatcgtggccaccagcaaaggagtgtacatcctggtgcccctgcccctggagaagcagatccaggacctgctggccagccggcgggtggaggaggccctggtgctggccaagggggcccggaggaacatccccaaggagaagttccaggtgatgtaccgccgcatcctgcagcaggccggcttcatccagtttgcccagctgcagttcctggaggccaaggagctgttccgcagcggccagctggatgtgcgggagctgatcagcctgtaccccttcctgctgcccaccagcagcagcttcaccaggagccacccccccctgcatgaatatgctgacctgaaccagctgacccagggcgaccaggagaagatggccaagtgcaagcgcttcctgatgagctacctgaatgaggtgcgcagcacagaggtggccaacggctacaaggaggacatcgacacagccctgctgaagctgtatgcagaggccgaccatgacagcctgctggacctgctggtgacagagaacttctgcctgctgacagattctgctgcctggctggagaagcacaagaagtactttgccctgggcctgctgtaccactacaacaaccaggatgctgctgctgtgcagctgtgggtgaacatcgtgaatggagatgtgcaggacagcaccaggagtgacctgtatgagtacatcgtggacttcctgacctactgcctggatgaggagctggtgtgggcctatgctgactgggtgctgcagaagtctgaggaggtgggcgtgcaggtgttcaccaagaggcccctggatgagcagcagaagaacagcttcaacccagatgacatcatcaactgcctgaagaagtaccccaaggccctggtgaagtacctggagcacctggtgattgacaagaggctgcagaaggaggagtaccacacccacctggccgtgctgtacctggaggaggtgctgctgcagagggccagcgccagcgggaaaggagctgaggccacagagacccaggccaagctgcggcggctgctgcagaagagtgacctgtacagagtgcacttcctgctggagcggctgcagggcgccggcctgcccatggagagcgccatcctgcacggcaagctgggggagcacgagaaggccctgcacatcctggtgcatgagctgcaggactttgctgctgctgaggactactgcctgtggtgcagcgagggccgggaccccccccaccggcagcagctgttccacaccctgctggccatctacctgcacgccggccccacagcccacgagctggccgtggccgctgtggacctgctgaacagacatgccacagaatttgatgctgcccaggtgctgcagatgctgcctgacacctggagcgtgcagctgctgtgccccttcctgatgggcgccatgagggacagcatccacgcccggaggaccatgcaggtggccctgggcctggcccggtctgagaacctgatctacacctatgacaagatgaagctgaagggcagcagcatccagctgagtgacaagaagctgtgccagatctgccagaaccccttctgtgagcctgtgtttgtgcgctacccaaatggaggcctggtgcacacccactgtgccgccagccgccacaccaaccccagcagcagcagccctggcaccaggacatag

SEQ ID NO: 173701 - DNA, 2583 bp, synthetic construct; identical to SEQ ID NO: 173700
  misc_feature 1..2583: note = Description of Artificial Sequence: Synthetic coding sequence
  source 1..2583: mol_type = other DNA

SEQ ID NO: 173702 - DNA, 948 bp, synthetic construct
  misc_feature 1..948: note = Description of Artificial Sequence: Synthetic coding sequence
  source 1..948: mol_type = other DNA
atgctgattggcagctgcaggaaggtgaagaggtctgtgcaggtgttcaccaagaggcccctggatgagcagcagaagaacagcttcaacccagatgacatcatcaactgcctgaagaagtaccccaaggccctggtgaagtacctggagcacctggtgattgacaagaggctgcagaaggaggagtaccacacccacctggccgtgctgtacctggaggaggtgctgctgcagagggccagcgccagcgggaaaggagctgaggccacagagacccaggccaagctgcggcggctgctgcagaagagtgacctgtacagagtgcacttcctgctggagcggctgcagggcgccggcctgcccatggagagcgccatcctgcacggcaagctgggggagcacgagaaggccctgcacatcctggtgcatgagctgcaggactttgctgctgctgaggactactgcctgtggtgcagcgagggccgggaccccccccaccggcagcagctgttccacaccctgctggccatctacctgcatgctggccccacagcccacgagctggccgtggccgctgtggacctgctgaacagacatgccacagaatttgatgctgcccaggtgctgcagatgctgcctgacacctggagcgtgcagctgctgtgccccttcctgatgggcgccatgagggacagcatccacgcccggaggaccatgcaggtggccctgggcctggcccggagtgaaaatctcatctacacctatgacaagatgaagctgaagggcagcagcatccagctgagtgacaagaagctgtgccagatctgccagaaccccttctgtgagcctgtgtttgtgcgctaccccaacggcggcctggtgcacacccactgtgccgccagccgccacaccaaccccagcagcagcagccctggcaccaggacatag

SEQ ID NO: 173703 - DNA, 1704 bp, synthetic construct
  misc_feature 1..1704: note = Description of Artificial Sequence: Synthetic coding sequence
  source 1..1704: mol_type = other DNA
atgggccggggcctgctgcggggcctgtggcccctgcacatcgtgctgtggacccgcatcgccagcaccatcccccctcatgtgcagaagtctgtgaacaatgacatgattgtgacagacaacaacggggctgtgaagttcccccagctgtgcaagttctgtgatgtgcgcttcagcacctgtgacaaccagaagagctgcatgagcaactgcagcatcaccagcatctgtgagaagccccaggaggtgtgtgtggccgtgtggaggaagaatgatgagaacatcaccctggagaccgtgtgccacgaccccaagctgccctaccatgacttcatcctggaggatgctgccagccccaagtgcatcatgaaggagaagaagaagccaggagagaccttcttcatgtgcagctgcagcagtgatgagtgcaatgacaacatcatcttcagcgaggagtacaacaccagcaacccagacctgctgctggtgatcttccaggtgacaggcatcagcctgctgccccccctgggcgtggccatcagcgtcatcatcatcttctactgctacagagtgaaccggcagcagaagctgagcagcacctgggagaccgggaagaccaggaagctgatggagttcagcgagcactgtgccatcatcctggaggatgacagaagtgacatcagcagcacctgtgccaacaacatcaaccacaacacagagctgctgcccatcgagctggacaccctggtgggcaagggccgctttgctgaggtgtacaaggccaagctgaagcagaacaccagcgagcagtttgaaacagtggccgtgaagatcttcccctatgaggagtatgcctcctggaagacagagaaggacatcttcagtgacatcaacctgaagcatgagaacatcctgcagttcctgacagctgaggagaggaagacagagctgggcaagcagtactggctgatcacagccttccacgccaagggcaacctgcaggagtacctgaccaggcatgtgatctcctgggaggacctgaggaagctgggcagcagcctggcccggggcatcgcccacctgcacagcgaccacaccccctgtggccggcccaagatgcccatcgtgcaccgggacctgaagagcagcaacatcctggtgaagaatgacctgacctgctgcctgtgtgactttggcctgagcctgcggctggaccccaccctgtctgtggatgacctggccaacagcggccaggtgggcacagcccgctacatggcccctgaggtgctggagagcaggatgaacctggagaatgtggagagcttcaagcagacagatgtgtacagcatggccctggtgctgtgggagatgaccagccgctgcaatgctgtgggggaggtgaaggactatgagccccccttcggcagcaaggtgcgggagcacccctgtgtggagagcatgaaggacaacgtgctgcgggaccggggccggcctgagatccccagcttctggctgaaccaccagggcatccagatggtgtgtgagaccctgacagagtgctgggaccatgaccctgaggcccggctgacagcccagtgtgtggccgagcgcttcagcgagctggagcacctggaccggctgagcggccgcagctgcagcgaggagaagatcccagaagatggcagcctgaacaccaccaagtag

SEQ ID NO: 173704 - DNA, 1779 bp, synthetic construct
  misc_feature 1..1779: note = Description of Artificial Sequence: Synthetic coding sequence
  source 1..1779: mol_type = other DNA
atgggccggggcctgctgcggggcctgtggcccctgcacatcgtgctgtggacccgcatcgccagcaccatcccccctcatgtgcagaagagtgatgtggagatggaggcccagaaggatgagatcatctgccccagctgcaacagaacagcccaccccctgcggcacatcaacaatgacatgattgtgacagacaacaatggagctgtgaagttcccccagctgtgcaagttctgtgatgtgcgcttcagcacctgtgacaaccagaagagctgcatgagcaactgcagcatcaccagcatctgtgagaagccccaggaggtgtgtgtggccgtgtggaggaagaatgatgagaacatcaccctggagaccgtgtgccacgaccccaagctgccctaccatgacttcatcctggaggatgctgccagccccaagtgcatcatgaaggagaagaagaagccaggagagaccttcttcatgtgcagctgcagcagtgatgaatgtaatgacaacatcatcttcagcgaggagtacaacaccagcaacccagacctgctgctggtgatcttccaggtgacaggcatcagcctgctgccccccctgggcgtggccatcagcgtcatcatcatcttctactgctacagagtgaaccggcagcagaagctgagcagcacctgggagaccgggaagaccaggaagctgatggagttcagcgagcactgtgccatcatcctggaggatgacagaagtgacatcagcagcacctgtgccaacaacatcaaccacaacacagagctgctgcccatcgagctggacaccctggtgggcaagggccgctttgctgaggtgtacaaggccaagctgaagcagaacaccagcgagcagtttgagaccgtggccgtgaagatcttcccctatgaggagtatgcctcctggaagacagagaaggacatcttcagtgacatcaacctgaagcatgagaacatcctgcagttcctgacagctgaggagaggaagacagagctgggcaagcagtactggctgatcacagccttccacgccaagggcaacctgcaggagtacctgaccaggcatgtgatctcctgggaggacctgaggaagctgggcagcagcctggcccggggcatcgcccacctgcacagcgaccacaccccctgtggccggcccaagatgcccatcgtgcaccgggacctgaagagcagcaacatcctggtgaagaatgacctgacctgctgcctgtgtgactttggcctgagcctgcggctggaccccaccctgtctgtggatgacctggccaacagcggccaggtgggcacagcccgctacatggcccctgaggtgctggagagcaggatgaacctggagaatgtggagagcttcaagcagacagatgtgtacagcatggccctggtgctgtgggagatgaccagccgctgcaatgctgtgggggaggtgaaggactatgagcccccatttggcagcaaggtgcgggagcacccctgtgtggagagcatgaaggacaacgtgctgcgggaccggggccggcctgagatccccagcttctggctgaaccaccagggcatccagatggtgtgtgagaccctgacagagtgctgggaccatgaccctgaggcccggctgacagcccagtgtgtggccgagcgcttcagcgagctggagcacctggaccggctgagcggccgcagctgcagcgaggagaagatcccagaagatggcagcctgaacaccaccaagtag

SEQ ID NO: 173705 - DNA, 339 bp, synthetic construct
  misc_feature 1..339: note = Description of Artificial Sequence: Synthetic coding sequence
  source 1..339: mol_type = other DNA
atgtgcagctgcagcagtgatgagtgcaatgacaacatcatcttcagcgagggccgctgcaagatccgccacatcggcagcaacaaccggctgcagaggagcacctgccagaacacaggctgggagagcgcccacgtgatgaagaccccaggcttccgggagtacaacaccagcaacccagacctgctgctggtgatcttccaggtgacaggcatcagcctgctgccccccctgggcgtggccatcagcgtcatcatcatcttctactgctacagagtgaaccggcagcagaagctgagcagcacctgggagaccgggaagaccaggaagctgatgtag

SEQ ID NO: 173706 - DNA, 1194 bp, synthetic construct
  misc_feature 1..1194: note = Description of Artificial Sequence: Synthetic coding sequence
  source 1..1194: mol_type = other DNA
atgtgcagctgcagcagtgatgagtgcaatgacaacatcatcttcagcgaggagtacaacaccagcaacccagacctgctgctggtgatcttccaggtgacaggcatcagcctgctgccccccctgggcgtggccatcagcgtcatcatcatcttctactgctacagagtgaaccggcagcagaagctgagcagcacctgggagaccgggaagaccaggaagctgatggagttcagcgagcactgtgccatcatcctggaggatgacagaagtgacatcagcagcacctgtgccaacaacatcaaccacaacacagagctgctgcccatcgagctggacaccctggtgggcaagggccgctttgctgaggtgtacaaggccaagctgaagcatgagaacatcctgcagttcctgacagctgaggagaggaagacagagctgggcaagcagtactggctgatcacagccttccacgccaagggcaacctgcaggagtacctgaccaggcatgtgatctcctgggaggacctgaggaagctgggcagcagcctggcccggggcatcgcccacctgcacagcgaccacaccccctgtggccggcccaagatgcccatcgtgcaccgggacctgaagagcagcaacatcctggtgaagaatgacctgacctgctgcctgtgtgactttggcctgagcctgcggctggaccccaccctgtctgtggatgacctggccaacagcggccaggtgggcacagcccgctacatggcccctgaggtgctggagagcaggatgaacctggagaatgtggagagcttcaagcagacagatgtgtacagcatggccctggtgctgtgggagatgaccagccgctgcaatgctgtgggggaggtgaaggactatgagccccccttcggcagcaaggtgcgggagcacccctgtgtggagagcatgaaggacaacgtgctgcgggaccggggccggcctgagatccccagcttctggctgaaccaccagggcatccagatggtgtgtgagaccctgacagagtgctgggaccatgaccctgaggcccggctgacagcccagtgtgtggccgagcgcttcagcgagctggagcacctggaccggctgagcggccgcagctgcagcgaggagaagatcccagaagatggcagcctgaacaccaccaagtag

SEQ ID NO: 173707 - DNA, 2244 bp, synthetic construct
  misc_feature 1..2244: note = Description of Artificial Sequence: Synthetic coding sequence
  source 1..2244: mol_type = other DNA
atggctgatgaagctgccctggccctgcagcccggcggcagccccagcgctgctggagctgaccgggaggccgccagcagccctgctggggagcccctgaggaagaggcccaggagagatggccctggcctggagaggagccctggagagcctggaggagctgcccctgagcgggaggtgcctgctgctgcccggggctgccctggagctgctgctgctgccctgtggagggaggccgaggccgaggccgctgctgctggaggagagcaggaggcccaggccacagctgctgctggggagggggacaatggacctggcctgcagggccccagccgggagccccccctggccgacaacctgtatgatgaagatgatgatgatgaaggagaggaggaggaggaggccgctgctgctgccatcggctacagagacaacctgctgtttggagatgagatcatcaccaacggcttccacagctgtgagagtgatgaagaagatcgggccagccacgccagcagcagtgactggaccccccggccccgcatcggcccctacacctttgtgcagcagcacctgatgattggaacagaccccaggaccatcctgaaggacctgctgcctgagaccatccccccacctgagctggatgacatgaccctgtggcagatcgtcatcaacatcctgtctgagccccccaagaggaagaagaggaaggacatcaacaccattgaagatgctgtgaagctgctgcaggagtgcaagaagatcatcgtgctgaccggggccggcgtgtctgtgtcctgtggcatcccagacttccgcagcagagatggcatctatgcccggctggccgtggacttcccagacctgcctgacccccaggccatgtttgatattgagtacttcaggaaggacccccggcccttcttcaagtttgccaaggagatctacccaggccagttccagcccagcctgtgccacaagttcatcgccctgagtgacaaggagggcaagctgctgaggaactacacccagaacatcgacaccctggagcaggtggccggcatccagaggatcatccagtgccacggcagctttgccacagccagctgcctgatctgcaagtacaaggtggactgtgaggccgtgcggggggacatcttcaaccaggtggtgccccgctgcccccgctgcccagcagatgagcccctggccatcatgaagccagaaattgtgttcttcggggagaacctgcctgagcagttccaccgggccatgaagtatgacaaggatgaggtggacctgctgattgtgattggcagcagcctgaaggtgcggcctgtggccctgatccccagcagcatcccccatgaggtgccccagatcctgatcaaccgggagcccctgccccacctgcactttgatgtggagctgctgggggactgtgatgtgatcatcaatgagctgtgccaccggctgggcggggagtatgccaagctgtgctgcaaccctgtgaagctgtctgagatcacagagaagccacccaggacccagaaggagctggcctacctgtctgagctgccccccacccccctgcacgtgtctgaggacagcagcagccctgagaggaccagccccccagacagcagcgtcatcgtgaccctgctggaccaggccgccaagagcaatgatgacctggatgtgtctgagagcaagggctgcatggaggagaagccccaggaggtgcagaccagcagaaatgtggagagcattgctgagcagatggagaacccagacctgaagaatgtgggcagcagcactggagagaagaatgaaagaacatctgtggccggcaccgtgaggaagtgctggcccaacagagtggccaaggagcagatcagccggcggctggatggcaaccagtacctgttcctgccccccaaccgctacatcttccatggagctgaggtgtacagcgacagtgaagatgatgtgctgagcagcagcagctgtggcagcaacagcgacagcggcacctgccagagccccagcctggaggagcccatggaggatgaaagtgaaattgaggagttctacaacggcctggaggatgagccagatgtgcctgagcgggccggcggggccggctttggaacagatggagatgaccaggaggccatcaatgaggccatctctgtgaagcaggaggtgacagacatgaactaccccagcaacaagagctag

SEQ ID NO: 173708 - DNA, 2553 bp, synthetic construct
  misc_feature 1..2553: note = Description of Artificial Sequence: Synthetic coding sequence
  source 1..2553: mol_type = other DNA
atgaccagccactacgtgattgccatctttgccctgatgagcagctgcctggccacagctggccctgagcccggggccctgtgtgagctgagccctgtgtctgccagccaccctgtgcaggccctgatggagagcttcaccgtgctgagcggctgtgccagccggggcaccaccggcctgccccaggaggtgcacgtgctgaacctgaggacagctggccagggccctggccagctgcagcgggaggtgaccctgcacctgaaccccatcagctctgtgcacatccaccacaagtctgtggtgttcctgctgaacagcccccaccccctggtgtggcacctgaagacagagcggctggccactggagtgtcccggctcttcctggtgtctgagggctctgtggtgcagttcagcagcgccaacttcagcctgacagctgagacagaggagaggaacttcccccatggaaatgagcacctgctgaactgggccaggaaggagtatggagctgtgaccagcttcacagagctgaagatcgccaggaacatctacatcaaggtgggggaggaccaggtgttcccccccaagtgcaacatcggcaagaacttcctgagcctgaactacctggccgagtacctgcagcccaaggctgctgagggctgtgtgatgagcagccagccccagaatgaggaggtgcacatcatcgagctgatcacccccaacagcaacccctacagcgccttccaggtggacatcaccatcgacatccggcccagccaggaggacctggaggtggtgaagaacctgatcctgatcctgaagtgcaagaagtctgtgaactgggtgatcaagagctttgatgtgaagggcagcctgaagatcatcgcccccaacagcatcggctttgggaaggagagcgagaggtccatgaccatgaccaagagcatcagagatgacatccccagcacccagggcaacctggtgaagtgggccctggacaatggctacagccccatcaccagctacaccatggcccctgtggccaaccgcttccacctgcggctggagaacaatgaggagatgggagatgaggaggtgcacaccatccccccagagctgcgcatcctgctggaccccggggccctgcctgccctgcagaacccccccatccggggcggggagggccagaatggaggcctgcccttccccttcccagacatcagcagaagagtgtggaatgaggagggagaagatggcctgccccggcccaaggaccccgtcatccccagcatccagctgtttcctggcctgcgggagcctgaggaggtgcagggctctgtggacatcgccctgtctgtgaagtgtgacaatgagaagatgattgtggccgtggagaaggacagcttccaggccagcggctacagcggcatggatgtgaccctgctggaccccacctgcaaggccaagatgaatggcacccactttgtgctggagagccccctgaatggctgcggcacccggccccgctggagcgccctggatggagtggtgtactacaacagcatcgtcatccaggtgcctgccctgggggacagcagcggctggccagatggctatgaggacctggagagcggggacaatggcttccctggggacatggatgaaggagatgccagcctcttcaccaggcctgagatcgtggtgttcaactgcagcctgcagcaggtgaggaaccccagcagcttccaggagcagccccacggcaacatcaccttcaacatggagctgtacaacacagacctcttcctggtgcccagccagggcgtcttctctgtgcctgaaaatggacatgtgtatgtggaggtgtctgtgaccaaggccgagcaggagctgggctttgccatccagacctgcttcatcagcccctacagcaacccagacaggatgagccactacaccatcatcgagaacatctgccccaaggatgagagcgtgaagttctacagccccaagagggtgcacttccccatcccccaggccgacatggacaagaagcgcttctcctttgtgttcaagcctgtgttcaacaccagcctgctcttcctgcagtgtgagctgaccctgtgcaccaagatggagaagcacccccagaagctgcccaagtgtgtgcccccagatgaggcctgcaccagcctggatgccagcatcatctgggccatgatgcagaacaagaagaccttcaccaagcccctggccgtcatccaccacgaggccgagagcaaggagaagggccccagcatgaaggagcccaaccccatcagcccccccatcttccacggcctggacaccctgactgtgatgggcatcgcctttgctgccttcgtcatcggggccctgctgactggagccctgtggtacatctacagccacactggagaaacagctggccggcagcaggtgcccaccagccccccagccagcgagaacagcagcgctgcccacagcatcggcagcacccagagcaccccctgcagcagcagcagcacagcctag

SEQ ID NO: 173709 - DNA, 108 bp, synthetic construct
  misc_feature 1..108: note = Description of Artificial Sequence: Synthetic coding sequence
  source 1..108: mol_type = other DNA
atgaccagccactacgtgattgccatctttgccctgatgagcagctgcctggccacagctggccctgagcccggggccctgtgtgagctgagccctgtgtctgcctag

SEQ ID NO: 173710 - DNA, 2553 bp, synthetic construct; identical to SEQ ID NO: 173708
  misc_feature 1..2553: note = Description of Artificial Sequence: Synthetic coding sequence
  source 1..2553: mol_type = other DNA

SEQ ID NO: 173711 - DNA, 2556 bp, synthetic construct
  misc_feature 1..2556: note = Description of Artificial Sequence: Synthetic coding sequence
  source 1..2556: mol_type = other DNA
atgaccagccactacgtgattgccatctttgccctgatgagcagctgcctggccacagctggccctgagcccggggccctgtgtgagctgagccctgtgtctgccagccaccctgtgcaggccctgatggagagcttcaccgtgctgagcggctgtgccagccggggcaccaccggcctgccccaggaggtgcacgtgctgaacctgaggacagctggccagggccctggccagctgcagcgggaggtgaccctgcacctgaaccccatcagctctgtgcacatccaccacaagtctgtggtgttcctgctgaacagcccccaccccctggtgtggcacctgaagacagagcggctggccactggagtgtcccggctcttcctggtgtctgagggctctgtggtgcagttcagcagcgccaacttcagcctgacagctgagacagaggagaggaacttcccccatggaaatgagcacctgctgaactgggccaggaaggagtatggagctgtgaccagcttcacagagctgaagatcgccaggaacatctacatcaaggtgggggaggaccaggtgttcccccccaagtgcaacatcggcaagaacttcctgagcctgaactacctggccgagtacctgcagcccaaggctgctgagggctgtgtgatgagcagccagccccagaatgaggaggtgcacatcatcgagctgatcacccccaacagcaacccctacagcgccttccaggtggacatcaccatcgacatccggcccagccaggaggacctggaggtggtgaagaacctgatcctgatcctgaagtgcaagaagtctgtgaactgggtgatcaagagctttgatgtgaagggcagcctgaagatcatcgcccccaacagcatcggctttgggaaggagagcgagaggtccatgaccatgaccaagagcatcagagatgacatccccagcacccagggcaacctggtgaagtgggccctggacaatggctacagccccatcaccagctacaccatggcccctgtggccaaccgcttccacctgcggctggagaacaatgctgaggagatgggagatgaggaggtgcacaccatccccccagagctgcgcatcctgctggaccccggggccctgcctgccctgcagaacccccccatccggggcggggagggccagaatggaggcctgcccttccccttcccagacatcagccggcgggtgtggaatgaggagggggaggatggcctgccccggcccaaggaccctgtgatccccagcatccagctgtttcctggcctgcgggagcctgaggaggtgcagggctctgtggacatcgccctgtctgtgaagtgtgacaatgagaagatgattgtggccgtggagaaggacagcttccaggccagcggctacagcggcatggatgtgaccctgctggaccccacctgcaaggccaagatgaatggcacccactttgtgctggagagccccctgaatggctgcggcacccggccccgctggagcgccctggatggagtggtgtactacaacagcatcgtcatccaggtgcctgccctgggggacagcagcggctggccagatggctatgaggacctggagagcggggacaatggcttccctggggacatggatgaaggagatgccagcctcttcaccaggcctgagatcgtggtgttcaactgcagcctgcagcaggtgaggaaccccagcagcttccaggagcagccccacggcaacatcaccttcaacatggagctgtacaacacagacctcttcctggtgcccagccagggcgtcttctctgtgcctgaaaatggccacgtgtatgtggaggtgtctgtgaccaaggccgagcaggagctgggctttgccatccagacctgcttcatcagcccctacagcaacccagacaggatgagccactacaccatcatcgagaacatctgccccaaggatgaatctgtgaagttctacagccccaagagggtgcacttccccatcccccaggccgacatggacaagaagcgcttctcctttgtgttcaagcctgtgttcaacaccagcctgctcttcctgcagtgtgagctgaccctgtgcaccaagatggagaagcacccccagaagctgcccaagtgtgtgcccccagatgaggcctgcaccagcctggatgccagcatcatctgggccatgatgcagaacaagaagaccttcaccaagcccctggccgtcatccaccatgaagctgagagcaaggagaagggccccagcatgaaggagcccaaccccatcagcccccccatcttccacggcctggacaccctgactgtgatgggcatcgcctttgctgcctttgtgattggagccctgctgaccggggccctgtggtacatctacagccacactggagaaacagctggccggcagcaggtgcccaccagccccccagccagcgagaacagcagcgctgcccacagcatcggcagcacccagagcaccccctgcagcagcagcagcacagcctag

SEQ ID NO: 173712 - DNA, 2052 bp, synthetic construct
  misc_feature 1..2052: note = Description of Artificial Sequence: Synthetic coding sequence
  source 1..2052: mol_type = other DNA
atggccctgtttgtgcggctgctggccctggccctggccctggccctgggccctgctgccaccctggccggccctgccaagagcccctaccagctggtgctgcagcacagccggctgcggggccggcagcacggccccaacgtgtgtgctgtgcagaaggtgattggcaccaacaggaagtacttcaccaactgcaagcagtggtaccagaggaagatctgtgggaagagcaccgtcatctcctatgagtgctgccccggctatgagaaggtgcctggagagaagggctgcccagctgccctgcccctgagcaacctgtatgagaccctgggcgtggtgggcagcaccaccacccagctgtacacagacagaacagagaagctgcggcctgagatggagggccctggcagcttcaccatctttgcccccagcaatgaggcctgggccagcctgcctgctgaggtgctggacagcctggtgtccaatgtgaacatcgagctgctgaatgccctgcgctaccacatggtgggccggcgggtgctgacagatgagctgaagcacggcatgaccctgacctccatgtaccagaacagcaacatccagatccaccactacccaaatggaattgtgacagtgaactgtgcccggctgctgaaggctgaccaccacgccaccaacggggtggtgcacctgattgacaaggtgatcagcaccatcaccaacaacatccagcagatcattgaaattgaggacacctttgagaccctgcgggctgctgtggccgccagcggcctgaacaccatgctggagggcaatggccagtacaccctgctggcccccaccaatgaggcctttgagaagatccccagcgagaccctgaaccgcatcctgggggaccctgaggccctgcgggacctgctgaacaaccacatcctgaagagcgccatgtgtgccgaggccatcgtggccggcctgtctgtggagaccctggagggcaccaccctggaggtgggctgcagcggggacatgctgaccatcaatggcaaggccatcatcagcaacaaggacatcctggccaccaatggagtcatccactacattgatgagctgctgatcccagattctgccaagaccctgtttgagctggccgctgagagtgatgtgtccacagccatcgacctcttccggcaggccggcctgggcaaccacctgagcggcagcgagcggctgaccctgctggcccccctgaacagcgtcttcaaggatggcaccccacccattgatgcccacaccaggaacctgctgaggaaccacatcatcaaggaccagctggccagcaagtacctgtaccacggccagaccctggagaccctgggcggcaagaagctgcgggtgtttgtgtacagaaacagcctgtgcatcgagaacagctgcatcgccgcccatgacaagaggggccgctatggcaccctcttcaccatggacagagtgctgaccccacccatgggcaccgtgatggatgtgctgaagggggacaaccgcttctccatgctggtggccgccatccagagcgctggcctgacagagaccctgaaccgggagggcgtgtacacagtgtttgcccccaccaatgaggccttccgggccctgcccccccgggagaggagccggctgctgggagatgccaaggagctggccaacatcctgaagtaccacatcggagatgagatcctggtgtctgggggcattggagccctggtgcggctgaagagcctgcagggcgacaagctggaggtgtccctgaagaacaacgtggtgtctgtgaacaaggagcctgtggccgagccagacatcatggccaccaacggggtggtgcacgtgatcaccaacgtgctgcagcccccagccaaccggccccaggagagaggagatgagctggccgacagcgccctggagatcttcaagcaggccagcgccttcagcaggcctgagcagccccaggtgctgtgcagccctgtgtaccagaagctgctggagaggatgaagcactag

SEQ ID NO: 173713 - DNA, 1251 bp, synthetic construct
  misc_feature 1..1251: note = Description of Artificial Sequence: Synthetic coding sequence
  source 1..1251: mol_type = other DNA
atgctggagggcaatggccagtacaccctgctggcccccaccaatgaggcctttgagaagatccccagcgagaccctgaaccgcatcctgggggaccctgaggccctgcgggacctgctgaacaaccacatcctgaagagcgccatgtgtgccgaggccatcgtggccggcctgtctgtggagaccctggagggcaccaccctggaggtgggctgcagcggggacatgctgaccatcaacgggaaggccatcatcagcaacaaggacatcctggccaccaacggggtcatccactacattgatgagctgctgatcccagacagcgccaagaccctgtttgagctggccgctgagagtgatgtgtccacagccatcgacctcttccggcaggccggcctgggcaaccacctgagcggcagcgagcggctgaccctgctggcccccctgaacagcgtcttcaaggatggcaccccacccattgatgcccacaccaggaacctgctgaggaaccacatcatcaaggaccagctggccagcaagtacctgtaccacggccagaccctggagaccctgggcggcaagaagctgcgggtgtttgtgtacagaaacagcctgtgcatcgagaacagctgcatcgccgcccatgacaagaggggccgctatggcaccctcttcaccatggacagagtgctgaccccacccatgggcaccgtgatggatgtgctgaagggggacaaccgcttctccatgctggtggccgccatccagagcgctggcctgacagagaccctgaaccgggagggcgtgtacacagtgtttgcccccaccaatgaggccttccgggccctgcccccccgggagaggagccggctgctgggagatgccaaggagctggccaacatcctgaagtaccacatcggagatgagatcctggtgtctgggggcatcggggccctggtgcggctgaagagcctgcagggcgacaagctggaggtgtccctgaagaacaacgtggtgtctgtgaacaaggagcctgtggccgagccagacatcatggccaccaatggagtggtgcacgtgatcaccaacgtgctgcagcccccagccaaccggccccaggagagaggagatgagctggccgacagcgccctggagatcttcaagcaggccagcgccttcagccgggccagccagaggtctgtgcggctggcccctgtgtaccagaagctgctggagaggatgaagcactag

SEQ ID NO: 173714 - DNA, 2052 bp, synthetic construct
  misc_feature 1..2052: note = Description of Artificial Sequence: Synthetic coding sequence
  source 1..2052: mol_type = other DNA
atggccctgtttgtgcggctgctggccctggccctggccctggccctgggccctgctgccaccctggccggccctgccaagagcccctaccagctggtgctgcagcacagccggctgcggggccggcagcacggccccaacgtgtgtgctgtgcagaaggtgattggcaccaacaggaagtacttcaccaactgcaagcagtggtaccagaggaagatctgtgggaagagcaccgtcatctcctatgagtgctgccccggctatgagaaggtgcctggagagaagggctgcccagctgccctgcccctgagcaacctgtatgagaccctgggcgtggtgggcagcaccaccacccagctgtacacagacagaacagagaagctgcggcctgagatggagggccctggcagcttcaccatctttgcccccagcaatgaggcctgggccagcctgcctgctgaggtgctggacagcctggtgtccaatgtgaacatcgagctgctgaatgccctgcgctaccacatggtgggccggcgggtgctgacagatgagctgaagcacggcatgaccctgacctccatgtaccagaacagcaacatccagatccaccactacccaaatggaattgtgacagtgaactgtgcccggctgctgaaggctgaccaccacgccaccaacggggtggtgcacctgattgacaaggtgatcagcaccatcaccaacaacatccagcagatcattgaaattgaggacacctttgagaccctgcgggctgctgtggccgccagcggcctgaacaccatgctggagggcaatggccagtacaccctgctggcccccaccaatgaggcctttgagaagatccccagcgagaccctgaaccgcatcctgggggaccctgaggccctgcgggacctgctgaacaaccacatcctgaagagcgccatgtgtgccgaggccatcgtggccggcctgtctgtggagaccctggagggcaccaccctggaggtgggctgcagcggggacatgctgaccatcaatggcaaggccatcatcagcaacaaggacatcctggccaccaatggagtcatccactacattgatgagctgctgatcccagattctgccaagaccctgtttgagctggccgctgagagtgatgtgtccacagccatcgacctcttccggcaggccggcctgggcaaccacctgagcggcagcgagcggctgaccctgctggcccccctgaacagcgtcttcaaggatggcaccccacccattgatgcccacaccaggaacctgctgaggaaccacatcatcaaggaccagctggccagcaagtacctgtaccacggccagaccctggagaccctgggcggcaagaagctgcgggtgtttgtgtacagaaacagcctgtgcatcgagaacagctgcatcgccgcccatgacaagaggggccgctatggcaccctcttcaccatggacagagtgctgaccccacccatgggcaccgtgatggatgtgctgaagggggacaaccgcttctccatgctggtggccgccatccagagcgctggcctgacagagaccctgaaccgggagggcgtgtacacagtgtttgcccccaccaatgaggccttccgggccctgcccccccgggagaggagccggctgctgggagatgccaaggagctggccaacatcctgaagtaccacatcggagatgagatcctggtgtctgggggcattggagccctggtgcggctgaagagcctgcagggcgacaagctggaggtgtccctgaagaacaacgtggtgtctgtgaacaaggagcctgtggccgagccagacatcatggccaccaacggggtggtgcacgtgatcaccaacgtgctgcagcccccagccaaccggccccaggagagaggagatgagctggccgacagcgccctggagatcttcaagcaggccagcgccttcagccgggccagccagaggtctgtgcggctggcccctgtgtaccagaagctgctggagaggatgaagcactag

SEQ ID NO: 173715 - DNA, 1188 bp, synthetic construct
  misc_feature 1..1188: note = Description of Artificial Sequence: Synthetic coding sequence
  source 1..1188: mol_type = other DNA
atggccttcagcccctggcagatcctgagccctgtgcagtgggccaagtggacctggagcgctgtgcggggcggcgctgctggagaagatgaggccggcggccctgagggggaccctgaggaggaggacagccaggccgagaccaagagcctgtccttccgcagcggctgcaaggtgaagaagcatgagacccagagcctggccctggatgcctgcagcagagatgaaggagctgtgatcagccagatcagtgacatcagcaacagagatggccacgccacagatgaggagaagctggccagcaccagctgtggccagaagtctgctggagctgaggtgaagggggagcctgaggaggacctggagtactttgaatgtagcaatgtgcctgtgtccaccatcaaccacgccttcagcagcagcgaggccggcatcgagaaggagacctgccagaagatggaggaggatggcagcacagtgctgggcctgctggagagcagcgctgagaaggcccctgtgtctgtgtcctgtggcggggagagccccctggatggcatctgcctgtctgagagtgacaagacagctgtgctgaccctcatccgggaggagatcatcaccaaggagattgaggccaatgagtggaagaagaagtatgaggagacccggcaggaggtgctggagatgaggaagatcgtggccgagtatgagaagaccatcgcccagatgattgaagatgagcagaggacctccatgaccagccagaagagcttccagcagctgaccatggagaaggagcaggccctggccgacctgaacagcgtggagaggagcctgagtgacctcttcagaagatatgagaacctgaagggcgtgctggagggcttcaagaagaatgaggaggccctgaagaagtgtgcccaggactacctggcccgggtgaagcaggaggagcagcgctaccaggccctgaagatccatgctgaggagaagctggacaaggccaatgaggagatcgcccaggtgaggaccaaggccaaggccgagagcgctgccctgcacgccggcctgaggaaggagcagatgaaggtggagagcctggagcgggccctgcagcagaagaaccaggagattgaggagctgaccaagatctgtgatgagctgattgccaagctgggcaagacagactag

SEQ ID NO: 173716 - DNA, 2418 bp, synthetic construct
  misc_feature 1..2418: note = Description of Artificial Sequence: Synthetic coding sequence
  source 1..2418: mol_type = other DNA
atggccttcagcccctggcagatcctgagccctgtgcagtgggccaagtggacctggagcgctgtgcggggcggcgctgctggagaagatgaggccggcggccctgagggggaccctgaggaggaggacagccaggccgagaccaagagcctgtccttcagcagtgacagcgagggcaactttgagaccccagaggccgagacccccatccgcagccccttcaaggagagctgtgaccccagcctgggcctggccggccctggggccaagagccaggagagccaggaggctgatgagcagctggtggccgaggtggtggagaagtgcagcagcaagacctgcagcaagcccagtgaaaatgaggtgccccagcaggccatcgacagccacagcgtgaagaacttccgggaggagcctgagcatgacttcagcaagatcagcatcgtgcggcccttcagcattgagaccaaggacagcacagacatctctgctgtgctgggcaccaaggccgcccacggctgtgtgacagctgtgtctgggaaggccctgcccagcagccccccagatgccctgcaggatgaggccatgacagagggctccatgggcgtgaccctggaggccagcgctgaggccgacctgaaggccggcaacagctgcccagagctggtgcccagccgccgcagcaagctgaggaagcccaagcctgtgcccctgaggaagaaggccatcggcggggagttcagtgacaccaatgctgctgtggagggcacccccctgcccaaggccagctaccacttcagccctgaggagctggatgagaacaccagccccctgctgggagatgcccgcttccagaagagccccccagacctgaaggagaccccaggcaccctgagcagtgacaccaatgattctggagtggagctgggggaggagagccgcagcagccccctgaagctggagtttgacttcacagaggacaccggcaacatcgaggccaggaaggccctgcccaggaagctgggcaggaagctgggcagcaccctgacccccaagatccagaaggatggcatcagcaagtctgctggcctggagcagcccacagatcctgtggccagagatggccccctgagccagaccagcagcaagccagaccccagccagtgggagagccccagcttcaaccccttcggcagccacagcgtgctgcagaacagcccccccctgagcagcgagggcagctaccactttgatcctgacaactttgatgagagcatggaccccttcaagcccaccaccaccctgaccagcagtgacttctgcagccccaccggcaaccacgtgaatgagatcctggagagccccaagaaggccaagagccgcctcatcaccagcggctgcaaggtgaagaagcatgagacccagagcctggccctggatgcctgcagcagagatgaaggagctgtgatcagccagatcagtgacatcagcaacagagatggccacgccacagatgaggagaagctggccagcaccagctgtggccagaagtctgctggagctgaggtgaagggggagcctgaggaggacctggagtactttgaatgtagcaatgtgcctgtgtccaccatcaaccacgccttcagcagcagcgaggccggcatcgagaaggagacctgccagaagatggaggaggatggcagcacagtgctgggcctgctggagagcagcgctgagaaggcccctgtgtctgtgtcctgtggcggggagagccccctggatggcatctgcctgtctgagagtgacaagacagctgtgctgaccctcatccgggaggagatcatcaccaaggagattgaggccaatgagtggaagaagaagtatgaggagacccggcaggaggtgctggagatgaggaagatcgtggccgagtatgagaagaccatcgcccagatgattgaagatgagcagaggacctccatgaccagccagaagagcttccagcagctgaccatggagaaggagcaggccctggccgacctgaacagcgtggagaggagcctgagtgacctcttcagaagatatgagaacctgaagggcgtgctggagggcttcaagaagaatgaggaggccctgaagaagtgtgcccaggactacctggcccgggtgaagcaggaggagcagcgctaccaggccctgaagatccatgctgaggagaagctggacaaggccaatgaggagatcgcccaggtgaggaccaaggccaaggccgagagcgctgccctgcacgccggcctgaggaaggagcagatgaaggtggagagcctggagcgggccctgcagcagaagaaccaggagattgaggagctgaccaagatctgtgatgagctgattgccaagctgggcaagacagactag

SEQ ID NO: 173717 - DNA, 1140 bp, synthetic construct
  misc_feature 1..1140: note = Description of Artificial Sequence: Synthetic coding sequence
  source 1..1140: mol_type = other DNA
atgggcggcagccacagccagaccccccggggccgggagcctgctggggagcggcacccccggcccacagaaacagccaccacagagcaggtgaagttcctgtgcttcctgctgagcggctgcaaggtgaagaagcatgagacccagagcctggccctggatgcctgcagcagagatgaaggagctgtgatcagccagatcagtgacatcagcaacagagatggccacgccacagatgaggagaagctggccagcaccagctgtggccagaagtctgctggagctgaggtgaagggggagcctgaggaggacctggagtactttgaatgtagcaatgtgcctgtgtccaccatcaaccacgccttcagcagcagcgaggccggcatcgagaaggagacctgccagaagatggaggaggatggcagcacagtgctgggcctgctggagagcagcgctgagaaggcccctgtgtctgtgtcctgtggcggggagagccccctggatggcatctgcctgtctgagagtgacaagacagctgtgctgaccctcatccgggaggagatcatcaccaaggagattgaggccaatgagtggaagaagaagtatgaggagacccggcaggaggtgctggagatgaggaagatcgtggccgagtatgagaagaccatcgcccagatgattgaagatgagcagaggacctccatgaccagccagaagagcttccagcagctgaccatggagaaggagcaggccctggccgacctgaacagcgtggagaggagcctgagtgacctcttcagaagatatgagaacctgaagggcgtgctggagggcttcaagaagaatgaggaggccctgaagaagtgtgcccaggactacctggcccgggtgaagcaggaggagcagcgctaccaggccctgaagatccatgctgaggagaagctggacaaggccaatgaggagatcgcccaggtgaggaccaaggccaaggccgagagcgctgccctgcacgccggcctgaggaaggagcagatgaaggtggagagcctggagcgggccctgcagcagaagaaccaggagattgaggagctgaccaagatctgtgatgagctgattgccaagctgggcaagacagactag

SEQ ID NO: 173718 - DNA, 1104 bp, synthetic construct
  misc_feature 1..1104: note = Description of Artificial Sequence: Synthetic coding sequence
  source 1..1104: mol_type = other DNA
atgggcggcagccacagccagaccccccggggccgggagcctgctggggagcggcacccccggcccacagaaacagccagcggctgcaaggtgaagaagcatgagacccagagcctggccctggatgcctgcagcagagatgaaggagctgtgatcagccagatcagtgacatcagcaacagagatggccacgccacagatgaggagaagctggccagcaccagctgtggccagaagtctgctggagctgaggtgaagggggagcctgaggaggacctggagtactttgaatgtagcaatgtgcctgtgtccaccatcaaccacgccttcagcagcagcgaggccggcatcgagaaggagacctgccagaagatggaggaggatggcagcacagtgctgggcctgctggagagcagcgctgagaaggcccctgtgtctgtgtcctgtggcggggagagccccctggatggcatctgcctgtctgagagtgacaagacagctgtgctgaccctcatccgggaggagatcatcaccaaggagattgaggccaatgagtggaagaagaagtatgaggagacccggcaggaggtgctggagatgaggaagatcgtggccgagtatgagaagaccatcgcccagatgattgaagatgagcagaggacctccatgaccagccagaagagcttccagcagctgaccatggagaaggagcaggccctggccgacctgaacagcgtggagaggagcctgagtgacctcttcagaagatatgagaacctgaagggcgtgctggagggcttcaagaagaatgaggaggccctgaagaagtgtgcccaggactacctggcccgggtgaagcaggaggagcagcgctaccaggccctgaagatccatgctgaggagaagctggacaaggccaatgaggagatcgcccaggtgaggaccaaggccaaggccgagagcgctgccctgcacgccggcctgaggaaggagcagatgaaggtggagagcctggagcgggccctgcagcagaagaaccaggagattgaggagctgaccaagatctgtgatgagctgattgccaagctgggcaagacagactag

SEQ ID NO: 173719 - DNA, 2454 bp, synthetic construct
  misc_feature 1..2454: note = Description of Artificial Sequence: Synthetic coding sequence
  source 1..2454: mol_type = other DNA
atggccttcagcccctggcagatcctgagccctgtgcagtgggccaagtggacctggagcgctgtgcggggcggcgctgctggagaagatgaggccggcggccctgagggggaccctgaggaggaggacagccaggccgagaccaagagcctgtccttcagcagtgacagcgagggcaactttgagaccccagaggccgagacccccatccgcagccccttcaaggagagctgtgaccccagcctgggcctggccggccctggggccaagagccaggagagccaggaggctgatgagcagctggtggccgaggtggtggagaagtgcagcagcaagacctgcagcaagcccagtgaaaatgaggtgccccagcaggccatcgacagccacagcgtgaagaacttccgggaggagcctgagcatgacttcagcaagatcagcatcgtgcggcccttcagcattgagaccaaggacagcacagacatctctgctgtgctgggcaccaaggccgcccacggctgtgtgacagctgtgtctgggaaggccctgcccagcagccccccagatgccctgcaggatgaggccatgacagagggctccatgggcgtgaccctggaggccagcgctgaggccgacctgaaggccggcaacagctgcccagagctggtgcccagccgccgcagcaagctgaggaagcccaagcctgtgcccctgaggaagaaggccatcggcggggagttcagtgacaccaatgctgctgtggagggcacccccctgcccaaggccagctaccacttcagccctgaggagctggatgagaacaccagccccctgctgggagatgcccgcttccagaagagccccccagacctgaaggagaccccaggcaccctgagcagtgacaccaatgattctggagtggagctgggggaggagagccgcagcagccccctgaagctggagtttgacttcacagaggacaccggcaacatcgaggccaggaaggccctgcccaggaagctgggcaggaagctgggcagcaccctgacccccaagatccagaaggatggcatcagcaagtctgctggcctggagcagcccacagatcctgtggccagagatggccccctgagccagaccagcagcaagccagaccccagccagtgggagagccccagcttcaaccccttcggcagccacagcgtgctgcagaacagcccccccctgagcagcgagggcagctaccactttgatcctgacaactttgatgagagcatggaccccttcaagcccaccaccaccctgaccagcagtgacttctgcagccccaccggcaaccacgtgaatgagatcctggagagccccaagaaggccaagagccgcctcatcaccaccacagagcaggtgaagttcctgtgcttcctgctgagcggctgcaaggtgaagaagcatgagacccagagcctggccctggatgcctgcagcagagatgaaggagctgtgatcagccagatcagtgacatcagcaacagagatggccacgccacagatgaggagaagctggccagcaccagctgtggccagaagtctgctggagctgaggtgaagggggagcctgaggaggacctggagtactttgaatgtagcaatgtgcctgtgtccaccatcaaccacgccttcagcagcagcgaggccggcatcgagaaggagacctgccagaagatggaggaggatggcagcacagtgctgggcctgctggagagcagcgctgagaaggcccctgtgtctgtgtcctgtggcggggagagccccctggatggcatctgcctgtctgagagtgacaagacagctgtgctgaccctcatccgggaggagatcatcaccaaggagattgaggccaatgagtggaagaagaagtatgaggagacccggcaggaggtgctggagatgaggaagatcgtggccgagtatgagaagaccatcgcccagatgattgaagatgagcagaggacctccatgaccagccagaagagcttccagcagctgaccatggagaaggagcaggccctggccgacctgaacagcgtggagaggagcctgagtgacctcttcagaagatatgagaacctgaagggcgtgctggagggcttcaagaagaatgaggaggccctgaagaagtgtgcccaggactacctggcccgggtgaagcaggaggagcagcgctaccaggccctgaagatccatgctgaggagaagctggacaaggccaatgaggagatcgcccaggtgaggaccaaggccaaggccgagagcgctgccctgcacgccggcctgaggaaggagcagatgaaggtggagagcctggagcgggccctgcagcagaagaaccaggagattgaggagctgaccaagatctgtgatgagctgattgccaagctgggcaagacagactag

SEQ ID NO: 173720 - DNA, 2379 bp, synthetic construct
  misc_feature 1..2379: note = Description of Artificial Sequence: Synthetic coding sequence
  source 1..2379: mol_type = other DNA
atgcagaggcagaccatcaagggagctggagctggaggagctgccctgatggccttcagcccctggcagatcctgagccctgtgcagtgggccaagtggacctggagcgctgtgcggggcggcgctgctggagaagatgaggccggcggccctgagggggaccctgaggaggaggacagccaggccgagaccaagagcctgtccttcagcagtgacagcgagggcaactttgagaccccagaggccgagacccccatccgcagccccttcaaggagagctgtgaccccagcctgggcctggccggccctggggccaagagccaggagagccaggaggctgatgagcagctggtggccgaggtggtggagaagtgcagcagcaagacctgcagcaagcccagtgaaaatgaggtgccccagcaggccatcgacagccacagcgtgaagaacttccgggaggagcctgagcatgacttcagcaagatcagcatcgtgcggcccttcagcattgagaccaaggacagcacagacatctctgctgtgctgggcaccaaggccgcccacggctgtgtgacagctgtgtctgggaaggccctgcccagcagccccccagatgccctgcaggatgaggccatgacagagggctccatgggcgtgaccctggaggccagcgctgaggccgacctgaaggccggcaacagctgcccagagctggtgcccagccgccgcagcaagctgaggaagcccaagcctgtgcccctgaggaagaaggccatcggcggggagttcagtgacaccaatgctgctgtggagggcacccccctgcccaaggccagctaccacttcagccctgaggagctggatgagaacaccagccccctgctgggagatgcccgcttccagaagagccccccagacctgaaggagaccccaggcaccctgagcagtgacaccaatgattctggagtggagctgggggaggagagccgcagcagccccctgaagctggagtttgacttcacagaggacaccggcaacatcgaggccaggaaggccctgcccaggaagctgggcaggaagctgggcagcaccctgacccccaagatccagaaggatggcatcagcaagtctgctggcctggagcagcccacagatcctgtggccagagatggccccctgagccagaccagcagcaagccagaccccagccagtgggagagccccagcttcaaccccttcggcagccacagcgtgctgcagaacagcccccccctgagcagcgagggcagctaccactttgatcctgacaactttgatgagagcatggaccccttcaagcccaccaccaccctgaccagcagtgacttctgcagccccaccggcaaccacgtgaatgagatcctggagagccccaagaaggccaagagccgcctcatcaccagcggctgcaaggtgaagaagcatgagacccagagcctggccctggatgcctgcagcagagatgaaggagctgtgatcagccagatcagtgacatcagcaacagagatggccacgccacagatgaggagaagctggccagcaccagctgtggccagaagtctgctggagctgaggtgaagggcatcgagaaggagacctgccagaagatggaggaggatggcagcacagtgctgggcctgctggagagcagcgctgagaaggcccctgtgtctgtgtcctgtggcggggagagccccctggatggcatctgcctgtctgagagtgacaagacagctgtgctgaccctcatccgggaggagatcatcaccaaggagattgaggccaatgagtggaagaagaagtatgaggagacccggcaggaggtgctggagatgaggaagatcgtggccgagtatgagaagaccatcgcccagatgattgaagatgagcagaggacctccatgaccagccagaagagcttccagcagctgaccatggagaaggagcaggccctggccgacctgaacagcgtggagaggagcctgagtgacctcttccgccgctatgagaacctgaagggcgtgctggagggcttcaagaagaatgaggaggccctgaagaagtgtgcccaggactacctggcccgggtgaagcaggaggagcagcgctaccaggccctgaagatccacgccgaggagaagctggacaaggccaatgaggagatcgcccaggtgaggaccaaggccaaggccgagagcgctgccctgcatgctggcctgaggaaggagcagatgaaggtggagagcctggagcgggccctgcagcagaagaaccaggagattgaggagctgaccaagatctgtgatgagctgattgccaagctgggcaagacagactag

SEQ ID NO: 173721 - DNA, 1431 bp, synthetic construct
  misc_feature 1..1431: note = Description of Artificial Sequence: Synthetic coding sequence
  source 1..1431: mol_type = other DNA
atgacagagggctccatgggcgtgaccctggaggccagcgctgaggccgacctgaaggccggcaacagctgcccagagctggtgcccagcagaagaagcaagctgaggaagcccaagcctgtgcccctgaggaagaaggccatcggcggggagttcagtgacaccaatgctgctgtggagggcacccccctgcccaaggccagctaccacttcagccctgaggagctggatgagaacaccagccccctgctgggagatgcccgcttccagaagagccccccagacctgaaggagaccccaggcaccctgagcagtgacaccaatgacagcggcgtggagctgggggaggagagccgcagcagccccctgaagctggagtttgacttcacagaagatactggaaacatcgaggccaggaaggccctgcccaggaagctgggcaggaagctgggcagcaccctgacccccaagatccagaaggatggcatcagcaagtctgctggcctggagcagcccacagatcctgtggccagagatggccccctgagccagaccagcagcaagccagaccccagccagtgggagagccccagcttcaaccccttcggcagccacagcgtgctgcagaacagcccccccctgagcagcgagggcagctaccactttgatcctgacaactttgatgagagcatggaccccttcaagcccaccaccaccctgaccagcagtgacttctgcagccccactggaaaccacgtgaatgagatcctggagagccccaagaaggccaagagccgcctcatcaccagcggctgcaaggtgaagaagcatgagacccagagcctggccctggatgcctgcagcagagatgagggcgctgtgatcagccagatcagtgacatcagcaacagagatggccacgccacagatgaggagaagctggccagcaccagctgtggccagaagtctgctggagctgaggtgaagggggagcctgaggaggacctggagtactttgagtgcagcaatgtgcctgtgtccaccatcaaccacgccttcagcagcagcgaggccggcatcgagaaggagacctgccagaagatggaggaggatggcagcacagtgctgggcctgctggagagcagcgctgagaaggcccctgtgtctgtgtcctgtggcggggagagccccctggatggcatctgcctgtctgagagtgacaagacagctgtgctgaccctcatccgggaggagatcatcaccaaggagattgaggccaatgagtggaagaagaagtacttcaacaaggaggtgttccggggggacatctgccccaagcgcttcggcctgcagatccctgtgatcttcaagaagcagctgaccaccaagagcctgagcctgcaccgggtgacagtgaagaagctgatgtag

SEQ ID NO: 173722 - DNA, 2196 bp, synthetic construct
  misc_feature 1..2196: note = Description of Artificial Sequence: Synthetic coding sequence
  source 1..2196: mol_type = other DNA
atgaacaacatcctgaagctgaagagcagtgacagcgagggcaactttgagaccccagaggccgagacccccatccgcagccccttcaaggagagctgtgaccccagcctgggcctggccggccctggggccaagagccaggagagccaggaggctgatgagcagctggtggccgaggtggtggagaagtgcagcagcaagacctgcagcaagcccagtgaaaatgaggtgccccagcaggccatcgacagccacagcgtgaagaacttccgggaggagcctgagcatgacttcagcaagatcagcatcgtgcggcccttcagcattgagaccaaggacagcacagacatctctgctgtgctgggcaccaaggccgcccacggctgtgtgacagctgtgtctgggaaggccctgcccagcagccccccagatgccctgcaggatgaggccatgacagagggctccatgggcgtgaccctggaggccagcgctgaggccgacctgaaggccggcaacagctgcccagagctggtgcccagcagaagaagcaagctgaggaagcccaagcctgtgcccctgaggaagaaggccatcggcggggagttcagtgacaccaatgctgctgtggagggcacccccctgcccaaggccagctaccacttcagccctgaggagctggatgagaacaccagccccctgctgggagatgcccgcttccagaagagccccccagacctgaaggagaccccaggcaccctgagcagtgacaccaatgacagcggcgtggagctgggggaggagagccgcagcagccccctgaagctggagtttgacttcacagaagatactggaaacatcgaggccaggaaggccctgcccaggaagctgggcaggaagctgggcagcaccctgacccccaagatccagaaggatggcatcagcaagtctgctggcctggagcagcccacagatcctgtggccagagatggccccctgagccagaccagcagcaagccagaccccagccagtgggagagccccagcttcaaccccttcggcagccacagcgtgctgcagaacagcccccccctgagcagcgagggcagctaccactttgatcctgacaactttgatgagagcatggaccccttcaagcccaccaccaccctgaccagcagtgacttctgcagccccactggaaaccacgtgaatgagatcctggagagccccaagaaggccaagagccgcctcatcaccagcggctgcaaggtgaagaagcatgagacccagagcctggccctggatgcctgcagcagagatgagggcgctgtgatcagccagatcagtgacatcagcaacagagatggccacgccacagatgaggagaagctggccagcaccagctgtggccagaagtctgctggagctgaggtgaagggcatcgagaaggagacctgccagaagatggaggaggatggcagcacagtgctgggcctgctggagagcagcgctgagaaggcccctgtgtctgtgtcctgtggcggggagagccccctggatggcatctgcctgtctgagagtgacaagacagctgtgctgaccctcatccgggaggagatcatcaccaaggagattgaggccaatgagtggaagaagaagtatgaggagacccggcaggaggtgctggagatgaggaagatcgtggccgagtatgagaagaccatcgcccagatgattgaagatgagcagaggacctccatgaccagccagaagagcttccagcagctgaccatggagaaggagcaggccctggccgacctgaacagcgtggagaggagcctgagtgacctcttcagaagatatgagaacctgaagggcgtgctggagggcttcaagaagaatgaggaggccctgaagaagtgtgcccaggactacctggcccgggtgaagcaggaggagcagcgctaccaggccctgaagatccatgctgaggagaagctggacaaggccaatgaggagatcgcccaggtgaggaccaaggccaaggccgagagcgctgccctgcacgccggcctgaggaaggagcagatgaaggtggagagcctggagcgggccctgcagcagaagaaccaggagattgaggagctgaccaagatctgtgatgagctgattgccaagctgggcaagacagactag

SEQ ID NO: 173723 - DNA, 1833 bp, synthetic construct
  misc_feature 1..1833: note = Description of Artificial Sequence: Synthetic coding sequence
  source 1..1833: mol_type = other DNA
atgacagagggctccatgggcgtgaccctggaggccagcgctgaggccgacctgaaggccggcaacagctgcccagagctggtgcccagcagaagaagcaagctgaggaagcccaagcctgtgcccctgaggaagaaggccatcggcggggagttcagtgacaccaatgctgctgtggagggcacccccctgcccaaggccagctaccacttcagccctgaggagctggatgagaacaccagccccctgctgggagatgcccgcttccagaagagccccccagacctgaaggagaccccaggcaccctgagcagtgacaccaatgacagcggcgtggagctgggggaggagagccgcagcagccccctgaagctggagtttgacttcacagaagatactggaaacatcgaggccaggaaggccctgcccaggaagctgggcaggaagctgggcagcaccctgacccccaagatccagaaggatggcatcagcaagtctgctggcctggagcagcccacagatcctgtggccagagatggccccctgagccagaccagcagcaagccagaccccagccagtgggagagccccagcttcaaccccttcggcagccacagcgtgctgcagaacagcccccccctgagcagcgagggcagctaccactttgatcctgacaactttgatgagagcatggaccccttcaagcccaccaccaccctgaccagcagtgacttctgcagccccactggaaaccacgtgaatgagatcctggagagccccaagaaggccaagagccgcctcatcaccagcggctgcaaggtgaagaagcatgagacccagagcctggccctggatgcctgcagcagagatgagggcgctgtgatcagccagatcagtgacatcagcaacagagatggccacgccacagatgaggagaagctggccagcaccagctgtggccagaagtctgctggagctgaggtgaagggggagcctgaggaggacctggagtactttgagtgcagcaatgtgcctgtgtccaccatcaaccacgccttcagcagcagcgaggccggcatcgagaaggagacctgccagaagatggaggaggatggcagcacagtgctgggcctgctggagagcagcgctgagaaggcccctgtgtctgtgtcctgtggcggggagagccccctggatggcatctgcctgtctgagagtgacaagacagctgtgctgaccctcatccgggaggagatcatcaccaaggagattgaggccaatgagtggaagaagaagtatgaggagacccggcaggaggtgctggagatgaggaagatcgtggccgagtatgagaagaccatcgcccagatgattgaagatgagcagaggacctccatgaccagccagaagagcttccagcagctgaccatggagaaggagcaggccctggccgacctgaacagcgtggagaggagcctgagtgacctcttccgccgctatgagaacctgaagggcgtgctggagggcttcaagaagaatgaggaggccctgaagaagtgtgcccaggactacctggcccgggtgaagcaggaggagcagcgctaccaggccctgaagatccacgccgaggagaagctggacaaggccaatgaggagatcgcccaggtgaggaccaaggccaaggccgagagcgctgccctgcatgctggcctgaggaaggagcagatgaaggtggagagcctggagcgggccctgcagcagaagaaccaggagattgaggagctgaccaagatctgtgatgagctgattgccaagctgggcaagacagactag

SEQ ID NO: 173724 - DNA, 1746 bp, synthetic construct
  misc_feature 1..1746: note = Description of Artificial Sequence: Synthetic coding sequence
  source 1..1746: mol_type = other DNA
atgacagagggctccatgggcgtgaccctggaggccagcgctgaggccgacctgaaggccggcaacagctgcccagagctggtgcccagcagaagaagcaagctgaggaagcccaagcctgtgcccctgaggaagaaggccatcggcggggagttcagtgacaccaatgctgctgtggagggcacccccctgcccaaggccagctaccacttcagccctgaggagctggatgagaacaccagccccctgctgggagatgcccgcttccagaagagccccccagacctgaaggagaccccaggcaccctgagcagtgacaccaatgacagcggcgtggagctgggggaggagagccgcagcagccccctgaagctggagtttgacttcacagaagatactggaaacatcgaggccaggaaggccctgcccaggaagctgggcaggaagctgggcagcaccctgacccccaagatccagaaggatggcatcagcaagtctgctggcctggagcagcccacagatcctgtggccagagatggccccctgagccagaccagcagcaagccagaccccagccagtgggagagccccagcttcaaccccttcggcagccacagcgtgctgcagaacagcccccccctgagcagcgagggcagctaccactttgatcctgacaactttgatgagagcatggaccccttcaagcccaccaccaccctgaccagcagtgacttctgcagccccactggaaaccacgtgaatgagatcctggagagccccaagaaggccaagagccgcctcatcaccagcggctgcaaggtgaagaagcatgagacccagagcctggccctggatgcctgcagcagagatgagggcgctgtgatcagccagatcagtgacatcagcaacagagatggccacgccacagatgaggagaagctggccagcaccagctgtggccagaagtctgctggagctgaggtgaagggcatcgagaaggagacctgccagaagatggaggaggatggcagcacagtgctgggcctgctggagagcagcgctgagaaggcccctgtgtctgtgtcctgtggcggggagagccccctggatggcatctgcctgtctgagagtgacaagacagctgtgctgaccctcatccgggaggagatcatcaccaaggagattgaggccaatgagtggaagaagaagtatgaggagacccggcaggaggtgctggagatgaggaagatcgtggccgagtatgagaagaccatcgcccagatgattgaagatgagcagaggacctccatgaccagccagaagagcttccagcagctgaccatggagaaggagcaggccctggccgacctgaacagcgtggagaggagcctgagtgacctcttcagaagatatgagaacctgaagggcgtgctggagggcttcaagaagaatgaggaggccctgaagaagtgtgcccaggactacctggcccgggtgaagcaggaggagcagcgctaccaggccctgaagatccatgctgaggagaagctggacaaggccaatgaggagatcgcccaggtgaggaccaaggccaaggccgagagcgctgccctgcacgccggcctgaggaaggagcagatgaaggtggagagcctggagcgggccctgcagcagaagaaccaggagattgaggagctgaccaagatctgtgatgagctgattgccaagctgggcaagacagactag

SEQ ID NO: 173725 - DNA, 93 bp, synthetic construct
  misc_feature 1..93: note = Description of Artificial Sequence: Synthetic coding sequence
  source 1..93: mol_type = other DNA
atgacagagggctccatgggcgtgaccctggaggccagcgctgaggccgacctgaaggccggcaacagctgcccagagctggtgcccagctag

SEQ ID NO: 173726 - DNA, 417 bp, synthetic construct
  misc_feature 1..417: note = Description of Artificial Sequence: Synthetic coding sequence
  source 1..417: mol_type = other DNA
atgacagagggctccatgggcgtgaccctggaggccagcgctgaggccgacctgaaggccggcaacagctgcccagagctggtgcccagcagaagaagcaagctgaggaagcccaagcctgtgcccctgaggaagaaggccatcggcggggagttcagtgacaccaatgctgctgtggagggcacccccctgcccaaggccagctaccacttcagccctgaggagctggatgagaacaccagccccctgctgggagatgcccgcttccagaagagccccccagacctgaaggagaccccaggcaccctgagcagtgacaccaatgacagcggcgtggagctgggggaggagagccgcagcagccccctgaagctggagtttgacttcacagaagatactggaaacatcgaggcctag

SEQ ID NO: 173727 - DNA, 186 bp, synthetic construct
  misc_feature 1..186: note = Description of Artificial Sequence: Synthetic coding sequence
  source 1..186: mol_type = other DNA
atgacagagggctccatgggcgtgaccctggaggccagcgctgaggccgacctgaaggccggcaacagctgcccagagctggtgcccagcagaagaagcaagctgaggaagcccaagcctgtgcccctgaggaagaaggccatcggcggggagttcagtgacaccaatgctgctgtggagggctag

SEQ ID NO: 173728 - DNA, 390 bp, synthetic construct
  misc_feature 1..390: note = Description of Artificial Sequence: Synthetic coding sequence
  source 1..390: mol_type = other DNA
atggccttcagcccctggcagatcctgagccctgtgcagtgggccaagtggacctggagcgctgtgcggggcggcgctgctggagaagatgaggccggcggccctgagggggaccctgaggaggaggacagccaggccgagaccaagagcctgtccttcagcagtgacagcgagggcaactttgagaccccagaggccgagacccccatccgcagccccttcaaggagagctgtgaccccagcctgggcctggccggccctggggccaagagccaggagagccaggaggctgatgagcagctggtggccgaggtggtggagaagtgcagcagcaagacctgcagcaagcccagtgaaaatgaggtgccccagcaggccatcgacagctag

SEQ ID NO: 173729 - DNA, 3081 bp, synthetic construct
  misc_feature 1..3081: note = Description of Artificial Sequence: Synthetic coding sequence
  source 1..3081: mol_type = other DNA
atgggcggcagccagagcctgcagcctgccccagccagtgacctgaacctggaggccagcgaggccatgagcagtgacagcgaggaggcctttgagaccccagagagcaccacccctgtgaaggcccccccagcccctcctcctcctcctcctgaggtgattcctgagcctgaggtgtccacccagcccccacctgaggagcccggctgcggcagcgagaccgtgcctgtgcctgatggccccaggagtgacagcgtggagggcagccccttccggccccccagccacagcttctctgctgtgtttgatgaggacaagcccatcgccagcagcggcacctacaacctggactttgacaacatcgagctggtggacaccttccagaccctggagccccgggccagtgatgccaagaaccaggagggcaaggtgaacaccaggaggaagagcacagattctgtgcccatcagcaagagcaccctgagccgcagcctgagcctgcaggccagtgactttgatggagccagcagcagcggcaaccctgaggccgtggccctggccccagatgcctacagcacaggcagcagcagcgccagcagcaccctgaagaggaccaagaagccccggccccccagcctgaagaagaagcagaccaccaagaagcccacagagaccccacctgtgaaggagacccagcaggagccagatgaggagagcctggtgcccagcggggagaacctggccagcgagaccaagacagaaagtgccaagacagagggccccagccctgccctgctggaggagacccccctggagcctgctgtgggccccaaggccgcctgccccctggacagcgagagcgctgagggcgtggtgcccccagccagcggcggcggccgggtgcagaacagcccccctgtgggcaggaagaccctgcccctgaccacagcccctgaggccggggaggtgacccccagcgacagcggcggccaggaggacagccctgccaagggcctgtctgtgcggctggagtttgactacagcgaggacaagagctcctgggacaaccagcaggagaaccccccacccaccaagaagattggcaagaagcctgtggccaagatgcccctgcggcggcccaagatgaagaagaccccagagaagctggacaacaccccagccagcccccccaggagccctgctgagcccaatgacatccccatcgccaagggcacctacacctttgatattgacaagtgggatgaccccaacttcaaccccttcagcagcaccagcaagatgcaggagagccccaagctgccccagcagagctacaactttgatcctgacacctgtgatgaatctgtggaccccttcaagaccagcagcaagacccccagcagccccagcaagagccctgccagctttgagatcccagccagcgccatggaggccaacggggtggatggagatggcctgaacaagccagccaagaagaagaagacccccctgaagacagacaccttccgggtgaagaagagccccaagaggagccccctgagtgacccccccagccaggaccccaccccagctgccaccccagagaccccacctgtgatctctgctgtggtgcacgccacagatgaggagaagctggccgtgaccaaccagaagtggacctgcatgacagtggacctggaggccgacaagcaggactacccccagcccagcgacctgagcacctttgtgaatgagaccaagttcagcagccccacagaggagctggactacagaaacagctatgaaattgagtacatggagaagattggcagcagcctgccccaggatgatgatgcccccaagaagcaggccctgtacctgatgtttgacaccagccaggagagccctgtgaagagcagccctgtgaggatgtctgagagccccaccccctgcagcggcagcagctttgaggagacagaggccctggtgaacacagctgccaagaaccagcaccctgtgccccggggcctggcccccaaccaggagagccacctgcaggtgcctgagaagagcagccagaaggagctggaggccatgggcctgggcaccccatctgaggccatcgagatcacagcccctgagggcagctttgccagcgcagatgccctgctgagccggctggcccaccctgtgtccctgtgtggggccctggactacctggagccagacctggccgagaagaacccccccctgtttgcccagaagctgcaggaggagctggagtttgccatcatgagaattgaggccctgaagctggcccggcagatcgccctggccagccgcagccaccaggatgccaagcgggaggccgcccaccccacagatgtgtccatcagcaagacagccctgtacagcagaattggaacagctgaggtggagaagccagctggcctgctcttccagcagcctgacctggacagcgccctgcagatcgcccgggcagagatcatcaccaaggagcgggaggtgtctgagtggaaggacaagtatgaggagagccggcgggaggtgatggagatgaggaagatcgtggccgagtatgagaagaccatcgcccagatgattgaagatgagcagcgggagaagtctgtgagccaccagacagtgcagcagctggtgctggagaaggagcaggccctggccgacctgaacagcgtggagaagagcctggccgacctcttcagaagatatgagaagatgaaggaggtgctggagggcttcaggaagaatgaggaggtgctgaagagatgtgcccaggagtacctgagccgggtgaagaaggaggagcagcgctaccaggccctgaaggtgcatgctgaggagaagctggaccgggccaatgctgagatcgcccaggtgcggggcaaggcccagcaggagcaggccgcccaccaggccagcctgaggaaggagcagctgcgggtggatgccctggagaggaccctggagcagaagaacaaggagattgaggagctgaccaagatctgtgatgagctgattgccaagatgggcaagagctag

SEQ ID NO: 173730 - DNA, 8847 bp, synthetic construct
  misc_feature 1..8847: note = Description of Artificial Sequence: Synthetic coding sequence
  source 1..8847: mol_type = other DNA
atgggaaatgaaaacagcaccagtgacaaccagaggaccctgagcgcccagacccccaggtctgcccagcccccaggcaacagccagaacatcaagaggaagcagcaggacaccccaggcagcccagaccacagagatgccagcagcatcggctctgtgggcctgggcggcttctgcacagccagcgagagcagcgccagcctggacccctgcctggtgtccccagaggtgacagagcccaggaaggacccccagggcgcccggggccctgagggcagcctgctgcccagccccccacccagccaggagcgggagcaccccagcagctccatgccctttgctgaatgtcctcctgagggctgcctggccagccctgctgctgccccagaagatggcccccagacccagagcccccggcgggagcccgccccaaatgcccctggggacattgctgctgccttccctgctgagcgggacagcagcaccccctaccaggagattgctgctgtgcccagcgctggccgggagcggcagcccaaggaggagggccagaagagcagcttctccttcagcagcggcatcgaccagagccctggcatgagccctgtgcccctgcgggagcccatgaaggcccccctgtgtggggagggggaccagcccggcggctttgagagccaggagaaggaggccgccggcggcttccccccagctgagagccggcagggcgtggcctctgtgcaggtgaccccagaggccccagctgctgcccagcagggcacagagagcagcgctgtgctggagaagagccccctgaagcccatggcccccatcccccaggaccctgccccccgggccagtgaccgggagcggggccagggcgaggccccaccccagtacctgacagatgacctggagttcctgcgggcctgccacctgcccaggagcaacagcggggccgcccctgaggccgaggtgaatgctgccagccaggagagctgccagcagcctgtgggcgcctacctgccccacgccgagctgccctggggcctgcccagccctgccctggtgcctgaggccggcggcagcggcaaggaggccctggacaccattgatgtgcagggccacccccagacaggcatgaggggcaccaagcccaaccaggtggtgtgtgtggccgccggcggccagcctgagggcggcctgcctgtgtccccagagcccagcctgctgacccccacagaggaggcccacccagccagcagcctggccagcttccctgctgcccagatccccatcgctgtggaggagcccggcagcagcagccgggagagcgtgtccaaggccggcatgcctgtgtctgcagatgctgccaaggaggtggtggatgctggcctggtgggcctggagcggcaggtgtctgacctgggcagcaagggggagcaccctgagggggaccccggggaggtgcctgcccccagcccccaggagcggggggagcacctgaacacagagcagagccatgaggtgcagcccggggtgcccccaccacccctgcccaaggagcagagccatgaggtgcagcccggggcccctcctccacccctgcccaaggcccccagcgagagcgcccggggccccccaggccccacagatggagccaaggtgcatgaggacagcaccagccctgctgtggccaaggagggcagccgcagccctggggacagccctgggggcaaggaggaggcccctgagcccccagatggaggagaccccggcaacctgcagggcgaggacagccaggccttcagcagcaagagggaccctgaggtgggcaaggatgagctgagcaagcccagcagtgatgctgagagccgggaccaccccagcagccacagcgcccagccccccaggaagggcggggccggccacacagatggcccccacagccagacagctgaggctgatgccagcggcctgccccacaagctgggggaggaggaccctgtgctgccccctgtgcctgatggagctggggagcccaccgtgcctgagggcgccatctgggagggcagcggcctgcagcccaagtgcccagacaccctgcagagccgggagggcctgggccgcatggagagcttcctgaccctggagagcgagaagagtgacttcccccccacccctgtggccgaggtggcccccaaggcccaggagggggagagcaccctggagatcaggaagatgggcagctgtgatggagagggcctgctgaccagcccagaccagccccggggccctgcctgtgatgccagccggcaggagttccacgccggcgtgccccaccccccccagggcgagaacctggccgctgacctgggcctgacagccctgatcctggaccaggaccagcagggcatccccagctgccctggagagggctggatcagaggagctgccagcgagtggcccctgctgagcagcgagaagcacctgcagcccagccaggcccagcctgagaccagcatctttgatgtgctgaaggagcaggcccagcccccagaaaatggcaaggagaccagccccagccaccctggcttcaaggaccagggcgctgacagcagccagatccacgtgcctgtggagccccaggaggacaacaacctgcccacccacggcggccaggagcaggccctgggcagcgagctgcagagccagctgcccaagggcaccctgagtgacacccccaccagcagccccacagacatggtgtgggagagcagcctgacagaggagagcgagctgagcgcccccacccggcagaagctgcctgccctgggggagaagaggcctgagggcgcctgtggagatggccagagcagccgggtgtccccacctgctgctgatgtgctgaaggacttcagcctggccggcaacttcagcaggaaggagacctgctgcaccggccagggccccaacaagagccagcaggccctggctgatgccctggaggagggcagccagcacgaggaggcctgccagaggcaccctggggccagcgaggccgcagatggctgcagccccctgtggggcctgagcaagcgggagatggccagcggcaacacaggagaggccccaccctgccagcctgacagcgtggccctgctggatgctgtgccctgcctgcctgccctggccccagccagccctggggtgacccccacccaggatgcccctgagacagaggcctgtgatgagacccaggagggccggcagcagcctgtgcctgccccccagcagaagatggagtgctgggccaccagtgatgctgagagccccaagctgctggccagcttccccagcgctggggagcagggcggggaggccggggctgctgagaccggcggcagcgctggggccggggaccccgggaagcagcaggcccctgagaagccaggagaggccaccctgagctgtggcctgctgcagacagagcactgcctgaccagcggggaggaggccagcaccagcgccctgcgggagagctgccaggccgagcaccccatggccagctgccaggatgccctgctgcctgcccgggagctgggcggcatccccaggagcaccatggacttcagcacccaccaggccgtgcctgaccccaaggagctgctgctgagcggccccccagaggtggccgccccagacaccccctacctgcacgtggacagcgctgcccagagaggagcagaagattctggagtgaaggctgtgagcagcgctgacccccgggcccctggagagagcccctgccctgtgggggagccccccctggccctggagaatgctgccagcctgaagctgtttgctggcagcctggcccccctgctgcagcctggagctgctggaggagagatcccagctgtgcaggccagcagcggcagccccaaggcccggaccacagagggccctgtggacagcatgccctgcctggacaggatgcccctgctggccaagggcaagcaggccaccggggaggagaaggccgccacagcccctggagctggggccaaggccagcggggagggcatggctggagatgctgctggggagacagagggctccatggagaggatgggagagcccagccaggaccccaagcagggcaccagcggaggagtggacaccagcagcgagcagatcgccaccctgaccggcttcccagacttccgggagcacatcgccaagatctttgagaagcctgtgctgggcgccctggccaccccaggagagaaggccggggccggccgctctgctgtgggcaaggacctgacccggcccctgggccctgagaagctgctggatggccccccaggagtggatgtgaccctgctgcctgcccccccagcccggctgcaggtggagaagaagcagcagctggccggggaggccgagatcagccacctggccctgcaggaccctgccagtgacaagctgctgggccctgctggcctgacctgggagaggaacctgcccggggccggcgtgggcaaggagatggccggcgtgccccccaccctgagagaagatgagaggcctgagggccctggggccgcctggccaggcctggagggccaggcctacagccagctggagaggagccggcaggagctggccagcggcctgcccagccctgctgccacccaggagctgcctgtggagagagctgctgccttccaggtggccccccacagccacggggaggaggccgtggcccaggaccgcatccccagcggcaagcagcaccaggagaccagcgcctgtgacagcccccacggggaggatggccctggggactttgcccacactggagtgcccggccacgtgcccaggagcacctgtgcccccagcccccagcgggaggtgctgactgtgcctgaggccaacagcgagccctggaccctggacaccctgggcggggagcggcggcctggggtgacagctggcatcctggagatgagaaatgccctgggcaaccagagcaccccagcccccccaactggagaggtggccgacacccccctggagcccgggaaggtggccggggccgccggggaggccgagggggacatcaccctgagcacagctgagacccaggcctgtgccagcggggacctgcctgaggccggcaccaccaggaccttctctgtggtggccggggacctggtgctgcccggcagctgccaggaccctgcctgcagcgacaaggcccctggcatggagggcacagctgccctgcatggagacagccctgcccggccccagcaggccaaggagcagcccggccctgagcggcccatcccagctggagatggcaaggtgtgtgtgagcagccccccagagccagatgagacccatgaccccaagctgcagcacctggcccctgaggagctgcacacagaccgggagagccccaggcctggccccagcatgctgcccagcgtgcccaagaaggatgccccccgggtgatggacaaggtgaccagtgatgagaccagaggagctgagggcacagagagcagccctgtggctgatgacatcatccagcctgctgccccagctgacctggagagccccaccctggccgccagcagctaccatggagatgtggtgggccaggtgtccacagacctgattgcccagagcatcagccctgctgctgcccacgccggcctgcccccatctgctgctgagcacatcgtgagccccagcgccccagctggggacagagtggaggccagcacccccagctgcccagaccctgccaaggacctgagccgcagcagtgacagcgaggaggcctttgagaccccagagagcaccacccctgtgaaggcccccccagcccctcctcctcctcctcctgaggtgattcctgagcctgaggtgtccacccagcccccacctgaggagcccggctgcggcagcgagaccgtgcctgtgcctgatggccccaggagtgacagcgtggagggcagccccttccggccccccagccacagcttctctgctgtgtttgatgaggacaagcccatcgccagcagcggcacctacaacctggactttgacaacatcgagctggtggacaccttccagaccctggagccccgggccagtgatgccaagaaccaggagggcaaggtgaacaccaggaggaagagcacagattctgtgcccatcagcaagagcaccctgagccgcagcctgagcctgcaggccagtgactttgatggagccagcagcagcggcaaccctgaggccgtggccctggccccagatgcctacagcacaggcagcagcagcgccagcagcaccctgaagaggaccaagaagccccggccccccagcctgaagaagaagcagaccaccaagaagcccacagagaccccacctgtgaaggagacccagcaggagccagatgaggagagcctggtgcccagcggggagaacctggccagcgagaccaagacagaaagtgccaagacagagggccccagccctgccctgctggaggagacccccctggagcctgctgtgggccccaaggccgcctgccccctggacagcgagagcgctgagggcgtggtgcccccagccagcggcggcggccgggtgcagaacagcccccctgtgggcaggaagaccctgcccctgaccacagcccctgaggccggggaggtgacccccagcgacagcggcggccaggaggacagccctgccaagggcctgtctgtgcggctggagtttgactacagcgaggacaagagctcctgggacaaccagcaggagaaccccccacccaccaagaagattggcaagaagcctgtggccaagatgcccctgcggcggcccaagatgaagaagaccccagagaagctggacaacaccccagccagcccccccaggagccctgctgagcccaatgacatccccatcgccaagggcacctacacctttgatattgacaagtgggatgaccccaacttcaaccccttcagcagcaccagcaagatgcaggagagccccaagctgccccagcagagctacaactttgatcctgacacctgtgatgaatctgtggaccccttcaagaccagcagcaagacccccagcagccccagcaagagccctgccagctttgagatcccagccagcgccatggaggccaacggggtggatggagatggcctgaacaagccagccaagaagaagaagacccccctgaagacagacaccttccgggtgaagaagagccccaagaggagccccctgagtgacccccccagccaggaccccaccccagctgccaccccagagaccccacctgtgatctctgctgtggtgcacgccacagatgaggagaagctggccgtgaccaaccagaagtggacctgcatgacagtggacctggaggccgacaagcaggactacccccagcccagcgacctgagcacctttgtgaatgagaccaagttcagcagccccacagaggagctggactacagaaacagctatgaaattgagtacatggagaagattggcagcagcctgccccaggatgatgatgcccccaagaagcaggccctgtacctgatgtttgacaccagccaggagagccctgtgaagagcagccctgtgaggatgtctgagagccccaccccctgcagcggcagcagctttgaggagacagaggccctggtgaacacagctgccaagaaccagcaccctgtgccccggggcctggcccccaaccaggagagccacctgcaggtgcctgagaagagcagccagaaggagctggaggccatgggcctgggcaccccatctgaggccatcgagatcacagcccctgagggcagctttgccagcgcagatgccctgctgagccggctggcccaccctgtgtccctgtgtggggccctggactacctggagccagacctggccgagaagaacccccccctgtttgcccagaagctgcaggaggagctggagtttgccatcatgagaattgaggccctgaagctggcccggcagatcgccctggccagccgcagccaccaggatgccaagcgggaggccgcccaccccacagatgtgtccatcagcaagacagccctgtacagcagaattggaacagctgaggtggagaagccagctggcctgctcttccagcagcctgacctggacagcgccctgcagatcgcccgggcagagatcatcaccaaggagcgggaggtgtctgagtggaaggacaagtatgaggagagccggcgggaggtgatggagatgaggaagatcgtggccgagtatgagaagaccatcgcccagatgattgaagatgagcagcgggagaagtctgtgagccaccagacagtgcagcagctggtgctggagaaggagcaggccctggccgacctgaacagcgtggagaagagcctggccgacctcttcagaagatatgagaagatgaaggaggtgctggagggcttcaggaagaatgaggaggtgctgaagagatgtgcccaggagtacctgagccgggtgaagaaggaggagcagcgctaccaggccctgaaggtgcatgctgaggagaagctggaccgggccaatgctgagatcgcccaggtgcggggcaaggcccagcaggagcaggccgcccaccaggccagcctgaggaaggagcagctgcgggtggatgccctggagaggaccctggagcagaagaacaaggagattgaggagctgaccaagatctgtgatgagctgattgccaagatgggcaagagctag

SEQ ID NO: 173731 - DNA, 8586 bp, synthetic construct
  misc_feature 1..8586: note = Description of Artificial Sequence: Synthetic coding sequence
  source 1..8586: mol_type = other DNA
cagaggaccctgagcgcccagacccccaggtctgcccagcccccaggcaacagccagaacatcaagaggaagcagcaggacaccccaggcagcccagaccacagagatgccagcagcatcggctctgtgggcctgggcggcttctgcacagccagcgagagcagcgccagcctggacccctgcctggtgtccccagaggtgacagagcccaggaaggacccccagggcgcccggggccctgagggcagcctgctgcccagccccccacccagccaggagcgggagcaccccagcagctccatgccctttgctgaatgtcctcctgagggctgcctggccagccctgctgctgccccagaagatggcccccagacccagagcccccggcgggagcccgccccaaatgcccctggggacattgctgctgccttccctgctgagcgggacagcagcaccccctaccaggagattgctgctgtgcccagcgctggccgggagcggcagcccaaggaggagggccagaagagcagcttctccttcagcagcggcatcgaccagagccctggcatgagccctgtgcccctgcgggagcccatgaaggcccccctgtgtggggagggggaccagcccggcggctttgagagccaggagaaggaggccgccggcggcttccccccagctgagagccggcagggcgtggcctctgtgcaggtgaccccagaggccccagctgctgcccagcagggcacagagagcagcgctgtgctggagaagagccccctgaagcccatggcccccatcccccaggaccctgccccccgggccagtgaccgggagcggggccagggcgaggccccaccccagtacctgacagatgacctggagttcctgcgggcctgccacctgcccaggagcaacagcggggccgcccctgaggccgaggtgaatgctgccagccaggagagctgccagcagcctgtgggcgcctacctgccccacgccgagctgccctggggcctgcccagccctgccctggtgcctgaggccggcggcagcggcaaggaggccctggacaccattgatgtgcagggccacccccagacaggcatgaggggcaccaagcccaaccaggtggtgtgtgtggccgccggcggccagcctgagggcggcctgcctgtgtccccagagcccagcctgctgacccccacagaggaggcccacccagccagcagcctggccagcttccctgctgcccagatccccatcgctgtggaggagcccggcagcagcagccgggagagcgtgtccaaggccggcatgcctgtgtctgcagatgctgccaaggaggtggtggatgctggcctggtgggcctggagcggcaggtgtctgacctgggcagcaagggggagcaccctgagggggaccccggggaggtgcctgcccccagcccccaggagcggggggagcacctgaacacagagcagagccatgaggtgcagcccggggtgcccccaccacccctgcccaaggagcagagccatgaggtgcagcccggggcccctcctccacccctgcccaaggcccccagcgagagcgcccggggccccccaggccccacagatggagccaaggtgcatgaggacagcaccagccctgctgtggccaaggagggcagccgcagccctggggacagccctgggggcaaggaggaggcccctgagcccccagatggaggagaccccggcaacctgcagggcgaggacagccaggccttcagcagcaagagggaccctgaggtgggcaaggatgagctgagcaagcccagcagtgatgctgagagccgggaccaccccagcagccacagcgcccagccccccaggaagggcggggccggccacacagatggcccccacagccagacagctgaggctgatgccagcggcctgccccacaagctgggggaggaggaccctgtgctgccccctgtgcctgatggagctggggagcccaccgtgcctgagggcgccatctgggagggcagcggcctgcagcccaagtgcccagacaccctgcagagccgggagggcctgggccgcatggagagcttcctgaccctggagagcgagaagagtgacttcccccccacccctgtggccgaggtggcccccaaggcccaggagggggagagcaccctggagatcaggaagatgggcagctgtgatggagagggcctgctgaccagcccagaccagccccggggccctgcctgtgatgccagccggcaggagttccacgccggcgtgccccaccccccccagggcgagaacctggccgctgacctgggcctgacagccctgatcctggaccaggaccagcagggcatccccagctgccctggagagggctggatcagaggagctgccagcgagtggcccctgctgagcagcgagaagcacctgcagcccagccaggcccagcctgagaccagcatctttgatgtgctgaaggagcaggcccagcccccagaaaatggcaaggagaccagccccagccaccctggcttcaaggaccagggcgctgacagcagccagatccacgtgcctgtggagccccaggaggacaacaacctgcccacccacggcggccaggagcaggccctgggcagcgagctgcagagccagctgcccaagggcaccctgagtgacacccccaccagcagccccacagacatggtgtgggagagcagcctgacagaggagagcgagctgagcgcccccacccggcagaagctgcctgccctgggggagaagaggcctgagggcgcctgtggagatggccagagcagccgggtgtccccacctgctgctgatgtgctgaaggacttcagcctggccggcaacttcagcaggaaggagacctgctgcaccggccagggccccaacaagagccagcaggccctggctgatgccctggaggagggcagccagcacgaggaggcctgccagaggcaccctggggccagcgaggccgcagatggctgcagccccctgtggggcctgagcaagcgggagatggccagcggcaacacaggagaggccccaccctgccagcctgacagcgtggccctgctggatgctgtgccctgcctgcctgccctggccccagccagccctggggtgacccccacccaggatgcccctgagacagaggcctgtgatgagacccaggagggccggcagcagcctgtgcctgccccccagcagaagatggagtgctgggccaccagtgatgctgagagccccaagctgctggccagcttccccagcgctggggagcagggcggggaggccggggctgctgagaccggcggcagcgctggggccggggaccccgggaagcagcaggcccctgagaagccaggagaggccaccctgagctgtggcctgctgcagacagagcactgcctgaccagcggggaggaggccagcaccagcgccctgcgggagagctgccaggccgagcaccccatggccagctgccaggatgccctgctgcctgcccgggagctgggcggcatccccaggagcaccatggacttcagcacccaccaggccgtgcctgaccccaaggagctgctgctgagcggccccccagaggtggccgccccagacaccccctacctgcacgtggacagcgctgcccagagaggagcagaagattctggagtgaaggctgtgagcagcgctgacccccgggcccctggagagagcccctgccctgtgggggagccccccctggccctggagaatgctgccagcctgaagctgtttgctggcagcctggcccccctgctgcagcctggagctgctggaggagagatcccagctgtgcaggccagcagcggcagccccaaggcccggaccacagagggccctgtggacagcatgccctgcctggacaggatgcccctgctggccaagggcaagcaggccaccggggaggagaaggccgccacagcccctggagctggggccaaggccagcggggagggcatggctggagatgctgctggggagacagagggctccatggagaggatgggagagcccagccaggaccccaagcagggcaccagcggaggagtggacaccagcagcgagcagatcgccaccctgaccggcttcccagacttccgggagcacatcgccaagatctttgagaagcctgtgctgggcgccctggccaccccaggagagaaggccggggccggccgctctgctgtgggcaaggacctgacccggcccctgggccctgagaagctgctggatggccccccaggagtggatgtgaccctgctgcctgcccccccagcccggctgcaggtggagaagaagcagcagctggccggggaggccgagatcagccacctggccctgcaggaccctgccagtgacaagctgctgggccctgctggcctgacctgggagaggaacctgcccggggccggcgtgggcaaggagatggccggcgtgccccccaccctgagagaagatgagaggcctgagggccctggggccgcctggccaggcctggagggccaggcctacagccagctggagaggagccggcaggagctggccagcggcctgcccagccctgctgccacccaggagctgcctgtggagagagctgctgccttccaggtggccccccacagccacggggaggaggccgtggcccaggaccgcatccccagcggcaagcagcaccaggagaccagcgcctgtgacagcccccacggggaggatggccctggggactttgcccacactggagtgcccggccacgtgcccaggagcacctgtgcccccagcccccagcgggaggtgctgactgtgcctgaggccaacagcgagccctggaccctggacaccctgggcggggagcggcggcctggggtgacagctggcatcctggagatgagaaatgccctgggcaaccagagcaccccagcccccccaactggagaggtggccgacacccccctggagcccgggaaggtggccggggccgccggggaggccgagggggacatcaccctgagcacagctgagacccaggcctgtgccagcggggacctgcctgaggccggcaccaccaggaccttctctgtggtggccggggacctggtgctgcccggcagctgccaggaccctgcctgcagcgacaaggcccctggcatggagggcacagctgccctgcatggagacagccctgcccggccccagcaggccaaggagcagcccggccctgagcggcccatcccagctggagatggcaaggtgtgtgtgagcagccccccagagccagatgagacccatgaccccaagctgcagcacctggcccctgaggagctgcacacagaccgggagagccccaggcctggccccagcatgctgcccagcgtgcccaagaaggatgccccccgggtgatggacaaggtgaccagtgatgagaccagaggagctgagggcacagagagcagccctgtggctgatgacatcatccagcctgctgccccagctgacctggagagccccaccctggccgccagcagctaccatggagatgtggtgggccaggtgtccacagacctgattgcccagagcatcagccctgctgctgcccacgccggcctgcccccatctgctgctgagcacatcgtgagccccagcgccccagctggggacagagtggaggccagcacccccagctgcccagaccctgccaaggacctgagccgcagcagtgacagcgaggaggcctttgagaccccagagagcaccacccctgtgaaggcccccccagcccctcctcctcctcctcctgaggtgattcctgagcctgaggtgtccacccagcccccacctgaggagcccggctgcggcagcgagaccgtgcctgtgcctgatggccccaggagtgacagcgtggagggcagccccttccggccccccagccacagcttctctgctgtgtttgatgaggacaagcccatcgccagcagcggcacctacaacctggactttgacaacatcgagctggtggacaccttccagaccctggagccccgggccagtgatgccaagaaccaggagggcaaggtgaacaccaggaggaagagcacagattctgtgcccatcagcaagagcaccctgagccgcagcctgagcctgcaggccagtgactttgatggagccagcagcagcggcaaccctgaggccgtggccctggccccagatgcctacagcacaggcagcagcagcgccagcagcaccctgaagaggaccaagaagccccggccccccagcctgaagaagaagcagaccaccaagaagcccacagagaccccacctgtgaaggagacccagcaggagccagatgaggagagcctggtgcccagcggggagaacctggccagcgagaccaagacagaaagtgccaagacagagggccccagccctgccctgctggaggagacccccctggagcctgctgtgggccccaaggccgcctgccccctggacagcgagagcgctgagggcgtggtgcccccagccagcggcggcggccgggtgcagaacagcccccctgtgggcaggaagaccctgcccctgaccacagcccctgaggccggggaggtgacccccagcgacagcggcggccaggaggacagccctgccaagggcctgtctgtgcggctggagtttgactacagcgaggacaagagctcctgggacaaccagcaggagaaccccccacccaccaagaagattggcaagaagcctgtggccaagatgcccctgcggcggcccaagatgaagaagaccccagagaagctggacaacaccccagccagcccccccaggagccctgctgagcccaatgacatccccatcgccaagggcacctacacctttgatattgacaagtgggatgaccccaacttcaaccccttcagcagcaccagcaagatgcaggagagccccaagctgccccagcagagctacaactttgatcctgacacctgtgatgaatctgtggaccccttcaagaccagcagcaagacccccagcagccccagcaagagccctgccagctttgagatcccagccagcgccatggaggccaacggggtggatggagatggcctgaacaagccagccaagaagaagaagacccccctgaagacagacaccttccgggtgaagaagagccccaagaggagccccctgagtgacccccccagccaggaccccaccccagctgccaccccagagaccccacctgtgatctctgctgtggtgcacgccacagatgaggagaagctggccgtgaccaaccagaagtggacctgcatgacagtggacctggaggccgacaagcaggactacccccagcccagcgacctgagcacctttgtgaatgagaccaagttcagcagccccacagaggagctggactacagaaacagctatgaaattgagtacatggagaagattggcagcagcctgccccaggatgatgatgcccccaagaagcaggccctgtacctgatgtttgacaccagccaggagagccctgtgaagagcagccctgtgaggatgtctgagagccccaccccctgcagcggcagcagctttgaggagacagaggccctggtgaacacagctgccaagaaccagcaccctgtgccccggggcctggcccccaaccaggagagccacctgcaggtgcctgagaagagcagccagaaggagctggaggccatgggcctgggcaccccatctgaggccatcgagatccgggaggccgcccaccccacagatgtgtccatcagcaagacagccctgtacagccgcatcggcacagctgaggtggagaagccagctggcctgctcttccagcagcctgacctggacagcgccctgcagatcgcccgggcagagatcatcaccaaggagcgggaggtgtctgagtggaaggacaagtatgaggagagcagaagagaggtgatggagatgaggaagatcgtggccgagtatgagaagaccatcgcccagatgattgaagatgagcagcgggagaagtctgtgagccaccagacagtgcagcagctggtgctggagaaggagcaggccctggccgacctgaacagcgtggagaagagcctggccgacctcttccgccgctatgagaagatgaaggaggtgctggagggcttcaggaagaatgaggaggtgctgaagagatgtgcccaggagtacctgagccgggtgaagaaggaggagcagcgctaccaggccctgaaggtgcacgccgaggagaagctggaccgggccaatgctgagatcgcccaggtgcggggcaaggcccagcaggagcaggccgcccaccaggccagcctgaggaaggagcagctgcgggtggatgccctggagaggaccctggagcagaagaacaaggagattgaggagctgaccaagatctgtgatgagctgattgccaagatgggcaagagctag

SEQ ID NO: 173732 - DNA, 3285 bp, synthetic construct
  misc_feature 1..3285: note = Description of Artificial Sequence: Synthetic coding sequence
  source 1..3285: mol_type = other DNA
atgggaaatgaaaacagcaccagtgacaaccagaggaccctgagcgcccagacccccaggtctgcccagcccccaggcaacagccagaacatcaagaggaagcagcaggacaccccaggcagcccagaccacagagatgccagcagcagccctgtggctgatgacatcatccagcctgctgccccagctgacctggagagccccaccctggccgccagcagctaccatggagatgtggtgggccaggtgtccacagacctgattgcccagaggagcagtgacagcgaggaggcctttgagaccccagagagcaccacccctgtgaaggcccccccagcccctcctcctcctcctcctgaggtgattcctgagcctgaggtgtccacccagcccccacctgaggagcccggctgcggcagcgagaccgtgcctgtgcctgatggccccaggagtgacagcgtggagggcagccccttccggccccccagccacagcttctctgctgtgtttgatgaggacaagcccatcgccagcagcggcacctacaacctggactttgacaacatcgagctggtggacaccttccagaccctggagccccgggccagtgatgccaagaaccaggagggcaaggtgaacaccaggaggaagagcacagattctgtgcccatcagcaagagcaccctgagccgcagcctgagcctgcaggccagtgactttgatggagccagcagcagcggcaaccctgaggccgtggccctggccccagatgcctacagcacaggcagcagcagcgccagcagcaccctgaagaggaccaagaagccccggccccccagcctgaagaagaagcagaccaccaagaagcccacagagaccccacctgtgaaggagacccagcaggagccagatgaggagagcctggtgcccagcggggagaacctggccagcgagaccaagacagaaagtgccaagacagagggccccagccctgccctgctggaggagacccccctggagcctgctgtgggccccaaggccgcctgccccctggacagcgagagcgctgagggcgtggtgcccccagccagcggcggcggccgggtgcagaacagcccccctgtgggcaggaagaccctgcccctgaccacagcccctgaggccggggaggtgacccccagcgacagcggcggccaggaggacagccctgccaagggcctgtctgtgcggctggagtttgactacagcgaggacaagagctcctgggacaaccagcaggagaaccccccacccaccaagaagattggcaagaagcctgtggccaagatgcccctgcggcggcccaagatgaagaagaccccagagaagctggacaacaccccagccagcccccccaggagccctgctgagcccaatgacatccccatcgccaagggcacctacacctttgatattgacaagtgggatgaccccaacttcaaccccttcagcagcaccagcaagatgcaggagagccccaagctgccccagcagagctacaactttgatcctgacacctgtgatgaatctgtggaccccttcaagaccagcagcaagacccccagcagccccagcaagagccctgccagctttgagatcccagccagcgccatggaggccaacggggtggatggagatggcctgaacaagccagccaagaagaagaagacccccctgaagacagacaccttccgggtgaagaagagccccaagaggagccccctgagtgacccccccagccaggaccccaccccagctgccaccccagagaccccacctgtgatctctgctgtggtgcacgccacagatgaggagaagctggccgtgaccaaccagaagtggacctgcatgacagtggacctggaggccgacaagcaggactacccccagcccagcgacctgagcacctttgtgaatgagaccaagttcagcagccccacagaggagctggactacagaaacagctatgaaattgagtacatggagaagattggcagcagcctgccccaggatgatgatgcccccaagaagcaggccctgtacctgatgtttgacaccagccaggagagccctgtgaagagcagccctgtgaggatgtctgagagccccaccccctgcagcggcagcagctttgaggagacagaggccctggtgaacacagctgccaagaaccagcaccctgtgccccggggcctggcccccaaccaggagagccacctgcaggtgcctgagaagagcagccagaaggagctggaggccatgggcctgggcaccccatctgaggccatcgagatcacagcccctgagggcagctttgccagcgcagatgccctgctgagccggctggcccaccctgtgtccctgtgtggggccctggactacctggagccagacctggccgagaagaacccccccctgtttgcccagaagctgcaggaggagctggagtttgccatcatgagaattgaggccctgaagctggcccggcagatcgccctggccagccgcagccaccaggatgccaagcgggaggccgcccaccccacagatgtgtccatcagcaagacagccctgtacagcagaattggaacagctgaggtggagaagccagctggcctgctcttccagcagcctgacctggacagcgccctgcagatcgcccgggcagagatcatcaccaaggagcgggaggtgtctgagtggaaggacaagtatgaggagagccggcgggaggtgatggagatgaggaagatcgtggccgagtatgagaagaccatcgcccagatgattgaagatgagcagcgggagaagtctgtgagccaccagacagtgcagcagctggtgctggagaaggagcaggccctggccgacctgaacagcgtggagaagagcctggccgacctcttcagaagatatgagaagatgaaggaggtgctggagggcttcaggaagaatgaggaggtgctgaagagatgtgcccaggagtacctgagccgggtgaagaaggaggagcagcgctaccaggccctgaaggtgcatgctgaggagaagctggaccgggccaatgctgagatcgcccaggtgcggggcaaggcccagcaggagcaggccgcccaccaggccagcctgaggaaggagcagctgcgggtggatgccctggagaggaccctggagcagaagaacaaggagattgaggagctgaccaagatctgtgatgagctgattgccaagatgggcaagagctag

SEQ ID NO: 173733 - DNA, 2991 bp, synthetic construct
  misc_feature 1..2991: note = Description of Artificial Sequence: Synthetic coding sequence
  source 1..2991: mol_type = other DNA
atgggcggcagccagagcctgcagcctgccccagccagtgacctgaacctggaggccagcgaggccatgagcagtgacagcgaggaggcctttgagaccccagagagcaccacccctgtgaaggcccccccagcccctcctcctcctcctcctgaggtgattcctgagcctgaggtgtccacccagcccccacctgaggagcccggctgcggcagcgagaccgtgcctgtgcctgatggccccaggagtgacagcgtggagggcagccccttccggccccccagccacagcttctctgctgtgtttgatgaggacaagcccatcgccagcagcggcacctacaacctggactttgacaacatcgagctggtggacaccttccagaccctggagccccgggccagtgatgccaagaaccaggagggcaaggtgaacaccaggaggaagagcacagattctgtgcccatcagcaagagcaccctgagccgcagcctgagcctgcaggccagtgactttgatggagccagcagcagcggcaaccctgaggccgtggccctggccccagatgcctacagcacaggcagcagcagcgccagcagcaccctgaagaggaccaagaagccccggccccccagcctgaagaagaagcagaccaccaagaagcccacagagaccccacctgtgaaggagacccagcaggagccagatgaggagagcctggtgcccagcggggagaacctggccagcgagaccaagacagaaagtgccaagacagagggccccagccctgccctgctggaggagacccccctggagcctgctgtgggccccaaggccgcctgccccctggacagcgagagcgctgagggcgtggtgcccccagccagcggcggcggccgggtgcagaacagcccccctgtgggcaggaagaccctgcccctgaccacagcccctgaggccggggaggtgacccccagcgacagcggcggccaggaggacagccctgccaagggcctgtctgtgcggctggagtttgactacagcgaggacaagagctcctgggacaaccagcaggagaaccccccacccaccaagaagattggcaagaagcctgtggccaagatgcccctgcggcggcccaagatgaagaagaccccagagaagctggacaacaccccagccagcccccccaggagccctgctgagcccaatgacatccccatcgccaagggcacctacacctttgatattgacaagtgggatgaccccaacttcaaccccttcagcagcaccagcaagatgcaggagagccccaagctgccccagcagagctacaactttgatcctgacacctgtgatgaatctgtggaccccttcaagaccagcagcaagacccccagcagccccagcaagagccctgccagctttgagatcccagccagcgccatggaggccaacggggtggatggagatggcctgaacaagccagccaagaagaagaagacccccctgaagacagacaccttccgggtgaagaagagccccaagaggagccccctgagtgacccccccagccaggaccccaccccagctgccaccccagagaccccacctgtgatctctgctgtggtgcacgccacagatgaggagaagctggccgtgaccaaccagaagtggacctgcatgacagtggacctggaggccgacaagcaggactacccccagcccagcgacctgagcacctttgtgaatgagaccaagttcagcagccccacagaggagctggactacagaaacagctatgaaattgagtacatggagaagattggcagcagcctgccccaggatgatgatgcccccaagaagcaggccctgtacctgatgtttgacaccagccaggagagccctgtgaagagcagccctgtgaggatgtctgagagccccaccccctgcagcggcagcagctttgaggagacagaggccctggtgaacacagctgccaagaaccagcaccctgtgccccggggcctggcccccaaccaggagagccacctgcaggtgcctgagaagagcagccagaaggagctggaggccatgggcctgggcaccccatctgaggccatcgagatcacagcccctgagggcagctttgccagcgcagatgccctgctgagccggctggcccaccctgtgtccctgtgtggggccctggactacctggagccagacctggccgagaagaacccccccctgtttgcccagaagctgcagcgggaggccgcccaccccacagatgtgtccatcagcaagacagccctgtacagcagaattggaacagctgaggtggagaagccagctggcctgctcttccagcagcctgacctggacagcgccctgcagatcgcccgggcagagatcatcaccaaggagcgggaggtgtctgagtggaaggacaagtatgaggagagccggcgggaggtgatggagatgaggaagatcgtggccgagtatgagaagaccatcgcccagatgattgaagatgagcagcgggagaagtctgtgagccaccagacagtgcagcagctggtgctggagaaggagcaggccctggccgacctgaacagcgtggagaagagcctggccgacctcttcagaagatatgagaagatgaaggaggtgctggagggcttcaggaagaatgaggaggtgctgaagagatgtgcccaggagtacctgagccgggtgaagaaggaggagcagcgctaccaggccctgaaggtgcatgctgaggagaagctggaccgggccaatgctgagatcgcccaggtgcggggcaaggcccagcaggagcaggccgcccaccaggccagcctgaggaaggagcagctgcgggtggatgccctggagaggaccctggagcagaagaacaaggagattgaggagctgaccaagatctgtgatgagctgattgccaagatgggcaagagctag

SEQ ID NO: 173734 - DNA, 1716 bp, synthetic construct
  misc_feature 1..1716: note = Description of Artificial Sequence: Synthetic coding sequence
  source 1..1716: mol_type = other DNA
atgcccctgcggcggcccaagatgaagaagaccccagagaagctggacaacaccccagccagcccccccaggagccctgctgagcccaatgacatccccatcgccaagggcacctacacctttgatattgacaagtgggatgaccccaacttcaaccccttcagcagcaccagcaagatgcaggagagccccaagctgccccagcagagctacaactttgatcctgacacctgtgatgaatctgtggaccccttcaagaccagcagcaagacccccagcagccccagcaagagccctgccagctttgagatcccagccagcgccatggaggccaacggggtggatggagatggcctgaacaagccagccaagaagaagaagacccccctgaagacagtgaagaagagccccaagaggagccccctgagtgacccccccagccaggaccccaccccagctgccaccccagagaccccacctgtgatctctgctgtggtgcacgccacagatgaggagaagctggccgtgaccaaccagaagtggacctgcatgacagtggacctggaggccgacaagcaggactacccccagcccagcgacctgagcacctttgtgaatgagaccaagttcagcagccccacagaggagctggactacagaaacagctatgaaattgagtacatggagaagattggcagcagcctgccccaggatgatgatgcccccaagaagcaggccctgtacctgatgtttgacaccagccaggagagccctgtgaagagcagccctgtgaggatgtctgagagccccaccccctgcagcggcagcagctttgaggagacagaggccctggtgaacacagctgccaagaaccagcaccctgtgccccggggcctggcccccaaccaggagagccacctgcaggtgcctgagaagagcagccagaaggagctggaggccatgggcctgggcaccccatctgaggccatcgagatccgggaggccgcccaccccacagatgtgtccatcagcaagacagccctgtacagccgcatcggcacagctgaggtggagaagccagctggcctgctcttccagcagcctgacctggacagcgccctgcagatcgcccgggcagagatcatcaccaaggagcgggaggtgtctgagtggaaggacaagtatgaggagagcagaagagaggtgatggagatgaggaagatcgtggccgagtatgagaagaccatcgcccagatgattgaagatgagcagcgggagaagtctgtgagccaccagacagtgcagcagctggtgctggagaaggagcaggccctggccgacctgaacagcgtggagaagagcctggccgacctcttccgccgctatgagaagatgaaggaggtgctggagggcttcaggaagaatgaggaggtgctgaagagatgtgcccaggagtacctgagccgggtgaagaaggaggagcagcgctaccaggccctgaaggtgcacgccgaggagaagctggaccgggccaatgctgagatcgcccaggtgcggggcaaggcccagcaggagcaggccgcccaccaggccagcctgaggaaggagcagctgcgggtggatgccctggagaggaccctggagcagaagaacaaggagattgaggagctgaccaagatctgtgatgagctgattgccaagatgggcaagagctag

SEQ ID NO: 173735 - DNA, 8847 bp, synthetic construct; identical to SEQ ID NO: 173730
  misc_feature 1..8847: note = Description of Artificial Sequence: Synthetic coding sequence
  source 1..8847: mol_type = other DNA

SEQ ID NO: 173736 - DNA, 8628 bp, synthetic construct
  misc_feature 1..8628: note = Description of Artificial Sequence: Synthetic coding sequence
  source 1..8628: mol_type = other DNA
atgggaaatgaaaacagcaccagtgacaaccagaggaccctgagcgcccagacccccaggtctgcccagcccccaggcaacagccagaacatcaagaggaagcagcaggacaccccaggcagcccagaccacagagatgccagcagcatcggctctgtgggcctgggcggcttctgcacagccagcgagagcagcgccagcctggacccctgcctggtgtccccagaggtgacagagcccaggaaggacccccagggcgcccggggccctgagggcagcctgctgcccagccccccacccagccaggagcgggagcaccccagcagctccatgccctttgctgaatgtcctcctgagggctgcctggccagccctgctgctgccccagaagatggcccccagacccagagcccccggcgggagcccgccccaaatgcccctggggacattgctgctgccttccctgctgagcgggacagcagcaccccctaccaggagattgctgctgtgcccagcgctggccgggagcggcagcccaaggaggagggccagaagagcagcttctccttcagcagcggcatcgaccagagccctggcatgagccctgtgcccctgcgggagcccatgaaggcccccctgtgtggggagggggaccagcccggcggctttgagagccaggagaaggaggccgccggcggcttccccccagctgagagccggcagggcgtggcctctgtgcaggtgaccccagaggccccagctgctgcccagcagggcacagagagcagcgctgtgctggagaagagccccctgaagcccatggcccccatcccccaggaccctgccccccgggccagtgaccgggagcggggccagggcgaggccccaccccagtacctgacagatgacctggagttcctgcgggcctgccacctgcccaggagcaacagcggggccgcccctgaggccgaggtgaatgctgccagccaggagagctgccagcagcctgtgggcgcctacctgccccacgccgagctgccctggggcctgcccagccctgccctggtgcctgaggccggcggcagcggcaaggaggccctggacaccattgatgtgcagggccacccccagacaggcatgaggggcaccaagcccaaccaggtggtgtgtgtggccgccggcggccagcctgagggcggcctgcctgtgtccccagagcccagcctgctgacccccacagaggaggcccacccagccagcagcctggccagcttccctgctgcccagatccccatcgctgtggaggagcccggcagcagcagccgggagagcgtgtccaaggccggcatgcctgtgtctgcagatgctgccaaggaggtggtggatgctggcctggtgggcctggagcggcaggtgtctgacctgggcagcaagggggagcaccctgagggggaccccggggaggtgcctgcccccagcccccaggagcggggggagcacctgaacacagagcagagccatgaggtgcagcccggggtgcccccaccacccctgcccaaggagcagagccatgaggtgcagcccggggcccctcctccacccctgcccaaggcccccagcgagagcgcccggggccccccaggccccacagatggagccaaggtgcatgaggacagcaccagccctgctgtggccaaggagggcagccgcagccctggggacagccctgggggcaaggaggaggcccctgagcccccagatggaggagaccccggcaacctgcagggcgaggacagccaggccttcagcagcaagagggaccctgaggtgggcaaggatgagctgagcaagcccagcagtgatgctgagagccgggaccaccccagcagccacagcgcccagccccccaggaagggcggggccggccacacagatggcccccacagccagacagctgaggctgatgccagcggcctgccccacaagctgggggaggaggaccctgtgctgccccctgtgcctgatggagctggggagcccaccgtgcctgagggcgccatctgggagggcagcggcctgcagcccaagtgcccagacaccctgcagagccgggagggcctgggccgcatggagagcttcctgaccctggagagcgagaagagtgacttcccccccacccctgtggccgaggtggcccccaaggcccaggagggggagagcaccctggagatcaggaagatgggcagctgtgatggagagggcctgctgaccagcccagaccagccccggggccctgcctgtgatgccagccggcaggagttccacgccggcgtgccccaccccccccagggcgagaacctggccgctgacctgggcctgacagccctgatcctggaccaggaccagcagggcatccccagctgccctggagagggctggatcagaggagctgccagcgagtggcccctgctgagcagcgagaagcacctgcagcccagccaggcccagcctgagaccagcatctttgatgtgctgaaggagcaggcccagcccccagaaaatggcaaggagaccagccccagccaccctggcttcaaggaccagggcgctgacagcagccagatccacgtgcctgtggagccccaggaggacaacaacctgcccacccacggcggccaggagcaggccctgggcagcgagctgcagagccagctgcccaagggcaccctgagtgacacccccaccagcagccccacagacatggtgtgggagagcagcctgacagaggagagcgagctgagcgcccccacccggcagaagctgcctgccctgggggagaagaggcctgagggcgcctgtggagatggccagagcagccgggtgtccccacctgctgctgatgtgctgaaggacttcagcctggccggcaacttcagcaggaaggagacctgctgcaccggccagggccccaacaagagccagcaggccctggctgatgccctggaggagggcagccagcacgaggaggcctgccagaggcaccctggggccagcgaggccgcagatggctgcagccccctgtggggcctgagcaagcgggagatggccagcggcaacacaggagaggccccaccctgccagcctgacagcgtggccctgctggatgctgtgccctgcctgcctgccctggccccagccagccctggggtgacccccacccaggatgcccctgagacagaggcctgtgatgagacccaggagggccggcagcagcctgtgcctgccccccagcagaagatggagtgctgggccaccagtgatgctgagagccccaagctgctggccagcttccccagcgctggggagcagggcggggaggccggggctgctgagaccggcggcagcgctggggccggggaccccgggaagcagcaggcccctgagaagccaggagaggccaccctgagctgtggcctgctgcagacagagcactgcctgaccagcggggaggaggccagcaccagcgccctgcgggagagctgccaggccgagcaccccatggccagctgccaggatgccctgctgcctgcccgggagctgggcggcatccccaggagcaccatggacttcagcacccaccaggccgtgcctgaccccaaggagctgctgctgagcggccccccagaggtggccgccccagacaccccctacctgcacgtggacagcgctgcccagagaggagcagaagattctggagtgaaggctgtgagcagcgctgacccccgggcccctggagagagcccctgccctgtgggggagccccccctggccctggagaatgctgccagcctgaagctgtttgctggcagcctggcccccctgctgcagcctggagctgctggaggagagatcccagctgtgcaggccagcagcggcagccccaaggcccggaccacagagggccctgtggacagcatgccctgcctggacaggatgcccctgctggccaagggcaagcaggccaccggggaggagaaggccgccacagcccctggagctggggccaaggccagcggggagggcatggctggagatgctgctggggagacagagggctccatggagaggatgggagagcccagccaggaccccaagcagggcaccagcggaggagtggacaccagcagcgagcagatcgccaccctgaccggcttcccagacttccgggagcacatcgccaagatctttgagaagcctgtgctgggcgccctggccaccccaggagagaaggccggggccggccgctctgctgtgggcaaggacctgacccggcccctgggccctgagaagctgctggatggccccccaggagtggatgtgaccctgctgcctgcccccccagcccggctgcaggtggagaagaagcagcagctggccggggaggccgagatcagccacctggccctgcaggaccctgccagtgacaagctgctgggccctgctggcctgacctgggagaggaacctgcccggggccggcgtgggcaaggagatggccggcgtgccccccaccctgagagaagatgagaggcctgagggccctggggccgcctggccaggcctggagggccaggcctacagccagctggagaggagccggcaggagctggccagcggcctgcccagccctgctgccacccaggagctgcctgtggagagagctgctgccttccaggtggccccccacagccacggggaggaggccgtggcccaggaccgcatccccagcggcaagcagcaccaggagaccagcgcctgtgacagcccccacggggaggatggccctggggactttgcccacactggagtgcccggccacgtgcccaggagcacctgtgcccccagcccccagcgggaggtgctgactgtgcctgaggccaacagcgagccctggaccctggacaccctgggcggggagcggcggcctggggtgacagctggcatcctggagatgagaaatgccctgggcaaccagagcaccccagcccccccaactggagaggtggccgacacccccctggagcccgggaaggtggccggggccgccggggaggccgagggggacatcaccctgagcacagctgagacccaggcctgtgccagcggggacctgcctgaggccggcaccaccaggaccttctctgtggtggccggggacctggtgctgcccggcagctgccaggaccctgcctgcagcgacaaggcccctggcatggagggcacagctgccctgcatggagacagccctgcccggccccagcaggccaaggagcagcccggccctgagcggcccatcccagctggagatggcaaggtgtgtgtgagcagccccccagagccagatgagacccatgaccccaagctgcagcacctggcccctgaggagctgcacacagaccgggagagccccaggcctggccccagcatgctgcccagcgtgcccaagaaggatgccccccgggtgatggacaaggtgaccagtgatgagaccagaggagctgagggcacagagaggtctgccaaggacatcggcctgtggaaggccatgatgcccagcctggacacagacaccctggatgtgctggagaggagagtggtgctgatccagcacgagttcctgcacaagaaggaggccaacggccacagccgcttcatgtacagcagccctgtggctgatgacatcatccagcctgctgccccagctgacctggagagccccaccctggccgccagcagctaccatggagatgtggtgggccaggtgtccacagacctgattgcccagaggagcagtgacagcgaggaggcctttgagaccccagagagcaccacccctgtgaaggcccccccagcccctcctcctcctcctcctgaggtgattcctgagcctgaggtgtccacccagcccccacctgaggagcccggctgcggcagcgagaccgtgcctgtgcctgatggccccaggagtgacagcgtggagggcagccccttccggccccccagccacagcttctctgctgtgtttgatgaggacaagcccatcgccagcagcggcacctacaacctggactttgacaacatcgagctggtggacaccttccagaccctggagccccgggccagtgatgccaagaaccaggagggcaaggtgaacaccaggaggaagagcacagattctgtgcccatcagcaagagcaccctgagccgcagcctgagcctgcaggccagtgactttgatggagccagcagcagcggcaaccctgaggccgtggccctggccccagatgcctacagcacaggcagcagcagcgccagcagcaccctgaagaggaccaagaagccccggccccccagcctgaagaagaagcagaccaccaagaagcccacagagaccccacctgtgaaggagacccagcaggagccagatgaggagagcctggtgcccagcggggagaacctggccagcgagaccaagacagaaagtgccaagacagagggccccagccctgccctgctggaggagacccccctggagcctgctgtgggccccaaggccgcctgccccctggacagcgagagcgctgagggcgtggtgcccccagccagcggcggcggccgggtgcagaacagcccccctgtgggcaggaagaccctgcccctgaccacagcccctgaggccggggaggtgacccccagcgacagcggcggccaggaggacagccctgccaagggcctgtctgtgcggctggagtttgactacagcgaggacaagagctcctgggacaaccagcaggagaaccccccacccaccaagaagattggcaagaagcctgtggccaagatgcccctgcggcggcccaagatgaagaagaccccagagaagctggacaacaccccagccagcccccccaggagccctgctgagcccaatgacatccccatcgccaagggcacctacacctttgatattgacaagtgggatgaccccaacttcaaccccttcagcagcaccagcaagatgcaggagagccccaagctgccccagcagagctacaactttgatcctgacacctgtgatgaatctgtggaccccttcaagaccagcagcaagacccccagcagccccagcaagagccctgccagctttgagatcccagccagcgccatggaggccaacggggtggatggagatggcctgaacaagccagccaagaagaagaagacccccctgaagacagacaccttccgggtgaagaagagccccaagaggagccccctgagtgacccccccagccaggaccccaccccagctgccaccccagagaccccacctgtgatctctgctgtggtgcacgccacagatgaggagaagctggccgtgaccaaccagaagtggacctgcatgacagtggacctggaggccgacaagcaggactacccccagcccagcgacctgagcacctttgtgaatgagaccaagttcagcagccccacagaggagctggactacagaaacagctatgaaattgagtacatggagaagattggcagcagcctgccccaggatgatgatgcccccaagaagcaggccctgtacctgatgtttgacaccagccaggagagccctgtgaagagcagccctgtgaggatgtctgagagccccaccccctgcagcggcagcagctttgaggagacagaggccctggtgaacacagctgccaagaaccagcaccctgtgccccggggcctggcccccaaccaggagagccacctgcaggtgcctgagaagagcagccagaaggagctggaggccatgggcctgggcaccccatctgaggccatcgagatccgggaggccgcccaccccacagatgtgtccatcagcaagacagccctgtacagccgcatcggcacagctgaggtggagaagccagctggcctgctcttccagcagcctgacctggacagcgccctgcagatcgcccgggcagagatcatcaccaaggagcgggaggtgtctgagtggaaggacaagtatgaggagagcagaagagaggtgatggagatgaggaagatcgtggccgagtatgagaagaccatcgcccagatgattgaagatgagcagcgggagaagtctgtgagccaccagacagtgcagcagctggtgctggagaaggagcaggccctggccgacctgaacagcgtggagaagagcctggccgacctcttccgccgctatgagaagatgaaggaggtgctggagggcttcaggaagaatgaggaggtgctgaagagatgtgcccaggagtacctgagccgggtgaagaaggaggagcagcgctaccaggccctgaaggtgcacgccgaggagaagctggaccgggccaatgctgagatcgcccaggtgcggggcaaggcccagcaggagcaggccgcccaccaggccagcctgaggaaggagcagctgcgggtggatgccctggagaggaccctggagcagaagaacaaggagattgaggagctgaccaagatctgtgatgagctgattgccaagatgggcaagagctag

SEQ ID NO: 173737 - DNA, 3285 bp, synthetic construct; identical to SEQ ID NO: 173732
  misc_feature 1..3285: note = Description of Artificial Sequence: Synthetic coding sequence
  source 1..3285: mol_type = other DNA

SEQ ID NO: 173738 - DNA, 2517 bp, synthetic construct
  misc_feature 1..2517: note = Description of Artificial Sequence: Synthetic coding sequence
  source 1..2517: mol_type = other DNA
atgagcctgcaggtgctgaatgacaagaatgtgtccaatgagaagaacacagagaactgtgacttcctgttcagccccccagaggtgacaggccgcagctctgtgctgcgggtgtcccagaaggaaaatgtgccccccaagaacctggccaaggccatgaaggtgaccttccagacccccctgcgggacccccagacccaccgcatcctgagccccagcatggccagcaagctggaggcccccttcacccaggatgacaccctgggcctggagaacagccaccctgtgtggacccagaaggagaaccagcagctgatcaaggaggtggatgccaagaccacccacggcatcctgcagaagcctgtggaggccgacacagacctgctgggagatgccagccctgccttcggcagcggcagcagcagcgagagcggccctggggccctggccgacctggactgcagcagcagcagccagagccctggcagcagcgagaaccagatggtgtccccaggcaaggtgtctggcagccctgagcaggccgtggaggagaacctgagcagctacagcctggacagaagagtgaccccagccagcgagaccctggaggacccctgcaggacagagagccagcacaaggccgagaccccccacggggctgaggaggagtgcaaggccgagaccccccacggggctgaggaggagtgccgccacggcggcgtgtgtgccccagctgctgtggccaccagccccccaggggccatccccaaggaggcctgtggcggggcccccctgcagggcctgcctggagaggccctgggctgcccagctggggtgggcacccctgtgcctgcagatggcacccagaccctgacctgtgcccacaccagcgcccctgagagcacagcccccaccaaccacctggtggccggccgggccatgaccctgagcccccaggaggaggtggccgccggccagatggccagcagcagccgcagcggccctgtgaagctggagtttgatgtgtctgatggagccaccagcaagagggcccccccaccccggcggctgggggagaggagcggcctgaagccacccctgaggaaggctgctgtgcggcagcagaaggccccccaggaggtggaggaggatgatggccgcagcggggccggggaggacccccccatgcctgccagccggggcagctaccacctggactgggacaagatggatgaccccaacttcatcccctttggaggagacaccaagagcggctgcagcgaggcccagcccccagagagccctgagacccggctgggccagcctgctgctgagcagctgcatgctggccctgccacagaggagcccggcccctgcctgagccagcagctgcacagcgccagcgctgaggacacccctgtggtgcagctggccgctgagacccccacagctgagagcaaggagcgggccctgaacagcgccagcaccagcctgcccaccagctgccccggcagcgagcctgtgcccacccaccagcagggccagcctgccctggagctgaaggaggagagcttccgggaccctgctgaggtgctgggcaccggggctgaggtggactacctggagcagtttggcaccagcagcttcaaggagagcgccctgaggaagcagagcctgtacctgaagtttgaccccctgctgcgggacagccctggccggcctgtgcctgtggccacagagaccagctccatgcatggagccaatgagacccccagcggccggccccgggaggccaagctggtggagtttgacttcctgggcgccctggacatccctgtgcccggccccccacctggggtgcctgcccctgggggcccccccctgagcacaggccccatcgtggacctgctgcagtacagccagaaggacctggatgctgtggtgaaggccacccaggaggagaaccgggagctgcggagccgctgtgaggagctgcacggcaagaacctggagctgggcaagatcatggacagatttgaggaggtggtgtaccaggccatggaggaggtgcagaagcagaaggagctgagcaaggccgagatccagaaggtgctgaaggagaaggaccagctgaccacagacctgaacagcatggagaagagcttcagtgacctcttcaagagatttgagaagcagaaggaggtgattgagggctacaggaagaatgaggagagcctgaagaagtgtgtggaggactacctggcccgcatcacccaggagggccagcgctaccaggccctgaaggcccatgctgaggagaagctgcagctggccaatgaggagatcgcccaggtgcgcagcaaggcccaggccgaggccctggccctgcaggccagcctgaggaaggagcagatgaggatccagagcctggagaagacagtggagcagaagaccaaggaaaatgaggagctgacccgcatctgtgatgacctgatcagcaagatggagaagatctag

SEQ ID NO: 173739 - DNA, 438 bp, synthetic construct
  misc_feature 1..438: note = Description of Artificial Sequence: Synthetic coding sequence
  source 1..438: mol_type = other DNA
atgagcctgcaggtgctgaatgacaagaatgtgtccaatgagaagaacacagagaactgtgacttcctgttcagccccccagaggtgacaggccgcagctctgtgctgcgggtgtcccagaaggaaaatgtgccccccaagaacctggccaaggccatgaaggtgaccttccagacccccctgcgggacccccagacccaccgcatcctgagccccagcatggccagcaagctggaggcccccttcacccaggatgacaccctgggcctggagaacagccaccctgtgtggacccagaaggagaaggccgccgccttcagcctgagcggcggccacgcctgtggggctgtgggcagccgggaccccaacagccgggagcagggcgagagcctggagctgtgccagcacctggccagccacaagctgagccggcagtag

SEQ ID NO: 173740 - DNA, 666 bp, synthetic construct
  misc_feature 1..666: note = Description of Artificial Sequence: Synthetic coding sequence
  source 1..666: mol_type = other DNA
atgagcctgcaggtgctgaatgacaagaatgtgtccaatgagaagaacacagagaactgtgacttcctgttcagccccccagaggtgacaggccgcagctctgtgctgcgggtgtcccagaaggaaaatgtgccccccaagaacctggccaaggccatgaaggtgaccttccagacccccctgcgggacccccagacccaccgcatcctgagccccagcatggccagcaagctggaggcccccttcacccaggatgacaccctgggcctggagaacagccaccctgtgtggacccagaaggagaaccagcagctgatcaaggaggtggatgccaagaccacccacggcatcctgcagaagcctgtggaggccgacacagacctgctgggagatgccagccctgccttcggcagcggcagcagcagcgagagcggccctggggccctggccgacctggactgcagcagcagcagccagagccctggcagcagcgagaaccagatggtgtccccaggcaaggtgtctggcagccctgagcaggccgtggaggagaacctgagcagctacagcctggacagaagagtgaccccagccagcgagaccctggaggacccctgcaggacagagagccagcacaaggccgagaccccccacggggctgagtag

SEQ ID NO: 173741 - DNA, 696 bp, synthetic construct
  misc_feature 1..696: note = Description of Artificial Sequence: Synthetic coding sequence
  source 1..696: mol_type = other DNA
atgagcctgcaggtgctgaatgacaagaatgtgtccaatgagaagaacacagagaactgtgacttcctgttcagccccccagaggtgacaggccgcagctctgtgctgcgggtgtcccagaaggaaaatgtgccccccaagaacctggccaaggccatgaaggtgaccttccagacccccctgcgggacccccagacccaccgcatcctgagccccagcatggccagcaagctggaggcccccttcacccaggatgacaccctgggcctggagaacagccaccctgtgtggacccagaaggagaaccagcagctgatcaaggaggtggatgccaagaccacccacggcatcctgcagaagcctgtggaggccgacacagacctgctgggagatgccagccctgccttcggcagcggcagcagcagcgagagcggccctggggccctggccgacctggactgcagcagcagcagccagagccctggcagcagcgagaaccagatggtgtccccaggcaaggtgtctggcagccctgagcaggccgtggaggagaacctgagcagctacagcctggacagaagagtgaccccagccagcgagaccctggaggacccctgcaggacagagagccagcacaaggccgagaccccccacggggctgaggaggagtgcaaggccgagaccccccacggctag

SEQ ID NO: 173742 - DNA, 606 bp, synthetic construct
  misc_feature 1..606: note = Description of Artificial Sequence: Synthetic coding sequence
  source 1..606: mol_type = other DNA
atggccaacaagggccccagctatggcatgagccgggaggtgcagagcaagattgagaagaagtatgatgaggagctggaggagcggctggtggagtggatcatcgtgcagtgtggcccagatgtgggccgcccagaccggggccgcctgggcttccaggtgtggctgaagaatggagtcatcctgagcaagctggtgaacagcctgtacccagatggcagcaagcctgtgaaggtgcctgaaaatcctccttccatggtgttcaagcagatggagcaggtggcccagttcctgaaggctgctgaggactatggagtcatcaagacagacatgttccagacagtggacctgtttgagggcaaggacatggctgctgtgcagaggaccctgatggccctgggcagcctggccgtgaccaagaatgatggccactacagaggagaccccaactggttcatgaagaaggcccaggagcacaagcgggagttcacagagagccagctgcaggagggcaagcacgtgattggcctgcagatgggcagcaacagaggagccagccaggccggcatgacaggctacggccggccccggcagatcatctcctag

SEQ ID NO: 173743 - DNA, 108 bp, synthetic construct
  misc_feature 1..108: note = Description of Artificial Sequence: Synthetic coding sequence
  source 1..108: mol_type = other DNA
atggccaacaagggccccagctatggcatgagccgggaggtgcagcccagccggctggcctgcctgacccacaccagggtggtgcccagcgccctggccaagctgtag

SEQ ID NO: 173744 - DNA, 606 bp, synthetic construct; identical to SEQ ID NO: 173742
  misc_feature 1..606: note = Description of Artificial Sequence: Synthetic coding sequence
  source 1..606: mol_type = other DNA

SEQ ID NO: 173745 - DNA, 606 bp, synthetic construct; identical to SEQ ID NO: 173742
  misc_feature 1..606: note = Description of Artificial Sequence: Synthetic coding sequence
  source 1..606: mol_type = other DNA

SEQ ID NO: 173746 - DNA, 276 bp, synthetic construct
  misc_feature 1..276: note = Description of Artificial Sequence: Synthetic coding sequence
  source 1..276: mol_type = other DNA
atggccaacaagggccccagctatggcatgagccgggaggtgcagagcaagattgagaagaagtatgatgaggagctggaggagcggctggtggagtggatcatcgtgcagtgtggcccagatgtgggccgcccagaccggggccgcctgggcttccaggtgtggctgaagaatggagtcatcctgagcaagctggtgaacagcctgtacccagatggcagcaagcctgtgaaggtgcctgaaaatcctccttccatggtgttcaagcagatgtag

SEQ ID NO: 173747 - DNA, 606 bp, synthetic construct; identical to SEQ ID NO: 173742
  misc_feature 1..606: note = Description of Artificial Sequence: Synthetic coding sequence
  source 1..606: mol_type = other DNA

SEQ ID NO: 173748 - DNA, 606 bp, synthetic construct; identical to SEQ ID NO: 173742
  misc_feature 1..606: note = Description of Artificial Sequence: Synthetic coding sequence
  source 1..606: mol_type = other DNA

SEQ ID NO: 173749 - DNA, 600 bp, synthetic construct
  misc_feature 1..600: note = Description of Artificial Sequence: Synthetic coding sequence
  source 1..600: mol_type = other DNA
atggccaacagaggccctgcctacggcctgagccgggaggtgcagcagaagattgagaagcagtatgatgctgacctggagcagatcctgatccagtggatcaccacccagtgcaggaaggatgtgggccggccccagcccggccgggagaacttccagaactggctgaaggatggcaccgtgctgtgtgagctgatcaatgccctgtacccagagggccaggcccctgtgaagaagatccaggccagcaccatggccttcaagcagatggagcagatcagccagttcctgcaggccgctgagagatatggcatcaacaccacagacatcttccagacagtggacctgtgggagggcaagaacatggcctgtgtgcagaggaccctgatgaacctgggcggcctggccgtggccagagatgatggcctcttcagcggggaccccaactggttccccaagaagagcaaagaaaaccccaggaacttcagtgacaaccagctgcaggagggcaagaatgtcatcggcctgcagatgggcaccaacagaggagccagccaggccggcatgacaggctacggcatgccccggcagatcctgtag

SEQ ID NO: 173750 - DNA, 663 bp, synthetic construct
  misc_feature 1..663: note = Description of Artificial Sequence: Synthetic coding sequence
  source 1..663: mol_type = other DNA
atgtctgccttcagcctggccctggccctggtgagcagcccccagcccccaccacccatcggcatggccaacagaggccctgcctacggcctgagccgggaggtgcagcagaagattgagaagcagtatgatgctgacctggagcagatcctgatccagtggatcaccacccagtgcaggaaggatgtgggccggccccagcccggccgggagaacttccagaactggctgaaggatggcaccgtgctgtgtgagctgatcaatgccctgtacccagagggccaggcccctgtgaagaagatccaggccagcaccatggccttcaagcagatggagcagatcagccagttcctgcaggccgctgagagatatggcatcaacaccacagacatcttccagacagtggacctgtgggagggcaagaacatggcctgtgtgcagaggaccctgatgaacctgggcggcctggccgtggccagagatgatggcctcttcagcggggaccccaactggttccccaagaagagcaaggagaaccccaggaacttcagtgacaaccagctgcaggagggcaagaatgtgattggcctgcagatgggcaccaacagaggagccagccaggccggcatgacaggctacggcatgccccggcagatcctgtag

SEQ ID NO: 173751 - DNA, 600 bp, synthetic construct; identical to SEQ ID NO: 173749
  misc_feature 1..600: note = Description of Artificial Sequence: Synthetic coding sequence
  source 1..600: mol_type = other DNA

SEQ ID NO: 173752 - DNA, 564 bp, synthetic construct
  misc_feature 1..564: note = Description of Artificial Sequence: Synthetic coding sequence
  source 1..564: mol_type = other DNA
atggccaacagaggccctgcctacggcctgagccgggaggtgcagcagaagattgagaagcagtatgatgctgacctggagcagatcctgatccagtggatcaccacccagtgcaggaaggatgtgggccggccccagcccggccgggagaacttccagaactggctgaaggatggcaccgtgctgtgtgagctgatcaatgccctgtacccagagggccaggcccctgtgaagaagatccaggccagcaccatggccttcaagcagatggagcagatcagccagttcctgcaggccgctgagagatatggcatcaacaccacagacatcttccagacagtggacctgtgggagggcaagaacatggcctgtgtgcagaggaccctgatgaacctgggcggcctggccgtggccagagatgatggcctcttcagcggggaccccaactggttccccaagaagagcaaagaaaaccccaggaacttcagtgacaaccagctgcaggagggcaagaatgtcatcggcctgcagatgggcaccaacagaggagccagccaggcctag

SEQ ID NO: 173753 - DNA, 3861 bp, synthetic construct
  misc_feature 1..3861: note = Description of Artificial Sequence: Synthetic coding sequence
  source 1..3861: mol_type = other DNA
atgagccacctggtggaccccaccagcggggacctgcctgtgcgggacattgatgccatccccctggtgctgcctgccagcaagggcaagaacatgaagacccagccccccctgagcaggatgaaccgggaggagctggaggacagcttcttccggctgcgggaggaccacatgctggtgaaggagctgtcctggaagcagcaggatgagatcaagaggctgcggaccaccctgctgcggctgacagctgctggccgggacctgcgggtggccgaggaggccgcccccctgtctgaaacagcccggcggggccagaaggccggctggaggcagaggctgtccatgcaccagaggccccagatgcaccggctgcagggccacttccactgtgtgggccctgccagcccccggcgggcccagccccgggtgcaggtgggccaccggcagctgcacacagctggggcccctgtgcctgagaagcccaagaggggcccccgggaccggctgagctacacagccccacccagcttcaaggagcacgccaccaatgaaaatagaggagaggtggccagcaagcccagcgagctggtgtctggcagcaacagcatcatctccttcagcagcgtcatctccatggccaagcccatcggcctgtgcatgcccaacagcgcccacatcatggccagcaacaccatgcaggtggaggagccccccaagagccctgagaagatgtggcccaaggatgaaaattttgagcagaggagcagcctggagtgtgcccagaaggctgctgagctgcgggccagcatcaaggagaaggtggagctgatccggctgaagaagctgctgcacgagagaaatgccagcctggtgatgaccaaggcccagctgacagaggtgcaggaggcctgcaccttcctgctgacccagaaccagggcatcctgtctgctgcccacgaggccctgctgaagcaggtgaatgagctgcgggcagagctgaaggaggagagcaagaaggctgtgtccctgaagagccagctggaggatgtgtccatcctgcagatgaccctgaaggagttccaggagcgggtggaggacctggagaaggagaggaagctgctgaatgacaactatgacaagctgctggagagcatgctggacagcagtgacagcagcagccagccccactggagcaatgagctgattgctgagcagctgcagcagcaggtgtcccagctgcaggaccagctggatgctgagctggaggacaagaggaaggtgctgctggagctgagccgggagaaggcccagaatgaagacctgaagctggaggtgaccaacatcctgcagaagcacaagcaggaggtggagctgctgcagaatgctgccaccatcagccagcccccagaccggcagagcgagcccgccacccaccctgctgtgctgcaggagaacacccagatcgagcccagcgagcccaagaaccaggaggagaagaagctgagccaggtgctgaatgagctgcaggtgtcccatgctgagaccaccctggagctggagaagacccgggacatgctgatcctgcagaggaagatcaacgtgtgctaccaggaggagctggaggccatgatgaccaaggctgacaatgacaacagagaccacaaggagaagctggagcggctgacccggctgctggacctgaagaacaaccgcatcaagcagctggagggcatcctgcggagccatgacctgcccaccagcgagcagctgaaggatgtggcctacggcacccggcccctgagcctgtgcctggagaccctgcctgcccatggagatgaggacaaggtggacatcagcctgctgcaccagggcgagaacctgtttgagctgcacatccaccaggccttcctgaccagcgctgccctggcccaggccggggacacccagcccaccaccttctgcacctacagcttctatgactttgagacccactgcacccccctgtctgtgggcccccagcccctgtatgacttcaccagccagtatgtgatggagacagacagcctcttcctgcactacctgcaggaggccagcgcccggctggacatccaccaggccatggccagcgagcacagcaccctggccgccggctggatctgctttgacagagtgctggagaccgtggagaaggtgcacggcctggccaccctcatcggggccggcggggaggagtttggagtgctggagtactggatgaggctgcgcttccccatcaagcccagcctgcaggcctgcaacaagaggaagaaggcccaggtgtacctgagcacagatgtgctgggcggcaggaaggcccaggaggaggagttccgctctgagagctgggagccccagaatgagctgtggattgagatcaccaagtgctgcggcctgcggagccgctggctgggcacccagcccagcccctatgctgtgtaccgcttcttcaccttcagtgaccatgacacagccatcatcccagccagcaacaacccctacttccgggaccaggcccgcttccctgtgctggtgaccagtgacctggaccactacctgcggcgggaggccctgagcatccacgtgtttgatgatgaggacctggagcccggcagctacctgggccgggcccgggtgcccctgctgcccctggccaagaatgaaagcatcaagggggacttcaacctgacagatcctgctgagaagcccaacggcagcatccaggtgcagctggactggaagttcccctacatccccccagagagcttcctgaagccagaggcccagaccaagggcaaggacaccaaggacagcagcaagatcagcagcgaggaggagaaggccagcttccccagccaggaccagatggccagccctgaggtgcccattgaagctggccagtaccgcagcaagaggaagccaccccacggcggggagaggaaggagaaggagcaccaggtggtgtcctacagcaggaggaagcacggcaagagaattggagtgcagggcaagaacaggatggagtacctgagcctgaacatcctgaatggaaacaccccagagcaggtgaactacacagagtggaagttcagcgagaccaacagcttcatcggagatggcttcaagaaccagcacgaggaggaggagatgaccctgagccacagcgccctgaagcagaaggagcccctgcaccctgtgaatgacaaggagagcagcgagcagggcagcgaggtgtctgaggcccagaccacagacagtgatgatgtgattgtgccccccatgagccagaagtaccccaaggctgacagcgagaagatgtgcatcgagatcgtgtccctggccttctacccagaggccgaggtgatgtctgatgagaacatcaagcaggtgtatgtggagtacaagttctatgacctgcccctgtctgaaacagagacccctgtgtccctgaggaagcccagggctggggaggagatccacttccacttcagcaaggtgattgacctggacccccaggagcagcagggcagaagacgcttcctgtttgacatgctgaatggccaggaccctgaccagggccacctgaagttcaccgtggtgtctgaccccctggatgaggagaagaaggaatgtgaggaggtgggctacgcctacctgcagctgtggcagatcctggagagcggccgggacatcctggagcaggagctggacatcgtgtccccagaggacctggccacccccatcggccgcctgaaggtgtccctgcaggccgctgctgtgctgcacgccatctacaaggagatgacagaggacctcttctcctag

SEQ ID NO: 173754 - DNA, 1128 bp, synthetic construct
  misc_feature 1..1128: note = Description of Artificial Sequence: Synthetic coding sequence
  source 1..1128: mol_type = other DNA
atgaagaggccagacctgcccagcggctttgatggctggcaggtggtggatgccaccccccaggagaccagcagcggcatcttctgctgcggcccctgcagcgtggagagcatcaagaatggcctggtgtacatgaagtatgacacccccttcatctttgctgaggtgaacagcgacaaggtgtactggcagaggcaggatgatggcagcttcaagatcgtgtatgtggaggagaaggccatcggcaccctgattgtgaccaaggccatcagcagcaacatgagggaggacatcacctacctgtacaagcaccctgagggcagtgatgctgagaggaaggctgtggagacagctgctgcccacggcagcaagcccaacgtgtatgccaacagaggcagcgcagaagatgtggccatgcaggtggaggcccaggatgctgtgatgggccaggacctgatggtgtctgtgatgctgatcaaccacagcagcagcagaagaacagtgaagctgcacctgtacctgtctgtgaccttctacacaggagtgtctggcaccatcttcaaggagaccaagaaggaggtggagctggcccctggggccagtgacagagtgaccatgcctgtggcctacaaggagtaccggccccacctggtggaccagggcgccatgctgctgaatgtgtctggccacgtgaaggagagcggccaggtgctggccaagcagcacaccttccggctgcggaccccagacctgagcctgaccctgctgggcgctgctgtggtgggccaggagtgtgaggtgcagatcgtgttcaagaaccccctgcctgtgaccctgaccaacgtggtgttccggctggagggcagcggcctgcagaggcccaagatcctgaatgtgggggacatcggcggcaatgaaacagtgaccctgcggcagagctttgtgcctgtgcggcccggcccccggcagctgattgccagcctggacagcccccagctgagccaggtgcatggagtcatccaggtggatgtggccccagcccctggagatggcggcttcttcagtgatgctggaggagacagccacctgggggagaccatccccatggccagcagaggaggagcctag

SEQ ID NO: 173755 - DNA, 408 bp, synthetic construct
  misc_feature 1..408: note = Description of Artificial Sequence: Synthetic coding sequence
  source 1..408: mol_type = other DNA
atgatggatggccccaggagtgatgtgggccgctggggcggcaaccccctgcagccccccaccacccccagccctgagcctgagcctgagccagatggccgcagccggcggggcggcggccgctccttctgggcccgctgctgcggctgctgcagctgcagaaatgctgctgatgatgactggggccctgagcccagcgacagccggggccggggcagcagcagcggcacccggcggcccggcagccggggcagtgacagccggcggcctgtgtcccggggcagcggcgtgaatgctgctggagatggcaccatccgggagggcatgctggtggtgaatggagtggacctgctgagcagcagaagtgaccagaacagaagagagcaccacacagatgaatatgaatag

SEQ ID NO: 173756 - DNA, 129 bp, synthetic construct
  misc_feature 1..129: note = Description of Artificial Sequence: Synthetic coding sequence
  source 1..129: mol_type = other DNA
atgatggatggccccaggagtgatgtgggccgctggggcggcaaccccctgcagccccccaccacccccagccctgagcctgagcctgagccagatggccgcagccggcggggcggcggccgctcctag

SEQ ID NO: 173757 - DNA, 198 bp, synthetic construct
  misc_feature 1..198: note = Description of Artificial Sequence: Synthetic coding sequence
  source 1..198: mol_type = other DNA
atgatggatggccccaggagtgatgtgggccgctggggcggcaaccccctgcagccccccaccacccccagccctgagcctgagcctgagccagatggccgcagccggcggggcggcggccgctccttctgggcccgctgctgcggctgctgcagctgcagaaatgctgctgatgatgactggggccctgagccctag

SEQ ID NO: 173758 - DNA, 153 bp, synthetic construct
  misc_feature 1..153: note = Description of Artificial Sequence: Synthetic coding sequence
  source 1..153: mol_type = other DNA
atgatggatggccccaggagtgatgtgggccgctggggcggcaaccccctgcagccccccaccacccccagccctgagcctgagcctgagccagatggccgcagccggcggggcggcggccgctccttctgggcccgctgctgcggctgctag

SEQ ID NO: 173759 - DNA, 30 bp, synthetic construct
  misc_feature 1..30: note = Description of Artificial Sequence: Synthetic coding sequence
  source 1..30: mol_type = other DNA
atgatggatggccccaggagtgatgtgtag

SEQ ID NO: 173760 - DNA, 2064 bp, synthetic construct
  misc_feature 1..2064: note = Description of Artificial Sequence: Synthetic coding sequence
  source 1..2064: mol_type = other DNA
atggccgaggagctggtgctggagcgctgtgacctggagctggagaccaacggccgggaccaccacacagctgacctgtgccgggagaagctggtggtgcggcggggccagcccttctggctgaccctgcactttgagggcaggaactatgaggcctctgtggacagcctgaccttctctgtggtgactggacctgcccccagccaggaggccggcaccaaggcccgcttccccctgagagatgctgtggaggagggggactggacagccaccgtggtggaccagcaggactgcaccctgagcctgcagctgaccaccccagccaatgcccccatcggcctgtaccgcctgagcctggaggccagcacaggctaccagggcagcagctttgtgctgggccacttcatcctgctcttcaatgcctggtgcccagcagatgctgtgtacctggacagcgaggaggagcggcaggagtatgtgctgacccagcagggcttcatctaccagggcagcgccaagttcatcaagaacatcccctggaactttggccagtttgaagatggcatcctggacatctgcctgatcctgctggatgtgaaccccaagttcctgaagaatgccggccgggactgcagcagaagaagcagccctgtgtatgtgggccgggtggtgtctggcatggtgaactgcaatgatgaccagggcgtgctgctgggccgctgggacaacaactatggagatggagtgagccccatgtcctggattggctctgtggacatcctgcggcgctggaagaaccacggctgccagagggtgaagtatggccagtgctgggtgtttgctgctgtggcctgcaccgtgctgcgctgcctgggcatccccaccagggtggtgaccaactacaacagcgcccatgaccagaacagcaacctgctgattgagtacttcagaaatgaatttggagagatccagggcgacaagtctgagatgatctggaacttccactgctgggtggagagctggatgaccaggccagacctgcagcccggctatgagggctggcaggccctggaccccaccccccaggagaagtctgagggcacctactgctgcggccctgtgcctgtgcgggccatcaaggagggggacctgagcaccaagtatgatgccccctttgtgtttgctgaggtgaatgctgatgtggtggactggatccagcaggatgatggctctgtgcacaagagcatcaacagaagcctgattgtgggcctgaagatcagcaccaagtctgtgggcagagatgaaagagaggacatcacccacacctacaagtacccagagggcagcagcgaggagcgggaggccttcacccgggccaaccacctgaacaagctggccgagaaggaggagaccggcatggccatgaggatccgggtgggccagagcatgaacatgggcagtgactttgatgtgtttgcccacatcaccaacaacacagctgaggagtatgtgtgccgcctgctgctgtgtgccaggacagtgtcctacaacggcatcctgggcccagaatgtggcaccaagtacctgctgaacctgaacctggagcccttcagcgagaagtctgtgcccctgtgcatcctgtatgagaagtacagagactgcctgacagagagcaacctgatcaaggtgcgggccctgctggtggagcccgtcatcaacagctacctgctggccgagcgggacctgtacctggagaaccctgagatcaagatccgcatcctgggggagcccaagcagaagaggaagctggtggccgaggtgtccctgcagaaccccctgcctgtggccctggagggctgcaccttcaccgtggagggcgccggcctgacagaggagcagaagacagtggagatcccagaccctgtggaggccggggaggaggtgaaggtgaggatggacctgctgcccctgcacatgggcctgcacaagctggtggtgaactttgaaagtgacaagctgaaggctgtgaagggcttcagaaatgtcatcatcggccctgcctag

SEQ ID NO: 173761 - DNA, 846 bp, synthetic construct
  misc_feature 1..846: note = Description of Artificial Sequence: Synthetic coding sequence
  source 1..846: mol_type = other DNA
atggccgaggagctggtgctggagcgctgtgacctggagctggagaccaacggccgggaccaccacacagctgacctgtgccgggagaagctggtggtgcggcggggccagcccttctggctgaccctgcactttgagggcaggaactatgaggcctctgtggacagcctgaccttctctgtggtgactggacctgcccccagccaggaggccggcaccaaggcccgcttccccctgagagatgctgtggaggagggggactggacagccaccgtggtggaccagcaggactgcaccctgagcctgcagctgaccaccccagccaatgcccccatcggcctgtaccgcctgagcctggaggccagcacaggctaccagggcagcagctttgtgctgggccacttcatcctgctcttcaatgcctggtgcccagcagatgctgtgtacctggacagcgaggaggagcggcaggagtatgtgctgacccagcagggcttcatctaccagggcagcgccaagttcatcaagaacatcccctggaactttggccagtttgaagatggcatcctggacatctgcctgatcctgctggatgtgaaccccaagttcctgaagaatgccggccgggactgcagcagaagaagcagccctgtgtatgtgggccgggtggtgtctggcatggtgaactgcaatgatgaccagggcgtgctgctgggccgctgggacaacaactatggagatggagtgagccccatgtcctggattggctctgtggacatcctgcggcgctggaagaaccacggctgccagagggtgaagtatggccagtgctgggtgtttgcctag

SEQ ID NO: 173762 - DNA, 483 bp, synthetic construct
  misc_feature 1..483: note = Description of Artificial Sequence: Synthetic coding sequence
  source 1..483: mol_type = other DNA
atggccgaggagctggtgctggagcgctgtgacctggagctggagaccaacggccgggaccaccacacagctgacctgtgccgggagaagctggtggtgcggcggggccagcccttctggctgaccctgcactttgagggcaggaactatgaggcctctgtggacagcctgaccttctctgtggtgactggacctgcccccagccaggaggccggcaccaaggcccgcttccccctgagagatgctgtggaggagggggactggacagccaccgtggtggaccagcaggactgcaccctgagcctgcagctgaccaccccagccaatgcccccatcggcctgtaccgcctgagcctggaggccagcacaggctaccagggcagcagctttgtgctgggccacttcatcctgctcttcaatgcctggtgcccagcagatgctgtgtacctggacagcgaggaggagcggcaggagtatgtgtag

SEQ ID NO: 173763 - DNA, 1821 bp, synthetic construct
  misc_feature 1..1821: note = Description of Artificial Sequence: Synthetic coding sequence
  source 1..1821: mol_type = other DNA
atggccgaggagctggtgctggagcgctgtgacctggagctggagaccaacggccgggaccaccacacagctgacctgtgccgggagaagctggtggtgcggcggggccagcccttctggctgaccctgcactttgagggcaggaactatgaggcctctgtggacagcctgaccttctctgtggtgacagcagatgctgtgtacctggacagcgaggaggagcggcaggagtatgtgctgacccagcagggcttcatctaccagggcagcgccaagttcatcaagaacatcccctggaactttggccagtttgaagatggcatcctggacatctgcctgatcctgctggatgtgaaccccaagttcctgaagaatgccggccgggactgcagccgccgcagcagccctgtgtatgtgggccgggtggtgtctggcatggtgaactgcaatgatgaccagggcgtgctgctgggccgctgggacaacaactatggagatggagtgagccccatgtcctggattggctctgtggacatcctgcggcgctggaagaaccacggctgccagagggtgaagtatggccagtgctgggtgtttgctgctgtggcctgcaccgtgctgcgctgcctgggcatccccaccagggtggtgaccaactacaacagcgcccatgaccagaacagcaacctgctgattgagtacttcagaaatgaatttggagagatccagggcgacaagtctgagatgatctggaacttccactgctgggtggagagctggatgaccaggccagacctgcagcccggctatgagggctggcaggccctggaccccaccccccaggagaagtctgagggcacctactgctgcggccctgtgcctgtgcgggccatcaaggagggggacctgagcaccaagtatgatgccccctttgtgtttgctgaggtgaatgctgatgtggtggactggatccagcaggatgatggctctgtgcacaagagcatcaacagaagcctcatcgtgggcctgaagatcagcaccaagtctgtgggcagagatgagcgggaggacatcacccacacctacaagtacccagagggcagcagcgaggagcgggaggccttcacccgggccaaccacctgaacaagctggccgagaaggaggagaccggcatggccatgaggatccgggtgggccagagcatgaacatgggcagtgactttgatgtgtttgcccacatcaccaacaacacagctgaggagtatgtgtgccgcctgctgctgtgtgccaggacagtgtcctacaacggcatcctgggcccagaatgtggcaccaagtacctgctgaacctgaacctggagcccttcagcgagaagtctgtgcccctgtgcatcctgtatgagaagtacagagactgcctgacagagagcaacctgatcaaggtgcgggccctgctggtggagcctgtgatcaacagctacctgctggccgagcgggacctgtacctggagaaccctgagatcaagatccgcatcctgggggagcccaagcagaagaggaagctggtggccgaggtgtccctgcagaaccccctgcctgtggccctggagggctgcaccttcaccgtggagggcgccggcctgacagaggagcagaagacagtggagatcccagaccctgtggaggccggggaggaggtgaaggtgaggatggacctgctgcccctgcacatgggcctgcacaagctggtggtgaactttgaaagtgacaagctgaaggctgtgaagggcttcagaaatgtcatcatcggccctgcctag

SEQ ID NO: 173764 - DNA, 1884 bp, synthetic construct
  misc_feature 1..1884: note = Description of Artificial Sequence: Synthetic coding sequence
  source 1..1884: mol_type = other DNA
atggccgagggccctgcccccagccaggaggccggcaccaaggcccgcttccccctgagagatgctgtggaggagggggactggacagccaccgtggtggaccagcaggactgcaccctgagcctgcagctgaccaccccagccaatgcccccatcggcctgtaccgcctgagcctggaggccagcacaggctaccagggcagcagctttgtgctgggccacttcatcctgctcttcaatgcctggtgcccagcagatgctgtgtacctggacagcgaggaggagcggcaggagtatgtgctgacccagcagggcttcatctaccagggcagcgccaagttcatcaagaacatcccctggaactttggccagtttgaagatggcatcctggacatctgcctgatcctgctggatgtgaaccccaagttcctgaagaatgccggccgggactgcagcagaagaagcagccctgtgtatgtgggccgggtggtgtctggcatggtgaactgcaatgatgaccagggcgtgctgctgggccgctgggacaacaactatggagatggagtgagccccatgtcctggattggctctgtggacatcctgcggcgctggaagaaccacggctgccagagggtgaagtatggccagtgctgggtgtttgctgctgtggcctgcaccgtgctgcgctgcctgggcatccccaccagggtggtgaccaactacaacagcgcccatgaccagaacagcaacctgctgattgagtacttcagaaatgaatttggagagatccagggcgacaagtctgagatgatctggaacttccactgctgggtggagagctggatgaccaggccagacctgcagcccggctatgagggctggcaggccctggaccccaccccccaggagaagtctgagggcacctactgctgcggccctgtgcctgtgcgggccatcaaggagggggacctgagcaccaagtatgatgccccctttgtgtttgctgaggtgaatgctgatgtggtggactggatccagcaggatgatggctctgtgcacaagagcatcaacagaagcctgattgtgggcctgaagatcagcaccaagtctgtgggcagagatgaaagagaggacatcacccacacctacaagtacccagagggcagcagcgaggagcgggaggccttcacccgggccaaccacctgaacaagctggccgagaaggaggagaccggcatggccatgaggatccgggtgggccagagcatgaacatgggcagtgactttgatgtgtttgcccacatcaccaacaacacagctgaggagtatgtgtgccgcctgctgctgtgtgccaggacagtgtcctacaacggcatcctgggcccagaatgtggcaccaagtacctgctgaacctgaacctggagcccttcagcgagaagtctgtgcccctgtgcatcctgtatgagaagtacagagactgcctgacagagagcaacctgatcaaggtgcgggccctgctggtggagcccgtcatcaacagctacctgctggccgagcgggacctgtacctggagaaccctgagatcaagatccgcatcctgggggagcccaagcagaagaggaagctggtggccgaggtgtccctgcagaaccccctgcctgtggccctggagggctgcaccttcaccgtggagggcgccggcctgacagaggagcagaagacagtggagatcccagaccctgtggaggccggggaggaggtgaaggtgaggatggacctgctgcccctgcacatgggcctgcacaagctggtggtgaactttgaaagtgacaagctgaaggctgtgaagggcttcagaaatgtcatcatcggccctgcctag

SEQ ID NO: 173765 - DNA, 2082 bp, synthetic construct
  misc_feature 1..2082: note = Description of Artificial Sequence: Synthetic coding sequence
  source 1..2082: mol_type = other DNA
atggccgccctgggcgtgcagagcatcaactggcagacagccttcaaccggcaggcccaccacacagacaagttcagcagccaggagctgatcctgcggcggggccagaacttccaggtgctgatgatcatgaacaagggcctgggcagcaatgaaaggctggagttcatcgtgtccacaggcccctaccccagcgagagcgccatgaccaaggctgtgttccccctgagcaatggcagcagcggcggctggagcgctgtgctgcaggccagcaatggaaacaccctgaccatcagcatcagcagccctgccagcgcccccatcggccgctacaccatggccctgcagatcttcagccagggcggcatcagctctgtgaagctgggcaccttcatcctgctcttcaacccctggctgaatgtggacagcgtcttcatgggcaaccacgccgagcgggaggagtatgtgcaggaggatgctggcatcatctttgtgggcagcaccaacagaattggcatgattggctggaactttggccagtttgaggaggacatcctgagcatctgcctgagcatcctggacaggagcctgaacttcagaagagatgctgccacagatgtggccagcagaaatgaccccaagtatgtgggccgggtgctgagcgccatgatcaacagcaatgatgacaacggggtgctggccggcaactggagcggcacctacacaggaggccgggaccccaggtcctggaatggatctgtggagatcctgaagaactggaagaagagcggcttcagccctgtgcgctatggccagtgctgggtgtttgctggcaccctgaacacagccctgcggagcctgggcatccccagcagggtcatcaccaacttcaacagcgcccatgacacagacaggaacctgtctgtggatgtgtactatgaccccatgggcaaccccctggacaagggcagtgacagcgtgtggaacttccacgtgtggaatgaaggctggtttgtgcggagtgacctgggccccagctatggaggctggcaggtgctggatgccaccccccaggagaggagccagggcgtcttccagtgtggccctgcctctgtgattggagtgcgggagggagatgtgcagctgaactttgacatgcccttcatctttgctgaggtgaatgctgaccgcatcacctggctgtatgacaacaccaccgggaagcagtggaagaacagcgtgaacagccacaccatcggccgctacatcagcaccaaggctgtgggcagcaatgccaggatggatgtgacagacaagtacaagtacccagagggcagtgaccaggagcggcaggtgttccagaaggccctgggcaagctgaagcccaacaccccatttgctgccaccagctccatgggcctggagacagaggagcaggagcccagcatcatcggcaagctgaaggtggccggcatgctggccgtgggcaaggaggtgaacctggtgctgctgctgaagaacctgagccgggacaccaagacagtgacagtgaacatgacagcctggaccatcatctacaacggcaccctggtgcatgaggtgtggaaggacagcgccaccatgagcctggaccctgaggaggaggccgagcaccccatcaagatctcctatgcccagtatgagaagtacctgaagagtgacaacatgatccgcatcacagctgtgtgcaaggtgcctgatgagagcgaggtggtggtggagcgggacatcatcctggacaaccccaccctgaccctggaggtgctgaatgaggcccgggtgaggaagcctgtgaatgtgcagatgctgttcagcaaccccctggatgagcctgtgcgggactgtgtgctgatggtggagggcagcggcctgctgctgggcaacctgaagattgatgtgcccaccctgggccccaaggagggcagccgggtgcgctttgacatcctgcccagccgcagcggcaccaagcagctgctggccgacttcagctgcaacaagtttcctgccatcaaggccatgctgagcattgatgtggccgagtag

SEQ ID NO: 173766 - DNA, 1602 bp, synthetic construct
  misc_feature 1..1602: note = Description of Artificial Sequence: Synthetic coding sequence
  source 1..1602: mol_type = other DNA
atggccgccctgggcgtgcagagcatcaactggcagacagccttcaaccggcaggcccaccacacagacaagttcagcagccaggagctgatcctgcggcggggccagaacttccaggtgctgatgatcatgaacaagggcctgggcagcaatgaaaggctggagttcatcgtgtccacaggcccctaccccagcgagagcgccatgaccaaggctgtgttccccctgagcaatggcagcagcggcggctggagcgctgtgctgcaggccagcaatggaaacaccctgaccatcagcatcagcagccctgccagcgcccccatcggccgctacaccatggccctgcagatcttcagccagggcggcatcagctctgtgaagctgggcaccttcatcctgctcttcaacccctggctgaatgtggacagcgtcttcatgggcaaccacgccgagcgggaggagtatgtgcaggaggatgctggcatcatctttgtgggcagcaccaacagaattggcatgattggctggaactttggccagtttgaggaggacatcctgagcatctgcctgagcatcctggacaggagcctgaacttcagaagagatgctgccacagatgtggccagcagaaatgaccccaagtatgtgggccgggtgctgagcgccatgatcaacagcaatgatgacaacggggtgctggccggcaactggagcggcacctacacaggaggccgggaccccaggtcctggaatggatctgtggagatcctgaagaactggaagaagagcggcttcagccctgtgcgctatggccagtgctgggtgtttgctggcaccctgaacacagccctgcggagcctgggcatccccagcagggtcatcaccaacttcaacagcgcccatgacacagacaggaacctgtctgtggatgtgtactatgaccccatgggcaaccccctggacaagggcagtgacagcgtgtggaacttccacgtgtggaatgaaggctggtttgtgcggagtgacctgggccccagctatggaggctggcaggtgctggatgccaccccccaggagaggagccagggcgtcttccagtgtggccctgcctctgtgattggagtgcgggagggagatgtgcagctgaactttgacatgcccttcatctttgctgaggtgaatgctgaccgcatcacctggctgtatgacaacaccaccgggaagcagtggaagaacagcgtgaacagccacaccatcggccgctacatcagcaccaaggctgtgggcagcaatgccaggatggatgtgacagacaagtacaagtacccagagggcagtgaccaggagcggcaggtgttccagaaggccctgggcaagctgaagcccaacaccccatttgctgccaccagctccatgggcctggagacagaggagcaggagcccagcatcatcggcaagctgaaggtggccggcatgctggccgtgggcaaggaggtgaacctggtgctgctgctgatcccccacgccctgcagtgctgcaggatggactggcccctgacccagggcctgagcaagagggacaccggggagaagctggtgtag

SEQ ID NO: 173767 - DNA, 2055 bp, synthetic construct
  misc_feature 1..2055: note = Description of Artificial Sequence: Synthetic coding sequence
  source 1..2055: mol_type = other DNA
atgatggatgccagcaaggagctgcaggtgctgcacatcgacttcctgaaccaggacaatgctgtgagccaccacacctgggagttccagaccagcagccctgtgttcagaagaggccaggtgttccacctgcggctggtgctgaaccagcccctgcagagctaccaccagctgaagctggagttcagcacaggccccaaccccagcatcgccaagcacaccctggtggtgctggaccccaggacccccagcgaccactacaactggcaggccaccctgcagaatgaaagtggcaaggaggtgacagtggccgtgaccagcagccccaatgccatcctgggcaagtaccagctgaatgtgaagacaggcaaccacatcctgaagtctgaggagaacatcctgtacctgctcttcaacccctggtgcaaggaggacatggtgttcatgccagatgaagatgagaggaaggagtacatcctgaatgacaccggctgccactacgtgggcgccgcccggagcatcaagtgcaagccctggaactttggccagtttgagaagaatgtgctggactgctgcatcagcctgctgacagagagcagcctgaagcccacagaccggcgggaccctgtgctggtgtgccgggccatgtgtgccatgatgagctttgagaagggccagggcgtgctgattggcaactggacaggagactatgaaggaggaacagccccctacaagtggacaggcagcgcccccatcctgcagcagtactacaacaccaagcaggccgtgtgcttcggccagtgctgggtgtttgctggcatcctgaccaccgtgctgcgggccctgggcatcccagcccggtctgtgacaggctttgacagcgcccatgacacagagaggaacctgactgtggacacctacgtgaatgaaaatggagagaagatcacctccatgacccatgacagcgtgtggaacttccacgtgtggacagatgcctggatgaagaggccagacctgcccaagggctatgatggctggcaggccgtggatgccaccccccaggagaggagccagggcgtcttctgctgcggccccagccccctgacagccatcagaaaaggagacatcttcatcgtgtatgacaccaggtttgtgttttctgaggtgaatggagacaggctcatctggctggtgaagatggtgaatggccaggaggagctgcacgtgatctccatggagaccaccagcatcggcaagaacatcagcaccaaggctgtgggccaggacagaagaagagacatcacctatgagtacaagtacccagagggcagcagcgaggagcggcaggtgatggaccacgccttcctgctgctgagcagcgagcgggagcacagaagacctgtgaaggagaacttcctgcacatgtctgtgcagagtgatgatgtgctgctgggcaacagcgtgaacttcaccgtcatcctgaagaggaagacagctgccctgcagaatgtgaacatcctgggcagctttgagctgcagctgtacaccgggaagaagatggccaagctgtgtgacctgaacaagaccagccagatccagggccaggtgtctgaggtgaccctgaccctggacagcaagacctacatcaacagcctggccatcctggatgatgagcctgtgatccggggcttcatcatcgccgagatcgtggagagcaaggagatcatggccagcgaggtgttcaccagcttccagtacccagagttcagcattgagctgcccaacacaggaagaattggccagctgctggtgtgcaactgcatcttcaagaacaccctggccatccccctgacagatgtgaagttcagcctggagagcctgggcatcagcagcctgcagaccagtgaccatggaacagtgcagcccggggagaccatccagagccagatcaagtgcacccccatcaagacaggccccaagaagttcatcgtgaagctgagcagcaagcaggtgaaggagatcaatgcccagaagatcgtgctgatcaccaagtag

SEQ ID NO: 173768 - DNA, 1626 bp, synthetic construct
  misc_feature 1..1626: note = Description of Artificial Sequence: Synthetic coding sequence
  source 1..1626: mol_type = other DNA
atgttctcctggatgggccggcaggccggcggccgggagagagctggaggagcagatgctgtgcagacagtgactggaggcctgcggagcctgtacctgaggaaggtgctgcccctggaggaggcctaccgcttccacgagttccacagccctgccctggaggatgctgactttgagaacaagcccatgatcctgctggtgggccagtacagcacaggcaagaccaccttcatccgctacctgctggagcaggacttccctggcatgagaattggccctgagcccaccacagacagcttcatcgctgtgatgtatggagaaacagagggcagcaccccaggaaatgccctggtggtggaccccaagaagcccttcaggaagctgagcagatttggaaatgccttcctgaaccgcttcatgtgcagccagctgcccaaccaggtgctgaagagcatctctgtgattgacagccctggcatcctgagcggggagaagcagaggatcagccggggctatgacttctgccaggtgctgcagtggtttgctgagcgggtggaccgcatcatcctgctgtttgatgcccacaagctggacatcagtgatgagttcagcgaggccatcaaggccttccggggccaggatgacaagatccgggtggtgctgaacaaggctgaccaggtggacacccagcagctgatgagggtgtatggagccctgatgtggagcctgggcaaggtgatcaacaccccagaggtgctgcgggtgtacatcggcagcttctgggcccagcccctgcagaacacagacaacagaagactctttgaggccgaggcccaggacctcttccgggacatccagagcctgccccagaaggctgctgtgaggaagctgaatgacctgatcaagagggcccggctggccaaggtgcacgcctacatcatctcctacctgaagaaggagatgcccagcgtgtttgggaaggagaacaagaagcgggagctgatcagccggctgcctgagatctacatccagctgcagcgggagtaccagatctctgctggggacttccctgaggtgaaggccatgcaggagcagctggagaactatgacttcaccaagttccacagcctgaagcccaagctgattgaggccgtggacaacatgctgagcaacaagatcagccccctgatgaacctgatcagccaggaggagaccagcacccccacccagctggtgcagggcggggcctttgatggcaccacagagggccccttcaaccagggctatggagagggcgccaaggagggcgcagatgaggaggagtgggtggtggccaaggacaagcctgtgtatgatgagctgttctacaccctgagccccatcaacgggaagatcagcggcgtgaatgccaagaaggagatggtgaccagcaagctgcccaacagcgtgctgggcaagatctggaagctggccgactgtgactgtgatggcatgctggatgaggaggagtttgccctggccaagcacctgatcaagatcaagctggatggctatgagctgcccagcagcctgcccccccacctggtgccccccagccacaggaagagcctgcccaaggctgactag

SEQ ID NO: 173769 - DNA, 1917 bp, synthetic construct
  misc_feature 1..1917: note = Description of Artificial Sequence: Synthetic coding sequence
  source 1..1917: mol_type = other DNA
atggcccagggcctggaggtggccctgacagacctgcagagcagcaggaacaacgtgcgccaccacacagaggagatcaccgtggaccacctgctggtgcggcggggccaggccttcaacctgaccctgtacttcaggaacagaagcttccagcccggcctggacaacatcatctttgtggtggagacagaagatgctgtgtacctggacagcgagccccagaggcaggagtatgtgatgaatgactatggcttcatctaccagggcagcaagaactggatccggccctgcccctggaactacggccagtttgaggacaagatcatcgacatctgcctgaagctgctggacaagagcctgcacttccagacagatcctgccacagactgtgccctgcggggcagccctgtgtatgtgtcccgggtggtgtgtgccatgatcaacagcaatgatgacaatggagtgctgaatggaaactggagcgagaactacacagatggagccaacccagctgagtggacaggctctgtggccatcctgaagcagtggaatgccaccggctgccagcctgtgcgctatggccagtgctgggtgtttgctgctgtgatgtgcaccgtgatgcgctgcctgggcatccccaccagggtcatcaccaactttgacagcggccatgacacagatggcaacctgatcattgatgagtactatgacaacacaggccgcatcctgggcaacaagaagaaggacaccatctggaacttccacgtgtggaatgaatgctggatggccaggaaggacctgcccccagcctatggaggctggcaggtgctggatgccaccccccaggagatgagcaatggagtgtactgctgcggccctgcctctgtgcgggccatcaaggagggggaggtggacctgaactatgacaccccatttgtgttctccatggtgaatgctgactgcatgtcctggctggtgcagggcggcaaggagcagaagctgcaccaggacaccagctctgtgggcaacttcatcagcaccaagagcatccagagtgatgaaagagatgacatcacagagaactacaagtatgaggagggcagcctgcaggagcggcaggtgttcctgaaggccctgcagaagctgaaggcccggagcttccacggcagccagagaggagctgagctgcagcccagccggcccaccagcctgagccaggacagccccaggagcctgcacacccccagcctgcggcccagtgatgtggtgcaggtgtccctgaagttcaagctgctggacccccccaacatgggccaggacatctgctttgtgctgctggccctgaacatgagcagccagttcaaggacctgaaggtgaacctgagcgcccagagcctgctgcatgatggcagccccctgagccccttctggcaggacacagccttcatcaccctgagccccaaggaggccaagacctacccctgcaagatctcctacagccagtacagccagtacctgagcacagacaagctgatccgcatcagcgccctgggggaggagaagagcagccctgagaagatcctggtgaacaagatcatcaccctgagctaccccagcatcaccatcaacgtgctgggcgctgctgtggtgaaccagcccctgagcatccaggtgatcttcagcaaccccctgtctgagcaggtggaggactgtgtgctgactgtggagggcagcggcctcttcaagaagcagcagaaggtgttcctgggcgtgctgaagccccagcaccaggccagcatcatcctggagaccgtgcccttcaagagcggccagaggcagatccaggccaacatgaggagcaacaagttcaaggacatcaagggctacagaaatgtgtatgtggactttgccctgtag

SEQ ID NO: 173770 - DNA, 2160 bp, synthetic construct
  misc_feature 1..2160: note = Description of Artificial Sequence: Synthetic coding sequence
  source 1..2160: mol_type = other DNA
gcccagggcctggaggtggccctgacagacctgcagagcagcagaaataatgtgcgccaccacacagaggagatcaccgtggaccacctgctggtgagaagaggccaggccttcaacctgaccctgtacttcaggaacagaagcttccagcccggcctggacaacatcatctttgtggtggagaccggccccctgcctgacctggccctgggcaccagggctgtgttcagcctggcccggcaccacagccccagcccctggatcgcctggctggagaccaacggggccaccagcacagaggtgtccctgtgtgccccacccacagctgctgtgggccgctacctgctgaagatccacatcgacagcttccagggctctgtgacagcctaccagctgggggagttcatcctgctcttcaacccctggtgcccagaagatgctgtgtacctggacagcgagccccagaggcaggagtatgtgatgaatgactatggcttcatctaccagggcagcaagaactggatccggccctgcccctggaactacggccagtttgaggacaagatcatcgacatctgcctgaagctgctggacaagagcctgcacttccagacagatcctgccacagactgtgccctgcggggcagccctgtgtatgtgtcccgggtggtgtgtgccatgatcaacagcaatgatgacaacggggtgctgaatggaaactggagcgagaactacacagatggagccaacccagctgagtggacaggctctgtggccatcctgaagcagtggaatgccaccggctgccagcctgtgcgctatggccagtgctgggtgtttgctgctgtgatgtgcaccgtgatgcgctgcctgggcatccccaccagggtcatcaccaactttgattctggccatgacacagatggcaacctgatcattgatgagtactatgacaacacaggccgcatcctgggcaacaagaagaaggacaccatctggaacttccacgtgtggaatgaatgctggatggccaggaaggacctgcccccagcctacggcggctggcaggtgctggatgccaccccccaggagatgagcaatggagtgtactgctgcggccctgcctctgtgcgggccatcaaggagggggaggtggacctgaactatgacaccccatttgtgttctccatggtgaatgctgactgcatgtcctggctggtgcagggcggcaaggagcagaagctgcaccaggacaccagctctgtgggcaacttcatcagcaccaagagcatccagagtgatgaaagagatgacatcacagagaactacaagtatgaggagggcagcctgcaggagcggcaggtgttcctgaaggccctgcagaagctgaaggcccgctccttccacggcagccagagaggagctgagctgcagcccagccggcccaccagcctgagccaggacagccccaggagcctgcacacccccagcctgcggcccagtgatgtggtgcaggtgtccctgaagttcaagctgctggacccccccaacatgggccaggacatctgctttgtgctgctggccctgaacatgagcagccagttcaaggacctgaaggtgaacctgagcgcccagagcctgctgcatgatggcagccccctgagccccttctggcaggacacagccttcatcaccctgagccccaaggaggccaagacctacccctgcaagatctcctacagccagtacagccagtacctgagcacagacaagctgatccgcatcagcgccctgggggaggagaagagcagccctgagaagatcctggtgaacaagatcatcaccctgagctaccccagcatcaccatcaacgtgctgggcgctgctgtggtgaaccagcccctgagcatccaggtgatcttcagcaaccccctgtctgagcaggtggaggactgtgtgctgactgtggagggcagcggcctcttcaagaagcagcagaaggtgttcctgggcgtgctgaagccccagcaccaggccagcatcatcctggagaccgtgcccttcaagagcggccagaggcagatccaggccaacatgaggagcaacaagttcaaggacatcaagggctacagaaatgtgtatgtggactttgccctgtag

SEQ ID NO: 173771 - DNA, 2121 bp, synthetic construct
  misc_feature 1..2121: note = Description of Artificial Sequence: Synthetic coding sequence
  source 1..2121: mol_type = other DNA
atggccggcatccgggtgaccaaggtggactggcagaggagcagaaatggagctgcccaccacacccaggagtacccctgcccagagctggtggtgagaagaggccagagcttcagcctgaccctggagctgagccgggccctggactgtgaggagatcctgatcttcaccatggagaccggcccccgggccagcgaggccctgcacaccaaggctgtgttccagaccagcgagctggagcggggggagggctggacagctgcccgggaggcccagatggagaagaccctgactgtgtccctggccagcccccccagcgctgtgattggccgctacctgctgagcatccggctgagcagccacaggaagcacagcaacagaaggctgggggagtttgtgctgctcttcaacccctggtgtgccgaggatgatgtgttcctggccagcgaggaggagcggcaggagtatgtgctgagtgacagcggcatcatcttccggggcgtggagaagcacatccgggcccagggctggaactacggccagtttgaggaggacatcctgaacatctgcctgagcatcctggacaggagccctggccaccagaacaacccagccacagatgtgtcctgccgccacaaccccatctacgtgaccagggtcatcagcgccatggtgaacagcaacaatgaccggggcgtggtgcagggccagtggcagggcaagtatggaggcggcaccagccccctgcactggaggggctctgtggccatcctgcagaagtggctgaagggccgctacaagcctgtgaagtatggccagtgctgggtgtttgctggggtgctgtgcaccgtgctgcgctgcctgggcatcgccaccagggtggtgagcaacttcaacagcgcccatgacacagaccagaacctgtctgtggacaagtatgtggacagctttggaagaaccctggaggacctgacagaggacagcatgtggaacttccacgtgtggaatgaatcctggtttgcccggcaggacctgggccccagctacaacggctggcaggtgctggatgccaccccccaggaggagagcgagggcgtcttccgctgtggccctgcctctgtgacagccatccgggagggagatgtgcacctggcccatgatggcccctttgtgtttgctgaggtgaatgctgactacatcacctggctgtggcatgaagatgagagccgggagcgggtgtacagcaacaccaagaagattggccgctgcatcagcaccaaggctgtgggcagtgacagccgggtggacatcacagacctgtacaagtacccagagggcagcaggaaggagcggcaggtgtacagcaaggctgtgaacagactctttggagtggaggccagcggccgccgcatctggatccggcgggccggcggccgctgcctgtggagagatgacctgctggagcccgccaccaagcccagcattgctgggaagttcaaggtgctggagccccccatgctgggccatgacctgcggctggccctgtgcctggccaacctgaccagccgggcccagagggtgcgggtgaacctgagcggggccaccatcctgtacaccaggaagcctgtggccgagatcctgcacgagagccatgctgtgcggctgggcccccaggaggagaagaggatccccatcaccatctcctacagcaagtacaaggaggacctgacagaggacaagaagatcctgctggccgccatgtgcctggtgaccaagggggagaagctgctggtggagaaggacatcaccctggaggacttcatcaccatcaaggtgctgggccctgccatggtgggcgtggccgtgacagtggaggtgacagtggtgaaccccctgattgagcgggtgaaggactgtgccctgatggtggagggcagcggcctgctgcaggagcagctgagcattgatgtgcccaccctggagccccaggagcgggcctctgtgcagtttgacatcacccccagcaagagcggcccccggcagctgcaggtggacctggtgagcccccacttcccagacatcaagggctttgtgattgtgcacgtggccacagccaagtag

SEQ ID NO: 173772 - DNA, 1878 bp, synthetic construct
  misc_feature 1..1878: note = Description of Artificial Sequence: Synthetic coding sequence
  source 1..1878: mol_type = other DNA
atggccggcatccgggtgaccaaggtggactggcagaggagcagaaatggagctgcccaccacacccaggagtacccctgcccagagctggtggtgagaagaggccagagcttcagcctgaccctggagctgagccgggccctggactgtgaggagatcctgatcttcaccatggagaccggcccccgggccagcgaggccctgcacaccaaggctgtgttccagaccagcgagctggagcggggggagggctggacagctgcccgggaggcccagatggagaagaccctgactgtgtccctggccagcccccccagcgctgtgattggccgctacctgctgagcatccggctgagcagccacaggaagcacagcaacagaaggctgggggagtttgtgctgctcttcaacccctggtgtgccgaggatgatgtgttcctggccagcgaggaggagcggcaggagtatgtgctgagtgacagcggcatcatcttccggggcgtggagaagcacatccgggcccagggctggaactacggccagtttgaggaggacatcctgaacatctgcctgagcatcctggacaggagccctggccaccagaacaacccagccacagatgtgtcctgccgccacaaccccatctacgtgaccagggtcatcagcgccatggtgaacagcaacaatgaccggggcgtggtgcagggccagtggcagggcaagtatggaggcggcaccagccccctgcactggaggggctctgtggccatcctgcagaagtggctgaagggccgctacaagcctgtgaagtatggccagtgctgggtgtttgctggggtgctgtgcaccgtgctgcgctgcctgggcatcgccaccagggtggtgagcaacttcaacagcgcccatgacacagaccagaacctgtctgtggacaagtatgtggacagctttggaagaaccctggaggacctgacagaggacagcatgtggaacttccacgtgtggaatgaatcctggtttgcccggcaggacctgggccccagctacaacggctggcaggtgctggatgccaccccccaggaggagagcgagggcgtcttccgctgtggccctgcctctgtgacagccatccgggagggagatgtgcacctggcccatgatggcccctttgtgtttgctgaggtgaatgctgactacatcacctggctgtggcatgaagatgagagccgggagcgggtgtacagcaacaccaagaagattggccgctgcatcagcaccaaggctgtgggcagtgacagccgggtggacatcacagacctgtacaagtacccagagggcagcaggaaggagcggcaggtgtacagcaaggctgtgaacagactctttggagtggaggccagcggccgccgcatctggatccggcgggccggcggccgctgcctgtggagagatgacctgctggagcccgccaccaagcccagcattgctgggaagttcaaggtgctggagccccccatgctgggccatgacctgcggctggccctgtgcctggccaacctgaccagccgggcccagagggtgcgggtgaacctgagcggggccaccatcctgtacaccaggaagcctgtggccgagatcctgcacgagagccatgctgtgcggctgggcccccaggaggagaagaggatccccatcaccatctcctacagcaagtacaaggaggacctgacagaggacaagaagatcctgctggccgccatgtgcctggtgaccaagggggagaagctgctggtggagaaggacatcaccctggaggacttcatcaccatcaagagggcctacccaggggccagcggggagggcctgagccctgtgtag

SEQ ID NO: 173773 - DNA, 2133 bp, synthetic construct
  misc_feature 1..2133: note = Description of Artificial Sequence: Synthetic coding sequence
  source 1..2133: mol_type = other DNA
atggaccaggtggccaccctgcggctggagagcgtggacctgcagagcagcaggaacaacaaggagcaccacacccaggagatgggcgtgaagaggctgactgtgcggcggggccagcccttctacctgcggctgtccttcagccggcccttccagagccagaatgaccacatcacctttgtggccgagaccggccccaagcccagcgagctgctgggcacccgggccaccttcttcctgaccagggtgcagcctggaaatgtgtggagcgccagtgacttcaccatcgacagcaacagcctgcaggtgtccctcttcaccccagccaatgctgtgattggccactacaccctgaagattgagatcagccagggccagggccacagcgtgacctaccccctgggcaccttcatcctgctcttcaacccctggagcccagaagatgatgtgtacctgcccagcgagatcctgctgcaggagtacatcatgagggactatggctttgtgtacaagggccacgagcgcttcatcacctcctggccctggaactacggccagtttgaggaggacatcatcgacatctgctttgagatcctgaacaagagcctgtaccacctgaagaacccagccaaggactgcagccagagaaatgatgtggtgtatgtgtgccgggtggtgtctgccatgatcaacagcaatgatgacaacggggtgctgcagggcaactggggcgaggactacagcaaaggagtgagccccctggagtggaagggctctgtggccatcctgcagcagtggagcgcccggggcggccagcctgtgaagtatggccagtgctgggtgtttgcctctgtgatgtgcaccgtgatgcgctgcctgggcgtgcccaccagggtggtgagcaacttccgcagcgcccacaacgtggacaggaacctgaccatcgacacctactatgacagaaatgctgagatgctgagcacccagaagagggacaagatctggaacttccacgtgtggaatgaatgctggatgatcaggaaggacctgcccccaggctacaacggctggcaggtgctggaccccaccccccagcagaccagcagcggcctcttctgctgcggccctgcctctgtgaaggccatccgggagggagatgtgcacctggcctatgacaccccatttgtgtatgcagaggtgaatgctgatgaagtcatctggctgctgggagatggccaggcccaggagatcctggcccacaacaccagcagcatcggcaaggagatcagcaccaagatggtgggcagtgaccagaggcagagcatcaccagcagctacaagtacccagagggcagccctgaggagagagctgtgttcatgaaggccagcaggaagatgctgggcccccagagggccagcctgcccttcctggacctgctggagagcggcggcctgcgggaccagcctgcccagctgcagctgcacctggcccgcatccctgagtggggccaggacctgcagctgctgctgcgcatccagagggtgcctgacagcacccacccccggggccccatcggcctggtggtgcgcttctgtgcccaggccctgctgcacggcggcggcacccagaagcccttctggaggcacacagtgaggatgaacctggactttgggaaggagacccagtggcccctgctgctgccctacagcaactacagaaacaagctgacagatgagaagctgatccgggtgtctggaattgctgaggtggaggagaccggccgctccatgctggtgctgaaggacatctgcctggagcccccccacctgagcattgaggtgtctgagcgggcagaggtgggcaaggccctgcgggtgcacgtgaccctgaccaacaccctgatggtggccctgagcagctgcaccatggtgctggagggcagcggcctcatcaatggccagatcgccaaggacctgggcaccctggtggccggccacaccctgcagatccagctggacctgtaccccaccaaggccggcccccggcagctgcaggtgctgatcagcagcaatgaggtgaaggagatcaagggctacaaggacatctttgtgacagtggccggggccccctag

SEQ ID NO: 173774 - DNA, 846 bp, synthetic construct
  misc_feature 1..846: note = Description of Artificial Sequence: Synthetic coding sequence
  source 1..846: mol_type = other DNA
atgagatttgtggtggccctggtgctgctgaatgtggccgctgctggagctgtgcccctgctggccacagaatctgtgaagcaggaggaggccggcgtgcggcccagcgctggaaatgtgtccacccaccccagcctgagccagaggcctgggggcagcaccaagagccaccctgagccccagacccccaaggacagccccagcaagagcagcagcgaggcccagaccaccaaggatgtgcccaacaagagcggggctgatggccagacccccaaggatggcagcagcaagagcggggctgaggaccagacccccaaggatgtgcccaacaagagcggggctgagaagcagacccccaaggatggcagcaacaagagcggggctgaggagcagggccccattgatggccccagcaagagcggggctgaggagcagaccagcaaggacagccccaacaaggaggaggtgaagagcagcgagcccacagaagatgtggagcccaaggaggctgaagatgatgacaccggccctgaggagggcagcccccccaaggaggagaaggagaagatgagcggcagcgccagcagtgaaaatcgggagggcaccctgagtgacagcactggaagtgagaaggatgacctgtacccaaatggaagtggaaatggatctgctgagagcagccacttctttgcctacctggtgacagctgccatcctggtggccgtgctgtacatcgcccaccacaacaagaggaagatcatcgcctttgtgctggagggcaagaggagcaaggtgacccggcggcccaaggccagtgactaccagaggctggaccagaagagctag

SEQ ID NO: 173775 - DNA, 1314 bp, synthetic construct
  misc_feature 1..1314: note = Description of Artificial Sequence: Synthetic coding sequence
  source 1..1314: mol_type = other DNA
atgagatttgtggtggccctggtgctgctgaatgtggccgctgctggagctgtgcccctgctggccacagaatctgtgaagcaggaggaggccggcgtgcggcccagcgctggaaatgtgtccacccaccccagcctgagccagaggcctgggggcagcaccaagagccaccctgagccccagacccccaaggacagccccagcaagagcagcgctgaggcccagaccccagaggacacccccaacaagagcggggctgaggccaagacccagaaggacagcagcaacaagagcggggctgaggccaagacccagaagggcagcaccagcaagagcggcagcgaggcccagaccaccaaggacagcaccagcaagagccaccctgagctgcagacccccaaggacagcacaggcaagagcggggctgaggcccagaccccagaggacagccccaacagaagtggagctgaggccaagacccagaaggacagccccagcaagagcggcagcgaggcccagaccaccaaggatgtgcccaacaagagcggggctgatggccagacccccaaggatggcagcagcaagagcggggctgaggaccagacccccaaggatgtgcccaacaagagcggggctgagaagcagacccccaaggatggcagcaacaagagcggggctgaggagcagggccccattgatggccccagcaagagcggggctgaggagcagaccagcaaggacagccccaacaaggtggtgcctgagcagcccagcaggaaggaccacagcaagcccatcagcaaccccagcgacaacaaggagctgcccaaggctgacaccaaccagctggccgacaagggcaagctgagcccccacgccttcaagacagagagcggggaggagacagacctgatcagccccccccaggaggaggtgaagagcagcgagcccacagaagatgtggagcccaaggaggctgaagatgatgacaccggccctgaggagggcagcccccccaaggaggagaaggagaagatgagcggcagcgccagcagtgaaaatcgggagggcaccctgagtgacagcactggaagtgagaaggatgacctgtacccaaatggaagtggaaatggatctgctgagagcagccacttctttgcctacctggtgacagctgccatcctggtggccgtgctgtacatcgcccaccacaacaagaggaagatcatcgcctttgtgctggagggcaagaggagcaaggtgacccggcggcccaaggccagtgactaccagaggctggaccagaagagctag

SEQ ID NO: 173776 - DNA, 1140 bp, synthetic construct
  misc_feature 1..1140: note = Description of Artificial Sequence: Synthetic coding sequence
  source 1..1140: mol_type = other DNA
atgagatttgtggtggccctggtgctgctgaatgtggccgctgctggagctgtgcccctgctggccacagaatctgtgaagcaggaggaggccggcgtgcggcccagcgctggaaatgtgtccacccaccccagcctgagccagaggcctgggggcagcaccaagagccaccctgagccccagacccccaaggacagccccagcaagagcagcgctgaggcccagaccccagaggacacccccaacaagagcggggctgaggccaagacccagaaggacagcagcaacaagagcggggctgaggccaagacccagaagggcagcaccagcaagagcggcagcgaggcccagaccaccaaggacagcaccagcaagagccaccctgagctgcagacccccaaggacagcacaggcaagagcggggctgaggcccagaccccagaggacagccccaacagaagtggagctgaggccaagacccagaaggacagccccagcaagagcggcagcgaggcccagaccaccaaggatgtgcccaacaagagcggggctgatggccagacccccaaggatggcagcagcaagagcggggctgaggaccagacccccaaggatgtgcccaacaagagcggggctgagaagcagacccccaaggatggcagcaacaagagcggggctgaggagcagggccccattgatggccccagcaagagcggggctgaggagcagaccagcaaggacagccccaacaaggaggaggtgaagagcagcgagcccacagaagatgtggagcccaaggaggctgaagatgatgacaccggccctgaggagggcagcccccccaaggaggagaaggagaagatgagcggcagcgccagcagtgaaaatcgggagggcaccctgagtgacagcactggaagtgagaaggatgacctgtacccaaatggaagtggaaatggatctgctgagagcagccacttctttgcctacctggtgacagctgccatcctggtggccgtgctgtacatcgcccaccacaacaagaggaagatcatcgcctttgtgctggagggcaagaggagcaaggtgacccggcggcccaaggccagtgactaccagaggctggaccagaagagctag

SEQ ID NO: 173777 - DNA, 1362 bp, synthetic construct
  misc_feature 1..1362: note = Description of Artificial Sequence: Synthetic coding sequence
  source 1..1362: mol_type = other DNA
atgagatttgtggtggccctggtgctgctgaatgtggccgctgctggagctgtgcccctgctggccacagaatctgtgaagcaggaggaggccggcgtgcggcccagcgctggaaatgtgtccacccaccccagcctgagccagaggcctgggggcagcaccaagagccaccctgagccccagacccccaaggacagccccagcaagagcagcgctgaggcccagaccccagaggacacccccaacaagagcggggctgaggccaagacccagaaggacagcagcaacaagagcggggctgaggccaagacccagaagggcagcaccagcaagagcggcagcgaggcccagaccaccaaggacagcaccagcaagagccaccctgagctgcagacccccaaggacagcacaggcaagagcggggctgaggcccagaccccagaggacagccccaacagaagtggagctgaggccaagacccagaaggacagccccagcaagagcggcagcgaggcccagaccaccaaggatgtgcccaacaagagcggggctgatggccagacccccaaggatggcagcagcaagagcggggctgaggaccagacccccaaggatgtgcccaacaagagcggggctgagaagcagacccccaaggatggcagcaacaagagcggggctgaggagcagggccccattgatggccccagcaagagcggggctgaggagcagaccagcaaggacagccccaacaaggtggtgcctgagcagcccagcaggaaggaccacagcaagcccatcagcaaccccagcgacaacaaggagctgcccaaggctgacaccaaccagctggccgacaagggcaagctgagcccccacgccttcaagacagagagcggggaggagacagacctgatcagccccccccaggaggaggtgaagagcagcgagcccacagaagatgtggagcccaaggaggctgaagatgatgacaccggccctgaggagggcagcccccccaaggaggagaaggagaagatgagcggcagcgccagcagtgaaaatcgggagggcaccctgagtgacagcactggaagtgagaaggatgacctgtacccaaatggaagtggaaatggatctgctgagagcagccacttctttgcctacctggtgacagctgccatcctggtggccgtgctgtacatcgcccaccacaacaagaggaagatcatcgcctttgtgctggagggcaagaggagcaaggtgacccggcggcccaaggccagtgactaccagaggctggaccagaagatcttcttccccctgagccccaacaggatggtgtacagcagcggcaagaggtag

SEQ ID NO: 173778 - DNA, 693 bp, synthetic construct
  misc_feature 1..693: note = Description of Artificial Sequence: Synthetic coding sequence
  source 1..693: mol_type = other DNA
atgtatgtgcgggtgtcctttgacaccaagccagacctgctgctgcacctgatgaccaaggagtggcagctggagctgcccaagctgctgatctctgtgcacggcggcctgcagaactttgagctgcagcccaagctgaagcaggtgtttgggaagggcctcatcaaggccgccatgaccactggagcctggatcttcaccggaggagtgaacacaggagtcatcagacatgtgggagatgccctgaaggaccacgccagcaagagccggggcaagatctgcaccatcggcatcgccccctggggcatcgtggagaaccaggaggacctgattggaagagatgtggtgcggccctaccagaccatgagcaaccccatgagcaagctgactgtgctgaacagcatgcacagccacttcatcctggccgacaatggcaccaccgggaagtacggggctgaggtgaagctgcggcggcagctggagaagcacatcagcctgcagaagatcaacaccagaattggccagggcgtgcctgtggtggccctgattgtggagggcggccccaacgtcatcagcatcgtgctggagtacctgcgggacaccccacctgtgcctgtggtggtgtgtgatggcagcggccgggccagtgacatcctggccttcggccacaagtacagcgaggagggcggctag

SEQ ID NO: 173779 - DNA, 2520 bp, synthetic construct
  misc_feature 1..2520: note = Description of Artificial Sequence: Synthetic coding sequence
  source 1..2520: mol_type = other DNA
atgaagaagtggagcagcacagacctgggcgctgctgctgaccccctgcagaaggacacctgcccagaccccctggatggagaccccaacagcaggcctcctccagccaagccccagctgagcacagccaagagcaggacccggctgtttgggaagggggacagcgaggaggccttccctgtggactgcccccatgaggagggggagctggacagctgccccaccatcaccgtgtcccctgtgatcaccatccagaggcctggagatggccccaccggggcccggctgctgagccaggacagcgtggccgccagcacagagaagaccctgcggctgtatgacagaagaagcatctttgaagctgtggcccagaacaactgccaggacctggagagcctgctgctcttcctgcagaagagcaagaagcacctgacagacaatgagttcaaggaccctgagaccgggaagacctgcctgctgaaggccatgctgaacctgcatgatggccagaacaccaccatccccctgctgctggagatcgcccggcagacagacagcctgaaggagctggtgaatgccagctacacagacagctactacaagggccagacagccctgcacatcgccatcgagaggaggaacatggccctggtgaccctgctggtggagaatggagcagatgtgcaggccgccgcccatggagacttcttcaagaagaccaagggccggcccggcttctactttggagagctgcccctgagcctggccgcctgcaccaaccagctgggcatcgtgaagttcctgctgcagaacagctggcagacagctgacatcagcgcccgggacagcgtgggcaacacagtgctgcacgccctggtggaggtggccgacaacacagctgacaacaccaagtttgtgacctccatgtacaatgagatcctgatgctgggcgccaagctgcaccccaccctgaagctggaggagctgaccaacaagaagggcatgacccccctggccctggccgccggcaccgggaagattggagtgctggcctacatcctgcagcgggagatccaggagcctgagtgccgccacctgagcaggaagttcacagagtgggcctacggccctgtgcacagcagcctgtatgacctgagctgcatcgacacctgtgagaagaacagcgtgctggaggtgattgcctacagcagcagcgagacccccaacagacatgacatgctgctggtggagcccctgaaccggctgctgcaggacaagtgggacagatttgtgaagaggatcttctacttcaacttcctggtgtactgcctgtacatgatcatcttcaccatggccgcctactacagacctgtggatggcctgccccccttcaagatggagaagacaggagactacttccgggtgactggagagatcctgtctgtgctgggcggcgtgtacttcttcttccggggcatccagtacttcctgcagaggcggcccagcatgaagaccctgtttgtggacagctacagcgagatgctgttcttcctgcagagcctcttcatgctggccaccgtggtgctgtacttcagccacctgaaggagtatgtggcctccatggtgttcagcctggccctgggctggaccaacatgctgtactacacccggggcttccagcagatgggcatctatgctgtgatgattgagaagatgatcctgcgggacctgtgccgcttcatgtttgtgtacatcgtgttcctgtttggcttcagcacagctgtggtgaccctgattgaagatggcaagaatgacagcctgcccagcgagagcaccagccaccgctggaggggccctgcctgccggcccccagacagcagctacaacagcctgtacagcacctgcctggagctgttcaagttcaccatcggcatgggagacctggagttcacagagaactatgacttcaaggctgtgttcatcatcctgctgctggcctacgtgatcctgacctacatcctgctgctgaacatgctgattgccctgatgggagagaccgtgaacaagatcgcccaggagagcaagaacatctggaagctgcagagggccatcaccatcctggacacagagaagagcttcctgaagtgcatgaggaaggccttccgcagcggcaagctgctgcaggtgggctacaccccagatggcaaggatgactaccgctggtgcttccgggtggatgaggtgaactggaccacctggaacaccaacgtgggcatcatcaatgaagaccccggcaactgtgaaggagtgaagaggaccctgtccttcagcctgcggagcagccgggtgtctggccgccactggaagaactttgccctggtgcccctgctgcgggaggccagcgcccgggaccggcagagcgcccagcctgaggaggtgtacctgcggcagttcagcggcagcctgaagccagaagatgctgaggtgttcaagagccctgctgccagcggggagaagtag

SEQ ID NO: 173780 - DNA, 2373 bp, synthetic construct
  misc_feature 1..2373: note = Description of Artificial Sequence: Synthetic coding sequence
  source 1..2373: mol_type = other DNA
atgaaggcccaccccaaggagatggtgcccctgatgggcaagagggtggccgcccccagcggcaacccagccatcctgcctgagaagaggcctgctgagatcacccccaccaagaagagcgcccacttcttcctggagattgagggctttgagcccaaccccaccgtggccaagaccagcccccctgtgttcagcaagcccatggacagcaacatccggcagtgcatcagcggcaactgtgatgacatggacagcccccagagcccccaggatgatgtgacagagacccccagcaaccccaacagccccagcgcccagctggccaaggaggagcagaggaggaagaagaggcggctgaagaagaggatctttgctgctgtgtctgagggctgtgtggaggagctggtggagctgctggtggagctgcaggagctgtgcagaagaagacatgatgaagatgtgcctgacttcctgatgcacaagctgacagccagtgacaccgggaagacctgcctgatgaaggccctgctgaacatcaaccccaacaccaaggagatcgtgcgcatcctgctggcctttgctgaggagaatgacatcctgggccgcttcatcaatgctgagtacacagaggaggcctatgagggccagacagccctgaacatcgccattgaaagacggcagggcgacattgctgccctgctgattgctgctggagcagatgtgaatgcccacgccaagggggccttcttcaaccccaagtaccagcacgagggcttctactttggagagacccccctggccctggccgcctgcaccaaccagcctgagatcgtgcagctgctgatggagcacgagcagacagacatcaccagccgggacagccggggcaacaacatcctgcacgccctggtgacagtggccgaggacttcaagacccagaatgactttgtgaagaggatgtatgacatgatcctgctgcggagcggcaactgggagctggagaccaccagaaataatgatggcctgacccccctgcagctggccgccaagatgggcaaggccgagatcctgaagtacatcctgagccgggagatcaaggagaagaggctgcggagcctgagcaggaagttcacagactgggcctacggccctgtgagcagcagcctgtatgacctgaccaacgtggacaccaccacagacaacagcgtgctggagatcaccgtgtacaacaccaacatcgacaacagacatgagatgctgaccctggagcccctgcacaccctgctgcacatgaagtggaagaagtttgccaagcacatgttcttcctgtccttctgcttctacttcttctacaacatcaccctgaccctggtgtcctactaccggccccgggaggaggaggccatcccccaccccctggccctgacccacaagatgggctggctgcagctgctgggccgcatgtttgtgctgatctgggccatgtgcatctctgtgaaggagggcatcgccatcttcctgctgcggcccagcgacctgcagagcatcctgagtgatgcctggttccactttgtgttcttcatccaggccgtgctggtgatcctgagcgtcttcctgtacctgtttgcctacaaggagtacctggcctgcctggtgctggccatggccctgggctgggccaacatgctgtactacacccggggcttccagagcatgggcatgtacagcgtgatgatccagaaggtgatcctgcatgatgtgctgaagttcctgtttgtgtacatcgtgttcctgctgggctttggagtggccctggccagcctgattgaaaaatgtcccaaggacaacaaggactgcagcagctatggcagcttcagtgatgctgtgctggagctgttcaagctgaccatcggcctgggggacctgaacatccagcagaacagcaagtaccccatcctcttcctgttcctgctgatcacctacgtgatcctgacctttgtgctgctgctgaacatgctgattgccctgatgggagagaccgtggagaatgtgtccaaggagagcgagcgcatctggaggctgcagagggcccggaccatcctggagtttgagaagatgctgcctgagtggctgcggagccgcttcaggatgggagagctgtgcaaggtggctgaagatgacttccggctgtgcctgcgcatcaatgaggtgaagtggacagagtggaagacccacgtgtccttcctgaatgaagatcctggccctgtgagaagaacagacttcaacaagatccaggacagcagcaggaacaacagcaagaccaccctgaatgcctttgaggaggtggaggagttccctgagacctctgtgtag

SEQ ID NO: 173781 - DNA, 3360 bp, synthetic construct
  misc_feature 1..3360: note = Description of Artificial Sequence: Synthetic coding sequence
  source 1..3360: mol_type = other DNA
atgaagaggagcctgaggaagatgtggaggcctggagagaagaaggagccccagggcgtggtgtatgaagatgtgcctgatgacacagaggacttcaaggagagcctgaaggtggtgtttgagggcagcgcctacggcctgcagaacttcaacaagcagaagaagctgaagagatgtgatgacatggacaccttcttcctgcactacgccgctgctgagggccagatcgagctgatggagaagatcacccgggacagcagcctggaggtgctgcacgagatggatgattatggcaacacccccctgcactgtgctgtggagaagaaccagattgaatctgtgaagttcctgctgagcagaggagccaaccccaacctgaggaacttcaacatgatggcccccctgcacatcgctgtgcagggcatgaacaatgaggtgatgaaggtgctgctggagcacaggaccattgatgtgaacctggagggagaaaatggaaacacagctgtgatcatcgcctgcaccaccaacaacagcgaggccctgcagatcctgctgaagaagggggccaagccctgcaagagcaacaagtggggctgcttccccatccaccaggccgccttcagcggcagcaaggagtgcatggagatcatcctgcgctttggagaggagcacggctacagccggcagctgcacatcaacttcatgaacaacgggaaggccacccccctgcacctggccgtgcagaatggagacctggagatgatcaagatgtgcctggacaatggagcccagattgatcctgtggagaagggccgctgcacagccatccactttgctgccacccagggcgccacagaaattgtgaagctgatgatcagcagctacagcggctctgtggacatcgtgaacaccacagatggctgccacgagaccatgctgcaccgggccagcctgtttgaccaccacgagctggccgactacctgatctctgtgggcgctgacatcaacaagattgacagcgagggccgcagccccctcatcctggccacagccagcgcctcctggaacatcgtgaacctgctgctgagcaagggggcccaggtggacatcaaggacaactttggaagaaacttcctgcacctgactgtgcagcagccctacggcctgaagaacctgcggcctgagttcatgcagatgcagcagatcaaggagctggtgatggatgaagataatgatggctgcacccccctgcactacgcctgccggcagggcggccctggctctgtgaacaacctgctgggcttcaacgtgtccatccacagcaagagcaaggacaagaagagccccctgcactttgctgccagctatggccgcatcaacacctgccagaggctgctgcaggacatcagtgacacccggctgctgaatgaaggagacctgcacggcatgacccccctgcacctggccgccaagaatggacatgacaaggtggtgcagctgctgctgaagaagggggccctcttcctgagtgaccacaacggctggacagccctgcaccacgcctccatgggcggctacacccagaccatgaaggtgatcctggacaccaacctgaagtgcacagaccggctggatgaagatggcaacacagccctgcactttgctgcccgggagggccacgccaaggctgtggccctgctgctgagccacaatgctgacatcgtgctgaacaagcagcaggccagcttcctgcacctggccctgcacaacaagaggaaggaggtggtgctgaccatcatccgcagcaagcgctgggatgaatgtctgaagatcttcagccacaacagccctggcaacaagtgccccatcacagagatgattgagtacctgcctgagtgcatgaaggtgctgctggacttctgcatgctgcacagcacagaggacaagagctgccgggactactacatcgagtacaacttcaagtacctgcagtgccccctggagttcaccaagaagacccccacccaggatgtgatctatgagcccctgacagccctgaatgccatggtgcagaacaacagaattgagctgctgaaccaccctgtgtgcaaggagtacctgctgatgaagtggctggcctacggcttccgggcccacatgatgaacctgggcagctactgcctgggcctcatccccatgaccatcctggtggtgaacatcaagccaggcatggccttcaacagcacaggcatcatcaatgagaccagtgaccacagcgagatcctggacaccaccaacagctacctgatcaagacctgcatgatcctggtgttcctgagcagcatcttcggctactgcaaggaggccggccagatcttccagcagaagaggaactacttcatggacatcagcaatgtgctggagtggatcatctacaccaccggcatcatctttgtgctgcccctgtttgtggagatcccagcccacctgcagtggcagtgtggggccatcgctgtgtacttctactggatgaacttcctgctgtacctgcagagatttgagaactgtggcatcttcatcgtgatgctggaggtgatcctgaagaccctgctgcggagcacagtggtgttcatcttcctgctgctggccttcggcctgtccttctacatcctgctgaacctgcaggaccccttcagcagccccctgctgagcatcatccagaccttctccatgatgctgggggacatcaactaccgggagagcttcctggagccctacctgagaaatgagctggcccaccctgtgctgagctttgcccagctggtgtccttcaccatctttgtgcccatcgtgctgatgaacctgctgattggcctggccgtgggggacattgctgaggtgcagaagcacgccagcctgaagagaattgccatgcaggtggagctgcacaccagcctggagaagaagctgcccctgtggttcctgaggaaggtggaccagaagagcaccatcgtgtaccccaacaagcccaggtctgggggcatgctgttccacatcttctgcttcctgttctgcaccggggagatccggcaggagatccccaatgctgacaagagcctggagatggagatcctgaagcagaagtaccgcctgaaggacctgaccttcctgctggagaagcagcacgagctgatcaagctgatcatccagaagatggagatcatcagcgagacagaagatgatgacagccactgcagcttccaggaccgcttcaagaaggagcagatggagcagaggaacagccgctggaacacagtgctgcgggctgtgaaggccaagacccaccacctggagccctag

SEQ ID NO: 173782 - DNA, 2280 bp, synthetic construct
  misc_feature 1..2280: note = Description of Artificial Sequence: Synthetic coding sequence
  source 1..2280: mol_type = other DNA
atgatggccgccctgtaccccagcacagacctgagcggggccagcagcagcagcctgcccagcagccccagcagcagcagccccaatgaggtgatggccctgaaggatgtgcgggaggtgaaggaggagaacaccctgaatgagaagctgttcctgctggcctgtgacaagggggactactacatggtgaagaagatcctggaggagaacagcagcggggacctgaacatcaactgtgtggatgtgctgggcagaaatgctgtgaccatcaccattgaaaatgaaaacctggacatcctgcagctgctgctggactatggctgccagaagctgatggagcgcatccagaaccctgagtacagcaccaccatggatgtggcccctgtgatcctggccgcccacaggaacaactatgagatcctgaccatgctgctgaagcaggatgtgtccctgcccaagccccatgctgtgggctgtgagtgcaccctgtgcagcgccaagaacaagaaggacagcctgcggcacagccgcttccggctggacatctaccgctgcctggccagccctgccctgatcatgctgacagaggaggaccccatcctgcgggcctttgagctgtctgctgacctgaaggagctgagcctggtggaggtggagttcagaaatgactatgaggagctggcccggcagtgcaagatgtttgccaaggacctgctggcccaggccaggaacagccgggagctggaggtgatcctgaaccacaccagcagtgatgagcccctggacaagaggggcctgctggaggagaggatgaacctgagccggctgaagctggccatcaagtacaaccagaaggagtttgtgtcccagagcaactgccagcagttcctgaacacagtgtggtttggccagatgagcggctacagaaggaagcccacctgcaagaagatcatgacagtgctgactgtgggcatcttctggcctgtgctgagcctgtgctacctgattgcccccaagagccagtttggccgcatcatccacacccccttcatgaagttcatcatccacggggccagctacttcaccttcctgctgctgctgaacctgtacagcctggtgtacaatgaagacaagaagaacaccatgggccctgccctggagagaattgactacctgctgatcctgtggatcatcggcatgatctggagcgacatcaagaggctgtggtatgagggcctggaggacttcctggaggagagcaggaaccagctgagctttgtgatgaacagcctgtacctggccacctttgccctgaaggtggtggcccacaacaagttccatgactttgctgacaggaaggactgggatgccttccaccccaccctggtggccgagggcctgtttgcctttgccaacgtgctgagctacctgcggctcttcttcatgtacaccaccagcagcatcctgggccccctgcagatctccatgggccagatgctgcaggactttgggaagttcctgggcatgttcctgctggtgctcttctccttcaccatcggcctgacccagctgtatgacaagggctacaccagcaaggagcagaaggactgtgtgggcatcttctgtgagcagcagagcaatgacaccttccacagcttcatcggcacctgctttgccctcttctggtacatcttcagcctggcccacgtggccatctttgtgacccgcttctcctatggagaggagctgcagagctttgtgggcgctgtgattgtgggcacctacaacgtggtggtggtgattgtgctgaccaagctgctggtggccatgctgcacaagagcttccagctgattgccaaccacgaggacaaggagtggaagtttgcccgggccaagctgtggctgagctactttgatgacaagtgcaccctgcccccacccttcaacatcatccccagccccaagaccatctgctacatgatcagcagcctgagcaagtggatctgcagccacaccagcaagggcaaggtgaagaggcagaacagcctgaaggagtggaggaacctgaagcagaagagagatgagaactaccagaaggtgatgtgctgcctggtgcaccgctacctgacctccatgaggcagaagatgcagagcacagaccaggccaccgtggagaacctgaatgagctgcggcaggacctgagcaagttcagaaatgagatccgggacctgctgggcttccgcaccagcaaatatgccatgttctaccccaggaactag

SEQ ID NO: 173783 - DNA, 435 bp, synthetic construct
  misc_feature 1..435: note = Description of Artificial Sequence: Synthetic coding sequence
  source 1..435: mol_type = other DNA
atgatctggagcgacatcaagaggctgtggtatgagggcctggaggacttcctggaggagagcaggaaccagctgagctttgtgatgaacagcctgtacctggccacctttgccctgaaggtggtggcccacaacaagatctccatgggccagatgctgcaggactttgggaagttcctgggcatgttcctgctggtgctcttctccttcaccatcggcctgacccagctgtatgacaagggctacaccagcaaggagcagaaggactgtgtgggcatcttctgtgagcagcagagcaatgacaccttccacagcttcatcggcacctgctttgccctcttctggtacatcttcagcctggcccacgtggccatctttgtgacccgcttctcctatggagaggagctgcagagctttgtgggcgccgtcatctag

SEQ ID NO: 173784 - DNA, 2382 bp, synthetic construct
  misc_feature 1..2382: note = Description of Artificial Sequence: Synthetic coding sequence
  source 1..2382: mol_type = other DNA
atgatggccgccctgtaccccagcacagacctgagcggggccagcagcagcagcctgcccagcagccccagcagcagcagccccaatgaggtgatggccctgaaggatgtgcgggaggtgaaggaggagaacaccctgaatgagaagctgttcctgctggcctgtgacaagggggactactacatggtgaagaagatcctggaggagaacagcagcggggacctgaacatcaactgtgtggatgtgctgggcagaaatgctgtgaccatcaccattgaaaatgaaaacctggacatcctgcagctgctgctggactatggctgccagagcgcagatgccctgctggtggccatcgacagcgaggtggtgggcgctgtggacatcctgctgaaccaccggcccaagaggagcagccggcccaccatcgtgaagctgatggagcgcatccagaaccctgagtacagcaccaccatggatgtggcccctgtgatcctggccgcccacaggaacaactatgagatcctgaccatgctgctgaagcaggatgtgtccctgcccaagccccatgctgtgggctgtgagtgcaccctgtgcagcgccaagaacaagaaggacagcctgcggcacagccgcttccggctggacatctaccgctgcctggccagccctgccctgatcatgctgacagaggaggaccccatcctgcgggcctttgagctgtctgctgacctgaaggagctgagcctggtggaggtggagttcagaaatgactatgaggagctggcccggcagtgcaagatgtttgccaaggacctgctggcccaggccaggaacagccgggagctggaggtgatcctgaaccacaccagcagtgatgagcccctggacaagaggggcctgctggaggagaggatgaacctgagccggctgaagctggccatcaagtacaaccagaaggagtttgtgtcccagagcaactgccagcagttcctgaacacagtgtggtttggccagatgagcggctacagaaggaagcccacctgcaagaagatcatgacagtgctgactgtgggcatcttctggcctgtgctgagcctgtgctacctgattgcccccaagagccagtttggccgcatcatccacacccccttcatgaagttcatcatccacggggccagctacttcaccttcctgctgctgctgaacctgtacagcctggtgtacaatgaagacaagaagaacaccatgggccctgccctggagagaattgactacctgctgatcctgtggatcatcggcatgatctggagcgacatcaagaggctgtggtatgagggcctggaggacttcctggaggagagcaggaaccagctgagctttgtgatgaacagcctgtacctggccacctttgccctgaaggtggtggcccacaacaagttccatgactttgctgacaggaaggactgggatgccttccaccccaccctggtggccgagggcctgtttgcctttgccaacgtgctgagctacctgcggctcttcttcatgtacaccaccagcagcatcctgggccccctgcagatctccatgggccagatgctgcaggactttgggaagttcctgggcatgttcctgctggtgctcttctccttcaccatcggcctgacccagctgtatgacaagggctacaccagcaaggagcagaaggactgtgtgggcatcttctgtgagcagcagagcaatgacaccttccacagcttcatcggcacctgctttgccctcttctggtacatcttcagcctggcccacgtggccatctttgtgacccgcttctcctatggagaggagctgcagagctttgtgggcgctgtgattgtgggcacctacaacgtggtggtggtgattgtgctgaccaagctgctggtggccatgctgcacaagagcttccagctgattgccaaccacgaggacaaggagtggaagtttgcccgggccaagctgtggctgagctactttgatgacaagtgcaccctgcccccacccttcaacatcatccccagccccaagaccatctgctacatgatcagcagcctgagcaagtggatctgcagccacaccagcaagggcaaggtgaagaggcagaacagcctgaaggagtggaggaacctgaagcagaagagagatgagaactaccagaaggtgatgtgctgcctggtgcaccgctacctgacctccatgaggcagaagatgcagagcacagaccaggccaccgtggagaacctgaatgagctgcggcaggacctgagcaagttcagaaatgagatccgggacctgctgggcttccgcaccagcaaatatgccatgttctaccccaggaactag

SEQ ID NO: 173785 - DNA, 2415 bp, synthetic construct
  misc_feature 1..2415: note = Description of Artificial Sequence: Synthetic coding sequence
  source 1..2415: mol_type = other DNA
atggcccagttctactacaagagaaatgtgaatgccccctacagagaccgcatccccctgcgcatcgtgcgggcagagagcgagctgagccccagcgagaaggcctacctgaatgctgtggagaagggggactatgcctctgtgaagaagagcctggaggaggccgagatctacttcaagatcaacatcaactgcatcgaccccctgggccgcacagccctgctgattgccattgaaaatgaaaacctggagctgattgagctgctgctgtccttcaacgtgtatgtgggagatgccctgctgcacgccatcaggaaggaggtggtgggcgctgtggagctgctgctgaaccacaagaagcccagcggggagaagcagtttgtggcccagcccaactgccagcagctgctggccagccgctggtatgatgagttccctggctggaggcggcggcactgggccgtgaagatggtgacctgcttcatcatcggcctgctcttccctgtgttttctgtgtgctacctgattgcccccaagagccccctgggcctcttcatcaggaagcccttcatcaagttcatctgccacacagccagctacctgaccttcctgttcctgctgctgctggccagccagcacatcgacagaagtgacctgaaccggcagggccccccacccaccatcgtggagtggatgatcctgccctgggtgctgggcttcatctggggcgagatcaagcagatgtgggatggcggcctgcaggactacatccatgactggtggaacctgatggactttgtgatgaacagcctgtacctggccaccatcagcctgaagatcgtggcctttgtgaagtacagcgccctgaacccccgggagagctgggacatgtggcaccccaccctggtggccgaggccctgtttgccatcgccaacatcttcagcagcctgcggctcatcagcctcttcaccgccaacagccacctgggccccctgcagatcagcctgggccgcatgctgctggacatcctgaagttcctgttcatctactgcctggtgctgctggcctttgccaacggcctgaaccagctgtacttctactatgaggagaccaagggcctgacctgcaagggcatccgctgtgagaagcagaacaatgccttcagcaccctgtttgagaccctgcagagcctcttctggagcatcttcggcctcatcaacctgtatgtgaccaacgtgaaggcccagcacgagttcacagaatttgtgggcgccaccatgtttggcacctacaacgtcatcagcctggtggtgctgctgaacatgctgattgccatgatgaacaacagctaccagctgattgctgaccacgccgacatcgagtggaagtttgcccggaccaagctgtggatgagctactttgaggagggcggcaccctgcccacccccttcaacgtcatccccagccccaagagcctgtggtacctgatcaagtggatctggacccacctgtgcaagaagaagatgaggaggaagccagagagctttggcaccatcggcagaagagctgctgacaacctgcggcggcaccaccagtaccaggaggtgatgaggaacctggtgaagcgctacgtggccgccatgatcagagatgccaagacagaggagggcctgacagaggagaacttcaaggagctgaagcaggacatcagcagcttccgctttgaggtgctgggcctgctgcggggcagcaagctgagcaccatccagagcgccaatgccagcaaggagagcagcaacagcgctgacagtgatgagaagagtgacagcgagggcaacagcaaggacaagaagaagaacttcagcctgtttgacctgaccaccctcatccaccccaggtctgctgccatcgccagcgagcggcacaacatcagcaatggcagcgccctggtggtgcaggagcccccccgggagaagcagaggaaggtgaactttgtgacagacatcaagaactttggcctcttccacagaagaagcaagcagaatgctgctgagcagaatgccaaccagatcttctctgtgtctgaggaggtggcccggcagcaggccgccggccccctggagaggaacatccagctggagagccggggcctggccagcagaggagacctgagcatccctggcctgtctgagcagtgtgtgctggtggaccaccgggagaggaacacagacaccctgggcctgcaggtgggcaagagggtgtgccccttcaagtctgagaaggtggtggtggaggacacagtgcccatcatccccaaggagaagcacgccaaggaggaggacagcagcattgattatgacctgaacctgcctgacacagtgacccatgaagattatgtgaccacccggctgtag

SEQ ID NO: 173786 - DNA, 2511 bp, synthetic construct
  misc_feature 1..2511: note = Description of Artificial Sequence: Synthetic coding sequence
  source 1..2511: mol_type = other DNA
atggcccagttctactacaagagaaatgtgaatgccccctacagagaccgcatccccctgcgcatcgtgcgggcagagagcgagctgagccccagcgagaaggcctacctgaatgctgtggagaagggggactatgcctctgtgaagaagagcctggaggaggccgagatctacttcaagatcaacatcaactgcatcgaccccctgggccgcacagccctgctgattgccattgaaaatgaaaacctggagctgattgagctgctgctgtccttcaacgtgtatgtgggagatgccctgctgcacgccatcaggaaggaggtggtgggcgctgtggagctgctgctgaaccacaagaagcccagcggggagaagcaggtgccccccatcctgctggacaagcagttcagcgagttcaccccagacatcacccccatcatcctggccgcccacaccaacaactatgagatcatcaagctgctggtgcagaagggcgtgtctgtgccccggccccatgaggtgcgctgcaactgtgtggagtgtgtgagcagcagtgatgtggacagcctgcggcacagccgcagccggctgaacatctacaaggccctggccagccccagcctgattgccctgagcagcgaggaccccttcctgacagccttccagctgtcctgggagctgcaggagctgagcaaggtggagaatgagttcaagtcagaatatgaggagctgagccggcagtgcaagcagtttgccaaggacctgctggaccagaccaggagcagccgggagctggagatcatcctgaactacagagatgacaacagcctcatcgaggagcagagcggaaatgacctggcccggctgaagctggccatcaagtaccggcagaaggagtttgtggcccagcccaactgccagcagctgctggccagccgctggtatgatgagttccctggctggaggagaagacactgggccgtgaagatggtgacctgcttcatcatcggcctgctcttccctgtgttttctgtgtgctacctgattgcccccaagagccccctgggcctcttcatcaggaagcccttcatcaagttcatctgccacacagccagctacctgaccttcctgttcctgctgctgctggccagccagcacatcgacagaagtgacctgaaccggcagggccccccacccaccatcgtggagtggatgatcctgccctgggtgctgggcttcatctggggcgagatcaagcagatgtgggatggcggcctgcaggactacatccatgactggtggaacctgatggactttgtgatgaacagcctgtacctggccaccatcagcctgaagatcgtggcctttgtgaagtacagcgccctgaacccccgggagagctgggacatgtggcaccccaccctggtggccgaggccctgtttgccatcgccaacatcttcagcagcctgcggctcatcagcctcttcaccgccaacagccacctgggccccctgcagatcagcctgggccgcatgctgctggacatcctgaagttcctgttcatctactgcctggtgctgctggcctttgccaacggcctgaaccagctgtacttctactatgaggagaccaagggcctgacctgcaagggcatccgctgtgagaagcagaacaatgccttcagcaccctgtttgagaccctgcagagcctcttctggagcatcttcggcctcatcaacctgtatgtgaccaacgtgaaggcccagcacgagttcacagaatttgtgggcgccaccatgtttggcacctacaacgtcatcagcctggtggtgctgctgaacatgctgattgccatgatgaacaacagctaccagctgattgctgaccatgctgacatcgagtggaagtttgcccggaccaagctgtggatgagctactttgaggagggcggcaccctgcccacccccttcaacgtcatccccagccccaagagcctgtggtacctgatcaagtggatctggacccacctgtgcaagaagaagatgaggaggaagccagagagctttggcaccatcggccggcgggctgctgacaacctgcggcggcaccaccagtaccaggaggtgatgaggaacctggtgaagagatatgtggccgccatgatcagagatgccaagacagaggaggtggcccggcagcaggccgccggccccctggagaggaacatccagctggagagccggggcctggccagcagaggagacctgagcatccctggcctgtctgagcagtgtgtgctggtggaccaccgggagaggaacacagacaccctgggcctgcaggtgggcaagagggtgtgccccttcaagtctgagaaggtggtggtggaggacacagtgcccatcatccccaaggagaagcacgccaaggaggaggacagcagcattgattatgacctgaacctgcctgacacagtgacccatgaagattatgtgaccacccggctgtag

SEQ ID NO: 173787 - DNA, 2682 bp, synthetic construct
  misc_feature 1..2682: note = Description of Artificial Sequence: Synthetic coding sequence
  source 1..2682: mol_type = other DNA
atggcccagttctactacaagagaaatgtgaatgccccctacagagaccgcatccccctgcgcatcgtgcgggcagagagcgagctgagccccagcgagaaggcctacctgaatgctgtggagaagggggactatgcctctgtgaagaagagcctggaggaggccgagatctacttcaagatcaacatcaactgcatcgaccccctgggccgcacagccctgctgattgccattgaaaatgaaaacctggagctgattgagctgctgctgtccttcaacgtgtatgtgggagatgccctgctgcacgccatcaggaaggaggtggtgggcgctgtggagctgctgctgaaccacaagaagcccagcggggagaagcaggtgccccccatcctgctggacaagcagttcagcgagttcaccccagacatcacccccatcatcctggccgcccacaccaacaactatgagatcatcaagctgctggtgcagaagggcgtgtctgtgccccggccccatgaggtgcgctgcaactgtgtggagtgtgtgagcagcagtgatgtggacagcctgcggcacagccgcagccggctgaacatctacaaggccctggccagccccagcctgattgccctgagcagcgaggaccccttcctgacagccttccagctgtcctgggagctgcaggagctgagcaaggtggagaatgagttcaagtcagaatatgaggagctgagccggcagtgcaagcagtttgccaaggacctgctggaccagaccaggagcagccgggagctggagatcatcctgaactacagagatgacaacagcctcatcgaggagcagagcggaaatgacctggcccggctgaagctggccatcaagtaccggcagaaggagtttgtggcccagcccaactgccagcagctgctggccagccgctggtatgatgagttccctggctggaggagaagacactgggccgtgaagatggtgacctgcttcatcatcggcctgctcttccctgtgttttctgtgtgctacctgattgcccccaagagccccctgggcctcttcatcaggaagcccttcatcaagttcatctgccacacagccagctacctgaccttcctgttcctgctgctgctggccagccagcacatcgacagaagtgacctgaaccggcagggccccccacccaccatcgtggagtggatgatcctgccctgggtgctgggcttcatctggggcgagatcaagcagatgtgggatggcggcctgcaggactacatccatgactggtggaacctgatggactttgtgatgaacagcctgtacctggccaccatcagcctgaagatcgtggcctttgtgaagtacagcgccctgaacccccgggagagctgggacatgtggcaccccaccctggtggccgaggccctgtttgccatcgccaacatcttcagcagcctgcggctcatcagcctcttcaccgccaacagccacctgggccccctgcagatcagcctgggccgcatgctgctggacatcctgaagttcctgttcatctactgcctggtgctgctggcctttgccaacggcctgaaccagctgtacttctactatgaggagaccaagggcctgacctgcaagggcatccgctgtgagaagcagaacaatgccttcagcaccctgtttgagaccctgcagagcctcttctggagcatcttcggcctcatcaacctgtatgtgaccaacgtgaaggcccagcacgagttcacagaatttgtgggcgccaccatgtttggcacctacaacgtcatcagcctggtggtgctgctgaacatgctgattgccatgatgaacaacagctaccagctgattgctgaccatgctgacatcgagtggaagtttgcccggaccaagctgtggatgagctactttgaggagggcggcaccctgcccacccccttcaacgtcatccccagccccaagagcctgtggtacctgatcaagtggatctggacccacctgtgcaagaagaagatgaggaggaagccagagagctttggcaccatcggccggcgggctgctgacaacctgcggcggcaccaccagtaccaggaggtgatgaggaacctggtgaagagatatgtggccgccatgatcagagatgccaagacagaggagggcctgacagaggagaacttcaaggagctgaagcaggacatcagcagcttccgctttgaggtgctgggcctgctgcggggcagcaagctgagcaccatccagagcgccaatgccagcaaggagagcagcaacagcgctgacagtgatgagaagagtgacagcgaggaggaggtggcccggcagcaggccgccggccccctggagaggaacatccagctggagagccggggcctggccagcagaggagacctgagcatccctggcctgtctgagcagtgtgtgctggtggaccaccgggagaggaacacagacaccctgggcctgcaggtgggcaagagggtgtgccccttcaagtctgagaaggtggtggtggaggacacagtgcccatcatccccaaggagaagcacgccaaggaggaggacagcagcattgattatgacctgaacctgcctgacacagtgacccatgaggactatgtgaccacccggctgtag

SEQ ID NO: 173788 - DNA, 2487 bp, synthetic construct
  misc_feature 1..2487: note = Description of Artificial Sequence: Synthetic coding sequence
  source 1..2487: mol_type = other DNA
atggcccagttctactacaagagaaatgtgaatgccccctacagagaccgcatccccctgcgcatcgtgcgggcagagagcgagctgagccccagcgagaaggcctacctgaatgctgtggagaagggggactatgcctctgtgaagaagagcctggaggaggccgagatctacttcaagatcaacatcaactgcatcgaccccctgggccgcacagccctgctgattgccattgaaaatgaaaacctggagctgattgagctgctgctgtccttcaacgtgtatgtgggagatgccctgctgcacgccatcaggaaggaggtggtgggcgctgtggagctgctgctgaaccacaagaagcccagcggggagaagcaggtgccccccatcctgctggacaagcagttcagcgagttcaccccagacatcacccccatcatcctggccgcccacaccaacaactatgagatcatcaagctgctggtgcagaagggcgtgtctgtgccccggccccatgaggtgcgctgcaactgtgtggagtgtgtgagcagcagtgatgtggacagcctgcggcacagccgcagccggctgaacatctacaaggccctggccagccccagcctgattgccctgagcagcgaggaccccttcctgacagccttccagctgtcctgggagctgcaggagctgagcaaggtggagaatgagttcaagtcagaatatgaggagctgagccggcagtgcaagcagtttgccaaggacctgctggaccagaccaggagcagccgggagctggagatcatcctgaactacagagatgacaacagcctcatcgaggagcagagcggaaatgacctggcccggctgaagctggccatcaagtaccggcagaaggagtttgtggcccagcccaactgccagcagctgctggccagccgctggtatgatgagttccctggctggaggagaagacactgggccgtgaagatggtgacctgcttcatcatcggcctgctcttccctgtgttttctgtgtgctacctgattgcccccaagagccccctgggcctcttcatcaggaagcccttcatcaagttcatctgccacacagccagctacctgaccttcctgttcctgctgctgctggccagccagcacatcgacagaagtgacctgaaccggcagggccccccacccaccatcgtggagtggatgatcctgccctgggtgctgggcttcatctggggcgagatcaagcagatgtgggatggcggcctgcaggactacatccatgactggtggaacctgatggactttgtgatgaacagcctgtacctggccaccatcagcctgaagatcgtggcctttgtgaagtacagcgccctgaacccccgggagagctgggacatgtggcaccccaccctggtggccgaggccctgtttgccatcgccaacatcttcagcagcctgcggctcatcagcctcttcaccgccaacagccacctgggccccctgcagatcagcctgggccgcatgctgctggacatcctgaagttcctgttcatctactgcctggtgctgctggcctttgccaacggcctgaaccagctgtacttctactatgaggagaccaagggcctgacctgcaagggcatccgctgtgagaagcagaacaatgccttcagcaccctgtttgagaccctgcagagcctcttctggagcatcttcggcctcatcaacctgtatgtgaccaacgtgaaggcccagcacgagttcacagaatttgtgggcgccaccatgtttggcacctacaacgtcatcagcctggtggtgctgctgaacatgctgattgccatgatgaacaacagctaccagctgattgccaggagagctgctgacaacctgcggcggcaccaccagtaccaggaggtgatgaggaacctggtgaagcgctacgtggccgccatgatcagagatgccaagacagaggagggcctgacagaggagaacttcaaggagctgaagcaggacatcagcagcttccgctttgaggtgctgggcctgctgcggggcagcaagctgagcaccatccagagcgccaatgccagcaaggagagcagcaacagcgctgacagtgatgagaagagtgacagcgaggaggaggtggcccggcagcaggccgccggccccctggagaggaacatccagctggagagccggggcctggccagcagaggagacctgagcatccctggcctgtctgagcagtgtgtgctggtggaccaccgggagaggaacacagacaccctgggcctgcaggtgggcaagagggtgtgccccttcaagtctgagaaggtggtggtggaggacacagtgcccatcatccccaaggagaagcacgccaaggaggaggacagcagcattgattatgacctgaacctgcctgacacagtgacccatgaagattatgtgaccacccggctgtag

SEQ ID NO: 173789 - DNA, 2415 bp, synthetic construct; identical to SEQ ID NO: 173785
  misc_feature 1..2415: note = Description of Artificial Sequence: Synthetic coding sequence
  source 1..2415: mol_type = other DNA

SEQ ID NO: 173790 - DNA, 2949 bp, synthetic construct
  misc_feature 1..2949: note = Description of Artificial Sequence: Synthetic coding sequence
  source 1..2949: mol_type = other DNA
atggcccagttctactacaagagaaatgtgaatgccccctacagagaccgcatccccctgcgcatcgtgcgggcagagagcgagctgagccccagcgagaaggcctacctgaatgctgtggagaagggggactatgcctctgtgaagaagagcctggaggaggccgagatctacttcaagatcaacatcaactgcatcgaccccctgggccgcacagccctgctgattgccattgaaaatgaaaacctggagctgattgagctgctgctgtccttcaacgtgtatgtgggagatgccctgctgcacgccatcaggaaggaggtggtgggcgctgtggagctgctgctgaaccacaagaagcccagcggggagaagcaggtgccccccatcctgctggacaagcagttcagcgagttcaccccagacatcacccccatcatcctggccgcccacaccaacaactatgagatcatcaagctgctggtgcagaagggcgtgtctgtgccccggccccatgaggtgcgctgcaactgtgtggagtgtgtgagcagcagtgatgtggacagcctgcggcacagccgcagccggctgaacatctacaaggccctggccagccccagcctgattgccctgagcagcgaggaccccttcctgacagccttccagctgtcctgggagctgcaggagctgagcaaggtggagaatgagttcaagtcagaatatgaggagctgagccggcagtgcaagcagtttgccaaggacctgctggaccagaccaggagcagccgggagctggagatcatcctgaactacagagatgacaacagcctcatcgaggagcagagcggaaatgacctggcccggctgaagctggccatcaagtaccggcagaaggagtttgtggcccagcccaactgccagcagctgctggccagccgctggtatgatgagttccctggctggaggagaagacactgggccgtgaagatggtgacctgcttcatcatcggcctgctcttccctgtgttttctgtgtgctacctgattgcccccaagagccccctgggcctcttcatcaggaagcccttcatcaagttcatctgccacacagccagctacctgaccttcctgttcctgctgctgctggccagccagcacatcgacagaagtgacctgaaccggcagggccccccacccaccatcgtggagtggatgatcctgccctgggtgctgggcttcatctggggcgagatcaagcagatgtgggatggcggcctgcaggactacatccatgactggtggaacctgatggactttgtgatgaacagcctgtacctggccaccatcagcctgaagatcgtggcctttgtgaagtacagcgccctgaacccccgggagagctgggacatgtggcaccccaccctggtggccgaggccctgtttgccatcgccaacatcttcagcagcctgcggctcatcagcctcttcaccgccaacagccacctgggccccctgcagatcagcctgggccgcatgctgctggacatcctgaagttcctgttcatctactgcctggtgctgctggcctttgccaacggcctgaaccagctgtacttctactatgaggagaccaagggcctgacctgcaagggcatccgctgtgagaagcagaacaatgccttcagcaccctgtttgagaccctgcagagcctcttctggagcatcttcggcctcatcaacctgtatgtgaccaacgtgaaggcccagcacgagttcacagaatttgtgggcgccaccatgtttggcacctacaacgtcatcagcctggtggtgctgctgaacatgctgattgccatgatgaacaacagctaccagctgattgctgaccatgctgacatcgagtggaagtttgcccggaccaagctgtggatgagctactttgaggagggcggcaccctgcccacccccttcaacgtcatccccagccccaagagcctgtggtacctgatcaagtggatctggacccacctgtgcaagaagaagatgaggaggaagccagagagctttggcaccatcggcgtgaggacccagcacagaagagctgctgacaacctgcggcggcaccaccagtaccaggaggtgatgaggaacctggtgaagcgctacgtggccgccatgatcagagatgccaagacagaggagggcctgacagaggagaacttcaaggagctgaagcaggacatcagcagcttccgctttgaggtgctgggcctgctgcggggcagcaagctgagcaccatccagagcgccaatgccagcaaggagagcagcaacagcgctgacagtgatgagaagagtgacagcgagggcaacagcaaggacaagaagaagaacttcagcctgtttgacctgaccaccctcatccaccccaggtctgctgccatcgccagcgagcggcacaacatcagcaatggcagcgccctggtggtgcaggagcccccccgggagaagcagaggaaggtgaactttgtgacagacatcaagaactttggcctcttccacagaagaagcaagcagaatgctgctgagcagaatgccaaccagatcttctctgtgtctgaggaggtggcccggcagcaggccgccggccccctggagaggaacatccagctggagagccggggcctggccagcagaggagacctgagcatccctggcctgtctgagcagtgtgtgctggtggaccaccgggagaggaacacagacaccctgggcctgcaggtgggcaagagggtgtgccccttcaagtctgagaaggtggtggtggaggacacagtgcccatcatccccaaggagaagcacgccaaggaggaggacagcagcattgattatgacctgaacctgcctgacacagtgacccatgaagattatgtgaccacccggctgtag

SEQ ID NO: 173791 - DNA, 2934 bp, synthetic construct
  misc_feature 1..2934: note = Description of Artificial Sequence: Synthetic coding sequence
  source 1..2934: mol_type = other DNA
atggcccagttctactacaagagaaatgtgaatgccccctacagagaccgcatccccctgcgcatcgtgcgggcagagagcgagctgagccccagcgagaaggcctacctgaatgctgtggagaagggggactatgcctctgtgaagaagagcctggaggaggccgagatctacttcaagatcaacatcaactgcatcgaccccctgggccgcacagccctgctgattgccattgaaaatgaaaacctggagctgattgagctgctgctgtccttcaacgtgtatgtgggagatgccctgctgcacgccatcaggaaggaggtggtgggcgctgtggagctgctgctgaaccacaagaagcccagcggggagaagcaggtgccccccatcctgctggacaagcagttcagcgagttcaccccagacatcacccccatcatcctggccgcccacaccaacaactatgagatcatcaagctgctggtgcagaagggcgtgtctgtgccccggccccatgaggtgcgctgcaactgtgtggagtgtgtgagcagcagtgatgtggacagcctgcggcacagccgcagccggctgaacatctacaaggccctggccagccccagcctgattgccctgagcagcgaggaccccttcctgacagccttccagctgtcctgggagctgcaggagctgagcaaggtggagaatgagttcaagtcagaatatgaggagctgagccggcagtgcaagcagtttgccaaggacctgctggaccagaccaggagcagccgggagctggagatcatcctgaactacagagatgacaacagcctcatcgaggagcagagcggaaatgacctggcccggctgaagctggccatcaagtaccggcagaaggagtttgtggcccagcccaactgccagcagctgctggccagccgctggtatgatgagttccctggctggaggagaagacactgggccgtgaagatggtgacctgcttcatcatcggcctgctcttccctgtgttttctgtgtgctacctgattgcccccaagagccccctgggcctcttcatcaggaagcccttcatcaagttcatctgccacacagccagctacctgaccttcctgttcctgctgctgctggccagccagcacatcgacagaagtgacctgaaccggcagggccccccacccaccatcgtggagtggatgatcctgccctgggtgctgggcttcatctggggcgagatcaagcagatgtgggatggcggcctgcaggactacatccatgactggtggaacctgatggactttgtgatgaacagcctgtacctggccaccatcagcctgaagatcgtggcctttgtgaagtacagcgccctgaacccccgggagagctgggacatgtggcaccccaccctggtggccgaggccctgtttgccatcgccaacatcttcagcagcctgcggctcatcagcctcttcaccgccaacagccacctgggccccctgcagatcagcctgggccgcatgctgctggacatcctgaagttcctgttcatctactgcctggtgctgctggcctttgccaacggcctgaaccagctgtacttctactatgaggagaccaagggcctgacctgcaagggcatccgctgtgagaagcagaacaatgccttcagcaccctgtttgagaccctgcagagcctcttctggagcatcttcggcctcatcaacctgtatgtgaccaacgtgaaggcccagcacgagttcacagaatttgtgggcgccaccatgtttggcacctacaacgtcatcagcctggtggtgctgctgaacatgctgattgccatgatgaacaacagctaccagctgattgctgaccatgctgacatcgagtggaagtttgcccggaccaagctgtggatgagctactttgaggagggcggcaccctgcccacccccttcaacgtcatccccagccccaagagcctgtggtacctgatcaagtggatctggacccacctgtgcaagaagaagatgaggaggaagccagagagctttggcaccatcggccggcgggctgctgacaacctgcggcggcaccaccagtaccaggaggtgatgaggaacctggtgaagagatatgtggccgccatgatcagagatgccaagacagaggagggcctgacagaggagaacttcaaggagctgaagcaggacatcagcagcttccgctttgaggtgctgggcctgctgcggggcagcaagctgagcaccatccagagcgccaatgccagcaaggagagcagcaacagcgctgacagtgatgagaagagtgacagcgagggcaacagcaaggacaagaagaagaacttcagcctgtttgacctgaccaccctcatccaccccaggtctgctgccatcgccagcgagcggcacaacatcagcaatggaagtgccctggtggtgcaggagcccccccgggagaagcagaggaaggtgaactttgtgacagacatcaagaactttggcctcttccaccggcgcagcaagcagaatgctgctgagcagaatgccaaccagatcttctctgtgtctgaggaggtggcccggcagcaggccgccggccccctggagaggaacatccagctggagagccggggcctggccagcagaggagacctgagcatccctggcctgtctgagcagtgtgtgctggtggaccaccgggagaggaacacagacaccctgggcctgcaggtgggcaagagggtgtgccccttcaagtctgagaaggtggtggtggaggacacagtgcccatcatccccaaggagaagcacgccaaggaggaggacagcagcattgattatgacctgaacctgcctgacacagtgacccatgaggactatgtgaccacccggctgtag

SEQ ID NO: 173792 - DNA, 1383 bp, synthetic construct
  misc_feature 1..1383: note = Description of Artificial Sequence: Synthetic coding sequence
  source 1..1383: mol_type = other DNA
atggcccagttctactacaagagaaatgtgaatgccccctacagagaccgcatccccctgcgcatcgtgcgggcagagagcgagctgagccccagcgagaaggcctacctgaatgctgtggagaagggggactatgcctctgtgaagaagagcctggaggaggccgagatctacttcaagatcaacatcaactgcatcgaccccctgggccgcacagccctgctgattgccattgaaaatgaaaacctggagctgattgagctgctgctgtccttcaacgtgtatgtgggagatgccctgctgcacgccatcaggaaggaggtggtgggcgctgtggagctgctgctgaaccacaagaagcccagcggggagaagcaggtgccccccatcctgctggacaagcagttcagcgagttcaccccagacatcacccccatcatcctggccgcccacaccaacaactatgagatcatcaagctgctggtgcagaagggcgtgtctgtgccccggccccatgaggtgcgctgcaactgtgtggagtgtgtgagcagcagtgatgtggacagcctgcggcacagccgcagccggctgaacatctacaaggccctggccagccccagcctgattgccctgagcagcgaggaccccttcctgacagccttccagctgtcctgggagctgcaggagctgagcaaggtggagaatgagttcaagtcagaatatgaggagctgagccggcagtgcaagcagtttgccaaggacctgctggaccagaccaggagcagccgggagctggagatcatcctgaactacagagatgacaacagcctcatcgaggagcagagcggaaatgacctggcccggctgaagctggccatcaagtaccggcagaaggagtttgtggcccagcccaactgccagcagctgctggccagccgctggtatgatgagttccctggctggaggagaagacactgggccgtgaagatggtgacctgcttcatcatcggcctgctcttccctgtgttttctgtgtgctacctgattgcccccaagagccccctgggcctcttcatcaggaagcccttcatcaagttcatctgccacacagccagctacctgaccttcctgttcctgctgctgctggccagccagcacatcgacagaagtgacctgaaccggcagggccccccacccaccatcgtggagtggatgatcctgccctgggtgctgggcttcatctggggcgagatcaagcagatgtgggatggcggcctgcaggactacatccatgactggtggaacctgatggactttgtgatgaacagcctgtacctggccaccatcagcctgaagatcgtggcctttgtgaaggtgatctag

SEQ ID NO: 173793 - DNA, 2511 bp, synthetic construct; identical to SEQ ID NO: 173786
  misc_feature 1..2511: note = Description of Artificial Sequence: Synthetic coding sequence
  source 1..2511: mol_type = other DNA

SEQ ID NO: 173794 - DNA, 2394 bp, synthetic construct
  misc_feature 1..2394: note = Description of Artificial Sequence: Synthetic coding sequence
  source 1..2394: mol_type = other DNA
atggctgctgcccctgtggccgccggcagcggggccggccggggccgccgctctgctgccaccgtggccgcctggggcggctggggcggccggccccggcccggcaacatcctgctgcagctgcggcagggccagctgaccggccggggcctggtgcgggctgtgcagttcacagagaccttcctgacagagcgggacaagcagagcaagtggagcggcatcccccagctgctgctgaagctgcacaccaccagccacctgcacagcgactttgtggagtgccagaacatcctgaaggagatcagccccctgctgtccatggaggccatggcctttgtgacagaggagaggaagctgacccaggagaccacctaccccaacacctacatctttgacctgtttggaggagtggacctgctggtggagatcctgatgaggcccaccatcagcatccggggccagaagctgaagatcagtgatgagatgagcaaggactgcctgagcatcctgtacaacacctgtgtgtgcacagaaggagtgaccaagaggctggccgagaagaatgactttgtgatcttcctgttcaccctgatgaccagcaagaagaccttcctgcagacagccaccctgattgaggacatcctgggcgtgaagaaggagatgatccggctggatgaggtgcccaacctgagcagcctggtgagcaactttgaccagcagcagctggccaacttctgccgcatcctggccgtgaccatcagcgagatggacacaggaaatgatgacaagcacaccctgctggccaagaatgcccagcagaagaagagcctgagcctgggccccagcgctgctgagatcaaccaggccgccctgctgagcatccctggctttgtggagcggctgtgcaagctggccaccaggaaggtgtctgagagcactggaacagccagcttcctgcaggagctggaggagtggtacacctggctggacaatgccctggtgctggatgccctgatgagggtggccaatgaggagagcgagcacaaccaggccagcatcgtgttccccccacctggggcctctgaagaaaatggcctgccccacaccagcgcccggacccagctgccccagagcatgaagatcatgcatgagatcatgtacaagctggaggtgctgtatgtgctgtgtgtgctgctgatgggccggcagaggaaccaggtgcacaggatgattgctgagttcaagctgatccctggcctgaacaacctgtttgacaagctgatctggaggaagcacagcgccagcgccctggtgctgcacggccacaaccagaactgtgactgcagcccagacatcaccctgaagatccagttcctgcggctgctgcagagcttcagtgaccaccacgagaacaagtacctgctgctgaacaaccaggagctgaatgagctgagcgccatcagcctgaaggccaacatccctgaggtggaggccgtgctgaacacagacaggagcctggtgtgtgatggcaagaggggcctgctgacccggctgctgcaggtgatgaagaaggagcctgctgagagcagcttccgcttctggcaggcccgggctgtggagagcttcctgcggggcaccaccagctatgctgaccagatgttcctgctgaagaggggcctgctggagcacatcctgtactgcatcgtggacagcgagtgcaagagcagagatgtgctgcagagctactttgacctgctgggggagctgatgaagttcaacgtggatgccttcaagcgcttcaacaagtacatcaacacagatgccaagttccaggtgttcctgaagcagatcaacagcagcctggtggacagcaacatgctggtgcgctgtgtgaccctgagcctggacagatttgagaaccaggtggacatgaaggtggccgaggtgctgtctgagtgccgcctgctggcctacatcagccaggtgcccacccagatgtccttcctgttccgcctcatcaacatcatccacgtgcagaccctgacccaggagaatgtgtcctgcctgaacaccagcctggtgatcctgatgctggcccggaggaaggagcggctgcccctgtacctgcggctgctgcagaggatggagcacagcaagaagtacccaggcttcctgctgaacaacttccacaacctgctgcgcttctggcagcagcactacctgcacaaggacaaggacagcacctgcctggagaacagcagctgcatctccttctcctactggaaggagaccgtgtccatcctgctgaacccagaccggcagagccccagcgccctggtgtcctacatcgaggagccctacatggacatcgaccgggacttcacagaggagtag

SEQ ID NO: 173795 - DNA, 2277 bp, synthetic construct
  misc_feature 1..2277: note = Description of Artificial Sequence: Synthetic coding sequence
  source 1..2277: mol_type = other DNA
atggctgctgcccctgtggccgccggcagcggggccggccggggccgccgctctgctgccaccgtggccgcctggggcggctggggcggccggccccggcccggcaacatcctgctgcagctgcggcagggccagctgaccggccggggcctggtgcgggctgtgcagttcacagagaccttcctgacagagcgggacaagcagagcaagtggagcggcatcccccagctgctgctgaagctgcacaccaccagccacctgcacagcgactttgtggagtgccagaacatcctgaagctgctggtggagatcctgatgaggcccaccatcagcatccggggccagaagctgaagatcagtgatgagatgagcaaggactgcctgagcatcctgtacaacacctgtgtgtgcacagagggcgtgaccaagaggctggccgagaagaatgactttgtgatcttcctgttcaccctgatgaccagcaagaagaccttcctgcagacagccaccctgattgaggacatcctgggcgtgaagaaggagatgatccggctggatgaggtgcccaacctgagcagcctggtgagcaactttgaccagcagcagctggccaacttctgccgcatcctggccgtgaccatcagcgagatggacacaggaaatgatgacaagcacaccctgctggccaagaatgcccagcagaagaagagcctgagcctgggccccagcgctgctgagatcaaccaggccgccctgctgagcatccctggctttgtggagcggctgtgcaagctggccaccaggaaggtgtctgagagcactggaacagccagcttcctgcaggagctggaggagtggtacacctggctggacaatgccctggtgctggatgccctgatgagggtggccaatgaggagagcgagcacaaccaggccagcatcgtgtttcctcctcctggggccagcgaggagaatggcctgccccacaccagcgcccggacccagctgccccagagcatgaagatcatgcatgagatcatgtacaagctggaggtgctgtatgtgctgtgtgtgctgctgatgggccggcagaggaaccaggtgcacaggatgattgctgagttcaagctgatccctggcctgaacaacctgtttgacaagctgatctggaggaagcacagcgccagcgccctggtgctgcacggccacaaccagaactgtgactgcagcccagacatcaccctgaagatccagttcctgcggctgctgcagagcttcagtgaccaccacgagaacaagtacctgctgctgaacaaccaggagctgaatgagctgagcgccatcagcctgaaggccaacatccctgaggtggaggccgtgctgaacacagacaggagcctggtgtgtgatggcaagaggggcctgctgacccggctgctgcaggtgatgaagaaggagcctgctgagagcagcttccgcttctggcaggcccgggctgtggagagcttcctgcggggcaccaccagctatgctgaccagatgttcctgctgaagaggggcctgctggagcacatcctgtactgcatcgtggacagcgagtgcaagagcagagatgtgctgcagagctactttgacctgctgggggagctgatgaagttcaacgtggatgccttcaagcgcttcaacaagtacatcaacacagatgccaagttccaggtgttcctgaagcagatcaacagcagcctggtggacagcaacatgctggtgcgctgtgtgaccctgagcctggacagatttgagaaccaggtggacatgaaggtggccgaggtgctgtctgaatgtcggctgctggcctacatcagccaggtgcccacccagatgtccttcctgttccgcctcatcaacatcatccacgtgcagaccctgacccaggagaatgtgtcctgcctgaacaccagcctggtgatcctgatgctggcccggaggaaggagcggctgcccctgtacctgcggctgctgcagaggatggagcacagcaagaagtacccaggcttcctgctgaacaacttccacaacctgctgcgcttctggcagcagcactacctgcacaaggacaaggacagcacctgcctggagaacagcagctgcatctccttctcctactggaaggagaccgtgtccatcctgctgaacccagaccggcagagccccagcgccctggtgtcctacatcgaggagccctacatggacatcgaccgggacttcacagaggagtag

SEQ ID NO: 173796 - DNA, 2370 bp, synthetic construct
  misc_feature 1..2370: note = Description of Artificial Sequence: Synthetic coding sequence
  source 1..2370: mol_type = other DNA
atggctgctgcccctgtggccgccggcagcggggccggccggggccgccgctctgctgccaccgtggccgcctggggcggctggggcggccggccccggcccggcaacatcctgctgcagctgcggcagggccagctgaccggccggggcctggtgcgggctgtgcagttcacagagaccttcctgacagagcgggacaagcagagcaagtggagcggcatcccccagctgctgctgaagctgcacaccaccagccacctgcacagcgactttgtggagtgccagaacatcctgaaggagatcagccccctgctgtccatggaggccatggcctttgtgacagaggagaggaagctgacccaggagaccacctaccccaacacctacatctttgacctgtttggaggagtggacctgctggtggagatcctgatgaggcccaccatcagcatccggggccagaagctgaagatcagtgatgagatgagcaaggactgcctgagcatcctgtacaacacctgtgtgtgcacagaaggagtgaccaagaggctggccgagaagaatgactttgtgatcttcctgttcaccctgatgaccagcaagaagaccttcctgcagacagccaccctgattgaggacatcctgggcgtgaagaaggagatgatccggctggatgaggtgcccaacctgagcagcctggtgagcaactttgaccagcagcagctggccaacttctgccgcatcctggccgtgaccatcagcgagatggacacaggaaatgatgacaagcacaccctgctggccaagaatgcccagcagaagaagagcctgagcctgggccccagcgctgctgagatcaaccaggccgccctgctgagcatccctggctttgtggagcggctgtgcaagctggccaccaggaaggtgtctgagagcactggaacagccagcttcctgcaggagctggaggagtggtacacctggctggacaatgccctggtgctggatgccctgatgagggtggccaatgaggagagcgagcacaaccagggcgcctctgaagaaaatggcctgccccacaccagcgcccggacccagctgccccagagcatgaagatcatgcatgagatcatgtacaagctggaggtgctgtatgtgctgtgtgtgctgctgatgggccggcagaggaaccaggtgcacaggatgattgctgagttcaagctgatccctggcctgaacaacctgtttgacaagctgatctggaggaagcacagcgccagcgccctggtgctgcacggccacaaccagaactgtgactgcagcccagacatcaccctgaagatccagttcctgcggctgctgcagagcttcagtgaccaccacgagaacaagtacctgctgctgaacaaccaggagctgaatgagctgagcgccatcagcctgaaggccaacatccctgaggtggaggccgtgctgaacacagacaggagcctggtgtgtgatggcaagaggggcctgctgacccggctgctgcaggtgatgaagaaggagcctgctgagagcagcttccgcttctggcaggcccgggctgtggagagcttcctgcggggcaccaccagctatgctgaccagatgttcctgctgaagaggggcctgctggagcacatcctgtactgcatcgtggacagcgagtgcaagagcagagatgtgctgcagagctactttgacctgctgggggagctgatgaagttcaacgtggatgccttcaagcgcttcaacaagtacatcaacacagatgccaagttccaggtgttcctgaagcagatcaacagcagcctggtggacagcaacatgctggtgcgctgtgtgaccctgagcctggacagatttgagaaccaggtggacatgaaggtggccgaggtgctgtctgagtgccgcctgctggcctacatcagccaggtgcccacccagatgtccttcctgttccgcctcatcaacatcatccacgtgcagaccctgacccaggagaatgtgtcctgcctgaacaccagcctggtgatcctgatgctggcccggaggaaggagcggctgcccctgtacctgcggctgctgcagaggatggagcacagcaagaagtacccaggcttcctgctgaacaacttccacaacctgctgcgcttctggcagcagcactacctgcacaaggacaaggacagcacctgcctggagaacagcagctgcatctccttctcctactggaaggagaccgtgtccatcctgctgaacccagaccggcagagccccagcgccctggtgtcctacatcgaggagccctacatggacatcgaccgggacttcacagaggagtag

SEQ ID NO: 173797 - DNA, 1200 bp, synthetic construct
  misc_feature 1..1200: note = Description of Artificial Sequence: Synthetic coding sequence
  source 1..1200: mol_type = other DNA
atgaggagccagagcaccatcaaggtgcacaggatgattgctgagttcaagctgatccctggcctgaacaacctgtttgacaagctgatctggaggaagcacagcgccagcgccctggtgctgcacggccacaaccagaactgtgactgcagcccagacatcaccctgaagatccagttcctgcggctgctgcagagcttcagtgaccaccacgagaacaagtacctgctgctgaacaaccaggagctgaatgagctgagcgccatcagcctgaaggccaacatccctgaggtggaggccgtgctgaacacagacaggagcctggtgtgtgatggcaagaggggcctgctgacccggctgctgcaggtgatgaagaaggagcctgctgagagcagcttccgcttctggcaggcccgggctgtggagagcttcctgcggggcaccaccagctatgctgaccagatgttcctgctgaagaggggcctgctggagcacatcctgtactgcatcgtggacagcgagtgcaagagcagagatgtgctgcagagctactttgacctgctgggggagctgatgaagttcaacgtggatgccttcaagcgcttcaacaagtacatcaacacagatgccaagttccaggtgttcctgaagcagatcaacagcagcctggtggacagcaacatgctggtgcgctgtgtgaccctgagcctggacagatttgagaaccaggtggacatgaaggtggccgaggtgctgtctgagtgccgcctgctggcctacatcagccaggtgcccacccagatgtccttcctgttccgcctcatcaacatcatccacgtgcagaccctgacccaggagaatgtgtcctgcctgaacaccagcctggtgatcctgatgctggcccggaggaaggagcggctgcccctgtacctgcggctgctgcagaggatggagcacagcaagaagtacccaggcttcctgctgaacaacttccacaacctgctgcgcttctggcagcagcactacctgcacaaggacaaggacagcacctgcctggagaacagcagctgcatctccttctcctactggaaggagaccgtgtccatcctgctgaacccagaccggcagagccccagcgccctggtgtcctacatcgaggagccctacatggacatcgaccgggacttcacagaggagtag

SEQ ID NO: 173798 - DNA, 2349 bp, synthetic construct
  misc_feature 1..2349: note = Description of Artificial Sequence: Synthetic coding sequence
  source 1..2349: mol_type = other DNA
atggctgctgcccctgtggccgccggcagcggggccggccggggccgccgctctgctgccaccgtggccgcctggggcggctggggccagctgaccggccggggcctggtgcgggctgtgcagttcacagagaccttcctgacagagcgggacaagcagagcaagtggagcggcatcccccagctgctgctgaagctgcacaccaccagccacctgcacagcgactttgtggagtgccagaacatcctgaaggagatcagccccctgctgtccatggaggccatggcctttgtgacagaggagaggaagctgacccaggagaccacctaccccaacacctacatctttgacctgtttggaggagtggacctgctggtggagatcctgatgaggcccaccatcagcatccggggccagaagctgaagatcagtgatgagatgagcaaggactgcctgagcatcctgtacaacacctgtgtgtgcacagagggcgtgaccaagaggctggccgagaagaatgactttgtgatcttcctgttcaccctgatgaccagcaagaagaccttcctgcagacagccaccctgattgaggacatcctgggcgtgaagaaggagatgatccggctggatgaggtgcccaacctgagcagcctggtgagcaactttgaccagcagcagctggccaacttctgccgcatcctggccgtgaccatcagcgagatggacacaggaaatgatgacaagcacaccctgctggccaagaatgcccagcagaagaagagcctgagcctgggccccagcgctgctgagatcaaccaggccgccctgctgagcatccctggctttgtggagcggctgtgcaagctggccaccaggaaggtgtctgagagcactggaacagccagcttcctgcaggagctggaggagtggtacacctggctggacaatgccctggtgctggatgccctgatgagggtggccaatgaggagagcgagcacaaccaggccagcatcgtgtttcctcctcctggggccagcgaggagaatggcctgccccacaccagcgcccggacccagctgccccagagcatgaagatcatgcatgagatcatgtacaagctggaggtgctgtatgtgctgtgtgtgctgctgatgggccggcagaggaaccaggtgcacaggatgattgctgagttcaagctgatccctggcctgaacaacctgtttgacaagctgatctggaggaagcacagcgccagcgccctggtgctgcacggccacaaccagaactgtgactgcagcccagacatcaccctgaagatccagttcctgcggctgctgcagagcttcagtgaccaccacgagaacaagtacctgctgctgaacaaccaggagctgaatgagctgagcgccatcagcctgaaggccaacatccctgaggtggaggccgtgctgaacacagacaggagcctggtgtgtgatggcaagaggggcctgctgacccggctgctgcaggtgatgaagaaggagcctgctgagagcagcttccgcttctggcaggcccgggctgtggagagcttcctgcggggcaccaccagctatgctgaccagatgttcctgctgaagaggggcctgctggagcacatcctgtactgcatcgtggacagcgagtgcaagagcagagatgtgctgcagagctactttgacctgctgggggagctgatgaagttcaacgtggatgccttcaagcgcttcaacaagtacatcaacacagatgccaagttccaggtgttcctgaagcagatcaacagcagcctggtggacagcaacatgctggtgcgctgtgtgaccctgagcctggacagatttgagaaccaggtggacatgaaggtggccgaggtgctgtctgaatgtcggctgctggcctacatcagccaggtgcccacccagatgtccttcctgttccgcctcatcaacatcatccacgtgcagaccctgacccaggagaatgtgtcctgcctgaacaccagcctggtgatcctgatgctggcccggaggaaggagcggctgcccctgtacctgcggctgctgcagaggatggagcacagcaagaagtacccaggcttcctgctgaacaacttccacaacctgctgcgcttctggcagcagcactacctgcacaaggacaaggacagcacctgcctggagaacagcagctgcatctccttctcctactggaaggagaccgtgtccatcctgctgaacccagaccggcagagccccagcgccctggtgtcctacatcgaggagccctacatggacatcgaccgggacttcacagaggagtag

SEQ ID NO: 173799 - DNA, 2922 bp, synthetic construct
  misc_feature 1..2922: note = Description of Artificial Sequence: Synthetic coding sequence
  source 1..2922: mol_type = other DNA
atggcccagctgtactacaagaaggtgaactacagcccctacagagaccgcatccccctgcagatcgtgcgggcagagacagagctgtctgctgaggagaaggccttcctgaatgctgtggagaagggggactatgccaccgtgaagcaggccctgcaggaggccgagatctactacaacgtgaacatcaactgcatggaccccctgggccgcagcgccctgctgattgccattgaaaatgaaaacctggagatcatggagctgctgctgaaccacagcgtgtatgtgggagatgccctgctgtatgccatcaggaaggaggtggtgggcgctgtggagctgctgctgagctacagaagacccagcggggagaagcaggtgcccaccctgatgatggacacccagttcagcgagttcaccccagacatcacccccatcatgctggccgcccacaccaacaactatgagatcatcaagctgctggtgcagaagagggtgaccatcccccggccccaccagatccgctgcaactgtgtggagtgtgtgagcagcagcgaggtggacagcctgcggcacagccgcagccggctgaacatctacaaggccctggccagccccagcctgattgccctgagcagcgaggaccccatcctgacagccttccggctgggctgggagctgaaggagctgagcaaggtggagaatgagttcaaggccgagtatgaggagctgagccagcagtgcaagctgtttgccaaggacctgctggaccaggcccggagcagccgggagctggagatcatcctgaaccacagagatgaccacagcgaggagctggacccccagaagtaccatgacctggccaagctgaaggtggccatcaagtaccaccagaaggagtttgtggcccagcccaactgccagcagctgctggccaccctgtggtatgatggcttccctggctggaggaggaagcactgggtggtgaagctgctgacctgcatgaccatcggcttcctgttccccatgctgagcatcgcctacctgatcagccccaggagcaacctgggcctcttcatcaagaagcccttcatcaagttcatctgccacacagccagctacctgaccttcctgttcatgctgctgctggccagccagcacatcgtgaggacagacctgcacgtgcagggccccccacccaccgtggtggagtggatgatcctgccctgggtgctgggcttcatctggggcgagatcaaggagatgtgggatggcggcttcacagagtacatccatgactggtggaacctgatggactttgccatgaacagcctgtacctggccaccatcagcctgaagatcgtggcctacgtgaagtacaacggcagccggccccgggaggagtgggagatgtggcaccccaccctgattgctgaggccctgtttgccatcagcaacatcctgagcagcctgcggctcatcagcctcttcaccgccaacagccacctgggccccctgcagatcagcctgggccgcatgctgctggacatcctgaagttcctgttcatctactgcctggtgctgctggcctttgccaacggcctgaaccagctgtacttctactatgagacccgggccattgatgagcccaacaactgcaagggcatccgctgtgagaagcagaacaatgccttcagcaccctgtttgagaccctgcagagcctcttctggagcgtgtttggcctgctgaacctgtatgtgaccaacgtgaaggcccggcatgagttcacagaatttgtgggcgccaccatgtttggcacctacaacgtcatcagcctggtggtgctgctgaacatgctgattgccatgatgaacaacagctaccagctgattgctgaccatgctgacatcgagtggaagtttgcccggaccaagctgtggatgagctactttgatgagggcggcaccctgcccccacccttcaacatcatccccagccccaagagcttcctgtacctgggcaactggttcaacaacaccttctgccccaagagggaccctgatggaagaagaagaagaagaaacctgcggagcttcacagaaagaaatgctgacagcctcatccagaaccagcactaccaggaggtgatccggaacctggtgaagcgctacgtggccgccatgatccggaacagcaagacccatgagggcctgacagaggagaacttcaaggagctgaagcaggacatcagcagcttccgctatgaggtgctggacctgctgggcaacaggaagcaccccaggagcttcagcaccagcagcacagagctgagccagagagatgacaacaatgatggcagcggcggggcccgggccaagagcaagtctgtgtccttcaacctgggctgcaagaagaagacctgccacggccccccactcatccgcaccatgcccaggagcagcggggcccagggcaagagcaaggccgagagcagcagcaagaggagcttcatgggccccagcctgaagaagctgggcctgctcttcagcaagttcaacggccacatgtctgagcccagcagcgagcccatgtacaccatcagtgatggcatcgtgcagcagcactgcatgtggcaggacatccgctacagccagatggagaagggcaaggccgaggcctgcagccagagcgagatcaacctgtctgaggtggagctgggggaggtgcagggcgccgcccagagcagtgaatgtcccctggcctgcagcagcagcctgcactgtgccagcagcatctgcagcagcaacagcaagctgctggacagcagtgaagatgtgtttgagacctggggcgaggcctgtgacctgctgatgcacaagtggggagatggccaggaggagcaggtgaccacccggctgtag

SEQ ID NO: 173800 - DNA, 2796 bp, synthetic construct
  misc_feature 1..2796: note = Description of Artificial Sequence: Synthetic coding sequence
  source 1..2796: mol_type = other DNA
atgagccagagccctgccttcggcccccggcggggcagcagccccagaggagctgctggagctgctgccaggagaaatgaaagccaggactacctgctgatggacagcgagctgggggaggatggctgcccccaggcccccctgccctgctacggctactacccctgcttccggggcagtgacaaccggctggcccaccggcggcagacagtgctgcgggagaagggccgccgcctggccaacagaggccctgcctacatgttcagtgacaggagcaccagcctgagcattgaggaggagcgcttcctggatgctgctgaatatggcaacatccctgtggtgaggaagatgctggaggagtgccacagcctgaatgtgaactgtgtggactacatgggccagaatgccctgcagctggccgtggccaatgagcacctggagatcacagagctgctgctgaagaaggagaacctgagccgggtgggagatgccctgctgctggccatcagcaagggctacgtgcgcatcgtggaggccatcctgagccacccagcctttgctgagggcaagaggctggccaccagccccagccagagcgagctgcagcaggatgacttctacgcctatgatgaagatggcacccgcttcagccatgatgtgacccccatcatcctggccgcccactgccaggagtatgagatcgtgcacaccctgctgaggaaaggagccagaattgagcggccccatgactacttctgcaagtgcaatgactgcaaccagaagcagaagcatgacagcttcagccacagccgcagccgcatcaatgcctacaagggcctggccagccctgcctacctgagcctgagcagtgaagatcctgtgatgacagccctggagctgagcaatgagctggccgtgctggccaacatcgagaaggagttcaagaatgactacaagaagctgtccatgcagtgcaaggactttgtggtgggcctgctggacctgtgcaggaacacagaggaggtggaggccatcctgaatggagatgtggagaccctgcagagcggggaccacggccggcccaacctgagccggctgaagctggccatcaagtatgaggtgaagaagtttgtggcccaccccaactgccagcagcagctgctgagcatctggtatgagaacctgagcggcctgcggcagcagaccatggctgtgaagttcctggtggtgctggccgtggccatcggcctgcccttcctggccctgatctactggtttgccccctgcagcaagatgggcaagatcatgaggggccccttcatgaagtttgtggcccatgctgccagcttcaccatcttcctgggcctgctggtgatgaatgctgctgacagatttgagggcaccaagctgctgcccaatgagaccagcacagacaatgccaagcagctgttcaggatgaagaccagctgcttctcctggatggagatgctgatcatctcctgggtgattggcatgatctgggccgagtgcaaggagatctggacccagggccccaaggagtacctgtttgagctgtggaacatgctggactttggcatgctggccatctttgctgccagcttcatcgcccgcttcatggccttctggcacgccagcaaggcccagagcatcattgatgccaatgacaccctgaaggacctgaccaaggtgaccctgggggacaacgtgaagtactacaacctggcccgcatcaagtgggaccccagcgacccccagatcatcagcgagggcctgtatgccatcgctgtggtgctgtccttcagccgcatcgcctacatcctgcctgccaatgaaagctttggccccctgcagatcagcctgggccgcacagtgaaggacatcttcaagttcatggtgatcttcatcatggtgtttgtggccttcatgattggcatgttcaacctgtacagctactacatcggggccaagcagaatgaggccttcaccaccgtggaggagagcttcaagaccctcttctgggccatcttcggcctgtctgaggtgaagtctgtggtgatcaactacaaccacaagttcattgaaaatattggctacgtgctgtatggagtgtacaacgtgaccatggtgattgtgctgctgaacatgctgattgccatgatcaacagcagcttccaggagattgaagatgatgctgatgtggagtggaagtttgcccgggccaagctgtggttctcctactttgaggagggccgcaccctgcctgtgcccttcaacctggtgcccagccccaagagcctcttctacctgctgctgaagctgaagaagtggatcagcgagctgttccagggccacaagaagggcttccaggaggatgctgagatgaacaagatcaatgaggagaagaagctgggcatcctgggcagccatgaggacctgagcaagctgagcctggacaagaagcaggtgggccacaacaagcagcccagcatccgcagcagcgaggacttccacctgaacagcttcaacaaccccccccggcagtaccagaagatcatgaagaggctcatcaagcgctacgtgctgcaggcccagattgacaaggagagtgatgaggtgaatgaaggagagctgaaggagatcaagcaggacatcagcagcctgcgctatgagctgctggaggagaagagccagaacacagaggacctggccgagctgatccgggagctgggggagaagctgtccatggagcccaaccaggaggagaccaacagatag

SEQ ID NO: 173801 - DNA, 2448 bp, synthetic construct
  misc_feature 1..2448: note = Description of Artificial Sequence: Synthetic coding sequence
  source 1..2448: mol_type = other DNA
atgagccagagccctgccttcggcccccggcggggcagcagccccagaggagctgctggagctgctgccaggagaaatgaaagccaggactacctgctgatggacagcgagctgggggaggatggctgcccccaggcccccctgccctgctacggctactacccctgcttccggggcagtgacaaccggctggcccaccggcggcagacagtgctgcgggagaagggccgccgcctggccaacagaggccctgcctacatgttcagtgacaggagcaccagcctgagcattgaggaggagcgcttcctggatgctgctgaatatggcaacatccctgtggtgaggaagatgctggaggagtgccacagcctgaatgtgaactgtgtggactacatgggccagaatgccctgcagctggccgtggccaatgagcacctggagatcacagagctgctgctgaagaaggagaacctgagccgggtgggagatgccctgctgctggccatcagcaagggctacgtgcgcatcgtggaggccatcctgagccacccagcctttgctgagggcaagaggctggccaccagccccagccagagcgagctgcagcaggatgacttctacgcctatgatgaagatggcacccgcttcagccatgatgtgacccccatcatcctggccgcccactgccaggagtatgagatcgtgcacaccctgctgaggaaaggagccagaattgagcggccccatgactacttctgcaagtgcaatgactgcaaccagaagcagaagcatgacagcttcagccacagccgcagccgcatcaatgcctacaagggcctggccagccctgcctacctgagcctgagcagtgaagatcctgtgatgacagccctggagctgagcaatgagctggccgtgctggccaacatcgagaaggagttcaagatgggcaagatcatgaggggccccttcatgaagtttgtggcccatgctgccagcttcaccatcttcctgggcctgctggtgatgaatgctgctgacagatttgagggcaccaagctgctgcccaatgagaccagcacagacaatgccaagcagctgttcaggatgaagaccagctgcttctcctggatggagatgctgatcatctcctgggtgattggcatgatctgggccgagtgcaaggagatctggacccagggccccaaggagtacctgtttgagctgtggaacatgctggactttggcatgctggccatctttgctgccagcttcatcgcccgcttcatggccttctggcacgccagcaaggcccagagcatcattgatgccaatgacaccctgaaggacctgaccaaggtgaccctgggggacaacgtgaagtactacaacctggcccgcatcaagtgggaccccagcgacccccagatcatcagcgagggcctgtatgccatcgctgtggtgctgtccttcagccgcatcgcctacatcctgcctgccaatgaaagctttggccccctgcagatcagcctgggccgcacagtgaaggacatcttcaagttcatggtgatcttcatcatggtgtttgtggccttcatgattggcatgttcaacctgtacagctactacatcggggccaagcagaatgaggccttcaccaccgtggaggagagcttcaagaccctcttctgggccatcttcggcctgtctgaggtgaagtctgtggtgatcaactacaaccacaagttcattgaaaatattggctacgtgctgtatggagtgtacaacgtgaccatggtgattgtgctgctgaacatgctgattgccatgatcaacagcagcttccaggagattgaagatgatgctgatgtggagtggaagtttgcccgggccaagctgtggttctcctactttgaggagggccgcaccctgcctgtgcccttcaacctggtgcccagccccaagagcctcttctacctgctgctgaagctgaagaagtggatcagcgagctgttccagggccacaagaagggcttccaggaggatgctgagatgaacaagatcaatgaggagaagaagctgggcatcctgggcagccatgaggacctgagcaagctgagcctggacaagaagcaggtgggccacaacaagcagcccagcatccgcagcagcgaggacttccacctgaacagcttcaacaaccccccccggcagtaccagaagatcatgaagaggctcatcaagcgctacgtgctgcaggcccagattgacaaggagagtgatgaggtgaatgaaggagagctgaaggagatcaagcaggacatcagcagcctgcgctatgagctgctggaggagaagagccagaacacagaggacctggccgagctgatccgggagctgggggagaagctgtccatggagcccaaccaggaggagaccaacagatag

SEQ ID NO: 173802 - DNA, 2631 bp, synthetic construct
  misc_feature 1..2631: note = Description of Artificial Sequence: Synthetic coding sequence
  source 1..2631: mol_type = other DNA
atgagccagagccctgccttcggcccccggcggggcagcagccccagaggagctgctggagctgctgccaggagaaatgaaagccaggactacctgctgatggacagcgagctgggggaggatggctgcccccaggcccccctgccctgctacggctactacccctgcttccggggcagtgacaaccggctggcccaccggcggcagacagtgctgcgggagaagggccgccgcctggccaacagaggccctgcctacatgttcagtgacaggagcaccagcctgagcattgaggaggagcgcttcctggatgctgctgaatatggcaacatccctgtggtgaggaagatgctggaggagtgccacagcctgaatgtgaactgtgtggactacatgggccagaatgccctgcagctggccgtggccaatgagcacctggagatcacagagctgctgctgaagaaggagaacctgagccgggtgggagatgccctgctgctggccatcagcaagggctacgtgcgcatcgtggaggccatcctgagccacccagcctttgctgagggcaagaggctggccaccagccccagccagagcgagctgcagcaggatgacttctacgcctatgatgaagatggcacccgcttcagccatgatgtgacccccatcatcctggccgcccactgccaggagtatgagatcgtgcacaccctgctgaggaaaggagccagaattgagcggccccatgactacttctgcaagtgcaatgactgcaaccagaagcagaagcatgacagcttcagccacagccgcagccgcatcaatgcctacaagggcctggccagccctgcctacctgagcctgagcagtgaagatcctgtgatgacagccctggagctgagcaatgagctggccgtgctggccaacatcgagaaggagttcaagaatgactacaagaagctgtccatgcagtgcaaggactttgtggtgggcctgctggacctgtgcaggaacacagaggaggtggaggccatcctgaatggagatgtggagaccctgcagagcggggaccacggccggcccaacctgagccggctgaagctggccatcaagtatgaggtgaagaagatgggcaagatcatgaggggccccttcatgaagtttgtggcccacgccgccagcttcaccatcttcctgggcctgctggtgatgaatgctgctgacagatttgagggcaccaagctgctgcccaatgagaccagcacagacaatgccaagcagctgttcaggatgaagaccagctgcttctcctggatggagatgctgatcatctcctgggtgattggcatgatctgggccgagtgcaaggagatctggacccagggccccaaggagtacctgtttgagctgtggaacatgctggactttggcatgctggccatctttgctgccagcttcatcgcccgcttcatggccttctggcacgccagcaaggcccagagcatcattgatgccaatgacaccctgaaggacctgaccaaggtgaccctgggggacaacgtgaagtactacaacctggcccgcatcaagtgggaccccagcgacccccagatcatcagcgagggcctgtatgccatcgctgtggtgctgtccttcagcagaattgcctacatcctgcctgccaatgaaagctttggccccctgcagatcagcctgggccgcacagtgaaggacatcttcaagttcatggtgatcttcatcatggtgtttgtggccttcatgattggcatgttcaacctgtacagctactacatcggggccaagcagaatgaggccttcaccaccgtggaggagagcttcaagaccctcttctgggccatcttcggcctgtctgaggtgaagtctgtggtgatcaactacaaccacaagttcatcgagaacatcggctacgtgctgtatggagtgtacaacgtgaccatggtgattgtgctgctgaacatgctgattgccatgatcaacagcagcttccaggagattgaagatgatgctgatgtggagtggaagtttgcccgggccaagctgtggttctcctactttgaggagggccgcaccctgcctgtgcccttcaacctggtgcccagccccaagagcctcttctacctgctgctgaagctgaagaagtggatcagcgagctgttccagggccacaagaagggcttccaggaggatgctgagatgaacaagatcaatgaggagaagaagctgggcatcctgggcagccatgaggacctgagcaagctgagcctggacaagaagcaggtgggccacaacaagcagcccagcatccgcagcagcgaggacttccacctgaacagcttcaacaaccccccccggcagtaccagaagatcatgaagaggctcatcaagagatatgtgctgcaggcccagattgacaaggagagtgatgaggtgaatgaaggagagctgaaggagatcaagcaggacatcagcagcctgcgctatgagctgctggaggagaagagccagaacacagaggacctggccgagctgatccgggagctgggggagaagctgtccatggagcccaaccaggaggagaccaacagatag

SEQ ID NO: 173803 - DNA, 2406 bp, synthetic construct
  misc_feature 1..2406: note = Description of Artificial Sequence: Synthetic coding sequence
  source 1..2406: mol_type = other DNA
atgctgaggaacagcaccttcaagaacatgcagaggaggcacaccaccctgcgggagaagggccggcggcaggccatccggggccctgcctacatgtttaatgagaagggcaccagcctgaccccagaggaggagcgcttcctggacagcgcagaatatggcaacatccctgtggtgaggaagatgctggaggagagcaagaccctgaacttcaactgtgtggactacatgggccagaatgccctgcagctggccgtgggcaatgagcacctggaggtgacagagctgctgctgaagaaggagaacctggcccgggtgggagatgccctgctgctggccatcagcaagggctacgtgagaattgtggaggccatcctgaaccacccagcctttgcccagggccagaggctgaccctgagccccctggagcaggagctgagagatgatgacttctacgcctatgatgaagatggcacccgcttcagccatgacatcacccccatcatcctggccgcccactgccaggagtatgaaattgtgcacatcctgctgctgaagggggcccgcatcgagcggccccatgactacttctgcaagtgcaatgaatgtacagagaagcagaggaaggacagcttcagccacagccgcagcaggatgaatgcctacaagggcctggccagcgctgcctacctgagcctgagcagcgaggaccctgtgctgacagccctggagctgagcaatgagctggcccggctggccaacattgaaacagagttcaagtttgtggcccaccccaactgccagcagcagctgctgaccatgtggtatgagaacctgagcggcctgcggcagcagagcattgctgtgaagttcctggccgtgtttggagtgtccatcggcctgcccttcctggccatcgcctactggatcgccccctgcagcaagctgggccgcaccctgcggagccccttcatgaagtttgtggcccatgctgtgtccttcaccatcttcctgggcctgctggtggtgaatgccagtgacagatttgaaggagtgaagaccctgcccaatgagaccttcacagactaccccaagcagatcttccgggtgaagaccacccagttctcctggacagagatgctgatcatgaagtgggtgctgggcatgatctggagcgagtgcaaggagatctgggaggagggcccccgggagtatgtgctgcacctgtggaacctgctggactttggcatgctgagcatctttgtggccagcttcaccgcccgcttcatggccttcctgaaggccacagaggcccagctgtatgtggaccagcacgtgcaggatgacaccctgcacaacgtgtccctgcccccagaggtggcctacttcacctacgcccgggacaagtggtggcccagcgacccccagatcatcagcgagggcctgtatgccatcgctgtggtgctgtccttcagccgcatcgcctacatcctgcctgccaatgaaagctttggccccctgcagatcagcctgggccgcacagtgaaggacatcttcaagttcatggtgatcttcatcatggtgtttgtggccttcatgattggcatgttcaacctgtacagctactacagaggagccaagtacaacccagccttcaccaccgtggaggagagcttcaagaccctcttctggagcatcttcggcctgtctgaggtgatctctgtggtgctgaagtatgaccacaagttcattgaaaatattggctacgtgctgtatggagtgtacaacgtgaccatggtggtggtgctgctgaacatgctgattgccatgatcaacaacagctaccaggagattgaggaggatgctgatgtggagtggaagtttgcccgggccaagctgtggctgagctactttgatgagggccgcaccctgcctgcccccttcaacctggtgcccagccccaagagcttctactacctgatcatgaggatcaagatgtgcctgatcaagctgtgcaagagcaaggccaagagctgtgaaaatgacctggagatgggcatgctgaacagcaagttcaagaagacccgctaccaggccggcatgaggaacagcgagaacctgacagccaacaacaccctgagcaagcccacccgctaccagaagatcatgaagaggctcatcaagcgctacgtgctgaaggcccaggtggacagagaaaatgatgaggtgaatgaaggagagctgaaggagatcaagcaggacatcagcagcctgcgctatgagctgctggaggagaagagccaggccaccggggagctggccgacctgatccagcagctgtctgagaagtttgggaagaacctgaacaaggaccacctgcgggtgaacaagggcaaggacatctag

SEQ ID NO: 173804 - DNA, 2241 bp, synthetic construct
  misc_feature 1..2241: note = Description of Artificial Sequence: Synthetic coding sequence
  source 1..2241: mol_type = other DNA
atgctgaggaacagcaccttcaagaacatgcagaggaggcacaccaccctgcgggagaagggccggcggcaggccatccggggccctgcctacatgtttaatgagaagggcaccagcctgaccccagaggaggagcgcttcctggacagcgcagaatatggcaacatccctgtggtgaggaagatgctggaggagagcaagaccctgaacttcaactgtgtggactacatgggccagaatgccctgcagctggccgtgggcaatgagcacctggaggtgacagagctgctgctgaagaaggagaacctggcccgggtgggagatgccctgctgctggccatcagcaagggctacgtgagaattgtggaggccatcctgaaccacccagcctttgcccagggccagaggctgaccctgagccccctggagcaggagctgagagatgatgacttctacgcctatgatgaagatggcacccgcttcagccatgacatcacccccatcatcctggccgcccactgccaggagtatgaaattgtgcacatcctgctgctgaagggggcccgcatcgagcggccccatgactacttctgcaagtgcaatgaatgtacagagaagcagaggaaggacagcttcagccacagccgcagcaggatgaatgcctacaagggcctggccagcgctgcctacctgagcctgagcagcgaggaccctgtgctgacagccctggagctgagcaatgagctggcccggctggccaacattgaaacagagttcaagctgggccgcaccctgcggagccccttcatgaagtttgtggcccatgctgtgtccttcaccatcttcctgggcctgctggtggtgaatgccagtgacagatttgagggcgtgaagaccctgcccaatgagaccttcacagactaccccaagcagatcttccgggtgaagaccacccagttctcctggacagagatgctgatcatgaagtgggtgctgggcatgatctggagcgagtgcaaggagatctgggaggagggcccccgggagtatgtgctgcacctgtggaacctgctggactttggcatgctgagcatctttgtggccagcttcaccgcccgcttcatggccttcctgaaggccacagaggcccagctgtatgtggaccagcacgtgcaggatgacaccctgcacaacgtgtccctgcccccagaggtggcctacttcacctacgcccgggacaagtggtggcccagcgacccccagatcatcagcgagggcctgtatgccatcgctgtggtgctgtccttcagcagaattgcctacatcctgcctgccaatgaaagctttggccccctgcagatcagcctgggccgcacagtgaaggacatcttcaagttcatggtgatcttcatcatggtgtttgtggccttcatgattggcatgttcaacctgtacagctactacagaggagccaagtacaacccagccttcaccaccgtggaggagagcttcaagaccctcttctggagcatcttcggcctgtctgaggtgatctctgtggtgctgaagtatgaccacaagttcatcgagaacatcggctacgtgctgtatggagtgtacaacgtgaccatggtggtggtgctgctgaacatgctgattgccatgatcaacaacagctaccaggagattgaagaagatgctgatgtggagtggaagtttgcccgggccaagctgtggctgagctactttgatgagggccgcaccctgcctgcccccttcaacctggtgcccagccccaagagcttctactacctgatcatgaggatcaagatgtgcctgatcaagctgtgcaagagcaaggccaagagctgtgaaaatgacctggagatgggcatgctgaacagcaagttcaagaagacccgctaccaggccggcatgagaaattctgagaacctgacagccaacaacaccctgagcaagcccacccgctaccagaagatcatgaagaggctcatcaagagatatgtgctgaaggcccaggtggaccgggagaatgatgaggtgaatgaaggagagctgaaggagatcaagcaggacatcagcagcctgcgctatgagctgctggaggagaagagccaggccactggagagctggccgacctgatccagcagctgtctgagaagtttgggaagaacctgaacaaggaccacctgcgggtgaacaagggcaaggacatctag

SEQ ID NO: 173805 - DNA, 2589 bp, synthetic construct
  misc_feature 1..2589: note = Description of Artificial Sequence: Synthetic coding sequence
  source 1..2589: mol_type = other DNA
atgctgaggaacagcaccttcaagaacatgcagaggaggcacaccaccctgcgggagaagggccggcggcaggccatccggggccctgcctacatgtttaatgagaagggcaccagcctgaccccagaggaggagcgcttcctggacagcgcagaatatggcaacatccctgtggtgaggaagatgctggaggagagcaagaccctgaacttcaactgtgtggactacatgggccagaatgccctgcagctggccgtgggcaatgagcacctggaggtgacagagctgctgctgaagaaggagaacctggcccgggtgggagatgccctgctgctggccatcagcaagggctacgtgagaattgtggaggccatcctgaaccacccagcctttgcccagggccagaggctgaccctgagccccctggagcaggagctgagagatgatgacttctacgcctatgatgaagatggcacccgcttcagccatgacatcacccccatcatcctggccgcccactgccaggagtatgaaattgtgcacatcctgctgctgaagggggcccgcatcgagcggccccatgactacttctgcaagtgcaatgaatgtacagagaagcagaggaaggacagcttcagccacagccgcagcaggatgaatgcctacaagggcctggccagcgctgcctacctgagcctgagcagcgaggaccctgtgctgacagccctggagctgagcaatgagctggcccggctggccaacattgaaacagagttcaagaatgactacaggaagctgtccatgcagtgcaaggactttgtggtgggcgtgctggacctgtgccgggacacagaggaggtggaggccatcctgaatggagatgtgaacttccaggtgtggagcgaccaccaccggcccagcctgagccgcatcaagctggccatcaagtatgaggtgaagaagtttgtggcccaccccaactgccagcagcagctgctgaccatgtggtatgagaacctgagcggcctgcggcagcagagcattgctgtgaagttcctggccgtgtttggagtgtccatcggcctgcccttcctggccatcgcctactggatcgccccctgcagcaagctgggccgcaccctgcggagccccttcatgaagtttgtggcccatgctgtgtccttcaccatcttcctgggcctgctggtggtgaatgccagtgacagatttgagggcgtgaagaccctgcccaatgagaccttcacagactaccccaagcagatcttccgggtgaagaccacccagttctcctggacagagatgctgatcatgaagtgggtgctgggcatgatctggagcgagtgcaaggagatctgggaggagggcccccgggagtatgtgctgcacctgtggaacctgctggactttggcatgctgagcatctttgtggccagcttcaccgcccgcttcatggccttcctgaaggccacagaggcccagctgtatgtggaccagcacgtgcaggatgacaccctgcacaacgtgtccctgcccccagaggtggcctacttcacctacgcccgggacaagtggtggcccagcgacccccagatcatcagcgagggcctgtatgccatcgctgtggtgctgtccttcagcagaattgcctacatcctgcctgccaatgaaagctttggccccctgcagatcagcctgggccgcacagtgaaggacatcttcaagttcatggtgatcttcatcatggtgtttgtggccttcatgattggcatgttcaacctgtacagctactacagaggagccaagtacaacccagccttcaccaccgtggaggagagcttcaagaccctcttctggagcatcttcggcctgtctgaggtgatctctgtggtgctgaagtatgaccacaagttcatcgagaacatcggctacgtgctgtatggagtgtacaacgtgaccatggtggtggtgctgctgaacatgctgattgccatgatcaacaacagctaccaggagattgaagaagatgctgatgtggagtggaagtttgcccgggccaagctgtggctgagctactttgatgagggccgcaccctgcctgcccccttcaacctggtgcccagccccaagagcttctactacctgatcatgaggatcaagatgtgcctgatcaagctgtgcaagagcaaggccaagagctgtgaaaatgacctggagatgggcatgctgaacagcaagttcaagaagacccgctaccaggccggcatgagaaattctgagaacctgacagccaacaacaccctgagcaagcccacccgctaccagaagatcatgaagaggctcatcaagagatatgtgctgaaggcccaggtggaccgggagaatgatgaggtgaatgaaggagagctgaaggagatcaagcaggacatcagcagcctgcgctatgagctgctggaggagaagagccaggccactggagagctggccgacctgatccagcagctgtctgagaagtttgggaagaacctgaacaaggaccacctgcgggtgaacaagggcaaggacatctag

SEQ ID NO: 173806 - DNA, 4350 bp, synthetic construct
  misc_feature 1..4350: note = Description of Artificial Sequence: Synthetic coding sequence
  source 1..4350: mol_type = other DNA
atggagcccagcgccctgaggaaggccggcagcgagcaggaggagggctttgagggcctgccccggcgggtgacagacctgggcatggtgagcaacctgcggcgcagcaacagcagcctcttcaagtcctggaggctgcagtgccccttcggcaacaatgacaagcaggagagcctgagctcctggatccctgagaacatcaagaagaaggaatgtgtgtactttgtggagagcagcaagctgagtgatgctgggaaggtggtgtgccagtgtggctacacccatgagcagcacctggaggaggccaccaagccccacaccttccagggcacccagtgggaccccaagaagcacgtgcaggagatgcccacagatgcctttggagacatcgtgttcaccggcctgagccagaaggtgaagaagtatgtgcgggtgtcccaggacacccccagcagcgtcatctaccacctgatgacccagcactggggcctggatgtgcccaacctgctgatctctgtgactggaggagccaagaacttcaacatgaagccccggctgaagagcatcttcagaagaggcctggtgaaggtggcccagaccactggagcctggatcatcactggaggcagccacactggagtgatgaagcaggtgggggaggccgtgcgggacttcagcctgagcagcagctacaaggagggggagctgatcaccatcggcgtggccacctggggcaccgtgcacagaagagagggcctcatccaccccaccggcagcttccctgctgagtacatcctggatgaagatggccagggcaacctgacctgcctggacagcaaccacagccacttcatcctggtggatgatggcacccacggccagtatggagtggagatccccctgcggacccggctggagaagttcatcagcgagcagaccaaggagcggggcggcgtggccatcaagatccccatcgtgtgtgtggtgctggagggcggccctggcaccctgcacaccatcgacaatgccaccaccaacggcaccccctgtgtggtggtggagggcagcggccgggtggctgatgtgattgcccaggtggccaacctgcctgtgtctgacatcaccatcagcctcatccagcagaagctgagcgtcttcttccaggagatgtttgagaccttcacagagagcagaattgtggagtggaccaagaagatccaggacatcgtgagaagacggcagctgctgactgtgttccgggagggcaaggatggccagcaggatgtggatgtggccatcctgcaggccctgctgaaggccagccgcagccaggaccactttggacatgagaactgggaccaccagctgaagctggccgtggcctggaacagagtggacatcgcccggtctgagatcttcatggatgagtggcagtggaagcccagcgacctgcaccccaccatgacagctgccctgatcagcaacaagccagagtttgtgaagctgttcctggagaatggagtgcagctgaaggagtttgtgacctgggacaccctgctgtacctgtatgagaacctggaccccagctgcctcttccacagcaagctgcagatgcaccacgtggcccaggtgctgcgggagctgctgggggacttcacccagcccctgtacccccggcccaggcacaatgaccggctgcggctgctgctgcctgtgccccacgtgaagctgaatgtgcagggcgtgtccctgcggagcctgtacaagaggagcagcggccacgtgaccttcaccatggaccccatccgggacctgctgatctgggccatcgtgcagaacagaagagagctggccggcatcatctgggcccagagccaggactgcatcgctgctgccctggcctgcagcaagatcctgaaggagctgagcaaggaggaggaggacacagacagcagcgaggagatgctggccctggccgaggagtatgagcaccgggccatcggggtcttcacagagtgctacaggaaggatgaggagcgggcccagaagctgctgaccagggtgtctgaggcctggggcaagaccacctgcctgcagctggccctggaggccaaggacatgaagtttgtgagccacggcggcatccaggccttcctgaccaaggtgtggtggggccagctgtctgtggacaatggcctgtggagggtgaccctgtgcatgctggccttccccctgctgctgaccggcctcatctccttccgggagaagaggctgcaggatgtgggcaccccagctgcccgggcccgggccttcttcaccgcccctgtggtggtgttccacctgaacatcctgagctactttgccttcctgtgcctgtttgcctacgtgctgatggtggacttccagcctgtgcccagctggtgtgaatgtgccatctacctgtggctgttcagcctggtgtgtgaggagatgaggcagctgttctatgaccctgatgaatgtggcctgatgaagaaggccgccctgtacttcagtgacttctggaacaagctggatgtgggcgccatcctgctgtttgtggccggcctgacctgccgcctcatcccagccaccctgtacccaggccgggtcatcctgagcctggacttcatcctcttctgcctgcggctgatgcacatcttcaccatcagcaagaccctgggccccaagatcatcatcgtgaagaggatgatgaaggatgtgttcttcttcctgttcctgctggccgtgtgggtggtgtcctttggagtggccaagcaggccatcctgatccacaatgaaagaagagtggactggctgttcagaggagctgtgtaccacagctacctgaccatcttcggccagatccctggctacattgatggagtgaacttcaaccctgagcactgcagccccaatggaacagacccctacaagcccaagtgcccagagagtgatgccacccagcagaggcctgccttccctgagtggctgactgtgctgctgctgtgcctgtacctgctcttcaccaacatcctgctgctgaacctgctgattgccatgttcaactacaccttccagcaggtgcaggagcacacagaccagatctggaagttccagagacatgacctgattgaggagtaccacggccggcctgctgcccccccacccttcatcctgctgagccacctgcagctgttcatcaagagggtggtgctgaagaccccagccaagaggcacaagcagctgaagaacaagctggagaagaatgaggaggccgccctgctgtcctgggagatctacctgaaggagaactacctgcagaaccggcagttccagcagaagcagaggcctgagcagaagattgaggacatcagcaacaaggtggatgccatggtggacctgctggacctggaccccctgaagaggagcggctccatggagcagaggctggccagcctggaggagcaggtggcccagacagcccaggccctgcactggatcgtgaggaccctgcgggccagcggcttcagcagcgaggctgatgtgcccaccctggccagccagaaggctgctgaggagccagatgctgagcccggcggcaggaagaagacagaggagcccggggacagctaccacgtgaatgcccggcacctgctgtaccccaactgccctgtgacccgcttccctgtgcccaatgagaaggtgccctgggagacagagttcctgatctatgacccccccttctacacagctgagaggaaggatgctgctgccatggaccccatgggagagaaccccatgggccgcacaggcctgcggggccggggcagcctgagctgcttcggccccaaccacaccctgtaccccatggtgacccgctggaggagaaatgaagatggagccatctgcaggaagagcatcaagaagatgctggaggtgctggtggtgaagctgcccctgtctgagcactgggccctgcccggcggcagccgggagcccggggagatgctgcccaggaagctgaagaggatcctgcggcaggagcactggcccagctttgagaacctgctgaagtgtggcatggaggtgtacaagggctacatggatgaccccaggaacacagacaatgcctggattgagaccgtggccgtgtctgtgcacttccaggaccagaatgatgtggagctgaaccggctgaacagcaacctgcacgcctgtgacagcggggccagcatccgctggcaggtggtggaccggcgcatccccctgtatgccaaccacaagaccctgctgcagaaggctgctgctgagtttggagcccactactag

SEQ ID NO: 173807 - DNA, 4512 bp, synthetic construct
  misc_feature 1..4512: note = Description of Artificial Sequence: Synthetic coding sequence
  source 1..4512: mol_type = other DNA
atggagcccagcgccctgaggaaggccggcagcgagcaggaggagggctttgagggcctgccccggcgggtgacagacctgggcatggtgagcaacctgcggcgcagcaacagcagcctcttcaagtcctggaggctgcagtgccccttcggcaacaatgacaagcaggagagcctgagctcctggatccctgagaacatcaagaagaaggaatgtgtgtactttgtggagagcagcaagctgagtgatgctgggaaggtggtgtgccagtgtggctacacccatgagcagcacctggaggaggccaccaagccccacaccttccagggcacccagtgggaccccaagaagcacgtgcaggagatgcccacagatgcctttggagacatcgtgttcaccggcctgagccagaaggtgaagaagtatgtgcgggtgtcccaggacacccccagcagcgtcatctaccacctgatgacccagcactggggcctggatgtgcccaacctgctgatctctgtgactggaggagccaagaacttcaacatgaagccccggctgaagagcatcttcagaagaggcctggtgaaggtggcccagaccactggagcctggatcatcactggaggcagccacactggagtgatgaagcaggtgggggaggccgtgcgggacttcagcctgagcagcagctacaaggagggggagctgatcaccatcggcgtggccacctggggcaccgtgcacagaagagagggcctcatccaccccaccggcagcttccctgctgagtacatcctggatgaagatggccagggcaacctgacctgcctggacagcaaccacagccacttcatcctggtggatgatggcacccacggccagtatggagtggagatccccctgcggacccggctggagaagttcatcagcgagcagaccaaggagcggggcggcgtggccatcaagatccccatcgtgtgtgtggtgctggagggcggccctggcaccctgcacaccatcgacaatgccaccaccaacggcaccccctgtgtggtggtggagggcagcggccgggtggctgatgtgattgcccaggtggccaacctgcctgtgtctgacatcaccatcagcctcatccagcagaagctgagcgtcttcttccaggagatgtttgagaccttcacagagagcagaattgtggagtggaccaagaagatccaggacatcgtgagaagacggcagctgctgactgtgttccgggagggcaaggatggccagcaggatgtggatgtggccatcctgcaggccctgctgaaggccagccgcagccaggaccactttggacatgagaactgggaccaccagctgaagctggccgtggcctggaacagagtggacatcgcccggtctgagatcttcatggatgagtggcagtggaagcccagcgacctgcaccccaccatgacagctgccctgatcagcaacaagccagagtttgtgaagctgttcctggagaatggagtgcagctgaaggagtttgtgacctgggacaccctgctgtacctgtatgagaacctggaccccagctgcctcttccacagcaagctgcagaaggtgctggtggaggaccctgagaggcctgcctgtgccccagctgccccccggctgcagatgcaccacgtggcccaggtgctgcgggagctgctgggggacttcacccagcccctgtacccccggcccaggcacaatgaccggctgcggctgctgctgcctgtgccccacgtgaagctgaatgtgcagggcgtgtccctgcggagcctgtacaagaggagcagcggccacgtgaccttcaccatggaccccatccgggacctgctgatctgggccatcgtgcagaacagaagagagctggccggcatcatctgggcccagagccaggactgcatcgctgctgccctggcctgcagcaagatcctgaaggagctgagcaaggaggaggaggacacagacagcagcgaggagatgctggccctggccgaggagtatgagcaccgggccatcggggtcttcacagagtgctacaggaaggatgaggagcgggcccagaagctgctgaccagggtgtctgaggcctggggcaagaccacctgcctgcagctggccctggaggccaaggacatgaagtttgtgagccacggcggcatccaggccttcctgaccaaggtgtggtggggccagctgtctgtggacaatggcctgtggagggtgaccctgtgcatgctggccttccccctgctgctgaccggcctcatctccttccgggagaagaggctgcaggatgtgggcaccccagctgcccgggcccgggccttcttcaccgcccctgtggtggtgttccacctgaacatcctgagctactttgccttcctgtgcctgtttgcctacgtgctgatggtggacttccagcctgtgcccagctggtgtgaatgtgccatctacctgtggctgttcagcctggtgtgtgaggagatgaggcagctgttctatgaccctgatgaatgtggcctgatgaagaaggccgccctgtacttcagtgacttctggaacaagctggatgtgggcgccatcctgctgtttgtggccggcctgacctgccgcctcatcccagccaccctgtacccaggccgggtcatcctgagcctggacttcatcctcttctgcctgcggctgatgcacatcttcaccatcagcaagaccctgggccccaagatcatcatcgtgaagaggatgatgaaggatgtgttcttcttcctgttcctgctggccgtgtgggtggtgtcctttggagtggccaagcaggccatcctgatccacaatgaaagaagagtggactggctgttcagaggagctgtgtaccacagctacctgaccatcttcggccagatccctggctacattgatggagtgaacttcaaccctgagcactgcagccccaatggaacagacccctacaagcccaagtgcccagagagtgatgccacccagcagaggcctgccttccctgagtggctgactgtgctgctgctgtgcctgtacctgctcttcaccaacatcctgctgctgaacctgctgattgccatgttcaactacaccttccagcaggtgcaggagcacacagaccagatctggaagttccagagacatgacctgattgaggagtaccacggccggcctgctgcccccccacccttcatcctgctgagccacctgcagctgttcatcaagagggtggtgctgaagaccccagccaagaggcacaagcagctgaagaacaagctggagaagaatgaggaggccgccctgctgtcctgggagatctacctgaaggagaactacctgcagaaccggcagttccagcagaagcagaggcctgagcagaagattgaggacatcagcaacaaggtggatgccatggtggacctgctggacctggaccccctgaagaggagcggctccatggagcagaggctggccagcctggaggagcaggtggcccagacagcccaggccctgcactggatcgtgaggaccctgcgggccagcggcttcagcagcgaggctgatgtgcccaccctggccagccagaaggctgctgaggagccagatgctgagcccggcggcaggaagaagacagaggagcccggggacagctaccacgtgaatgcccggcacctgctgtaccccaactgccctgtgacccgcttccctgtgcccaatgagaaggtgccctgggagacagagttcctgatctatgacccccccttctacacagctgagaggaaggatgctgctgccatggaccccatgggagacaccctggagcccctgagcaccatccagtacaacgtggtggatggcctgcgggaccggcgctccttccacggcccctacacagtgcaggccggcctgcccctgaaccccatgggccgcacaggcctgcggggccggggcagcctgagctgcttcggccccaaccacaccctgtaccccatggtgacccgctggaggagaaatgaagatggagccatctgcaggaagagcatcaagaagatgctggaggtgctggtggtgaagctgcccctgtctgagcactgggccctgcccggcggcagccgggagcccggggagatgctgcccaggaagctgaagaggatcctgcggcaggagcactggcccagctttgagaacctgctgaagtgtggcatggaggtgtacaagggctacatggatgaccccaggaacacagacaatgcctggattgagaccgtggccgtgtctgtgcacttccaggaccagaatgatgtggagctgaaccggctgaacagcaacctgcacgcctgtgacagcggggccagcatccgctggcaggtggtggaccggcgcatccccctgtatgccaaccacaagaccctgctgcagaaggctgctgctgagtttggagcccactactag

SEQ ID NO: 173808 - DNA, 4512 bp, synthetic construct; identical to SEQ ID NO: 173807
  misc_feature 1..4512: note = Description of Artificial Sequence: Synthetic coding sequence
  source 1..4512: mol_type = other DNA

SEQ ID NO: 173809 - DNA, 435 bp, synthetic construct
  misc_feature 1..435: note = Description of Artificial Sequence: Synthetic coding sequence
  source 1..435: mol_type = other DNA
atggagcccagcgccctgaggaaggccggcagcgagcaggaggagggctttgagggcctgccccggcgggtgacagacctgggcatggtgagcaacctgcggcgcagcaacagcagcctcttcaagtcctggaggctgcagtgccccttcggcaacaatgacaagcaggagagcctgagctcctggatccctgagaacatcaagaagaaggaatgtgtgtactttgtggagagcagcaagctgagtgatgctgggaaggtggtgtgccagtgtggctacacccatgagcagcacctggaggaggccaccaagccccacaccttccagggcacccagtgggaccccaagaagcacgtgcaggagatgcccacagatgcctttggagacatcgtgttcaccggcctgagccagaaggtgaagaagtatgtgaggtag

SEQ ID NO: 173810 - DNA, 744 bp, synthetic construct
  misc_feature 1..744: note = Description of Artificial Sequence: Synthetic coding sequence
  source 1..744: mol_type = other DNA
atgctgagccgggagcaggaggaggatggaggagctggccggcagtaccacgtgaatgcccggcacctgctgtaccccaactgccctgtgacccgcttccctgtgcccaatgagaaggtgccctgggagacagagttcctgatctatgacccccccttctacacagctgagaggaaggatgctgctgccatggaccccatgggagagaaccccatgggccgcacaggcctgcggggccggggcagcctgagctgcttcggccccaaccacaccctgtaccccatggtgacccgctggaggagaaatgaagatggagccatctgcaggaagagcatcaagaagatgctggaggtgctggtggtgaagctgcccctgtctgagcactgggccctgcccggcggcagccgggagcccggggagatgctgcccaggaagctgaagaggatcctgcggcaggagcactggcccagctttgagaacctgctgaagtgtggcatggaggtgtacaagggctacatggatgaccccaggaacacagacaatgcctggattgagaccgtggccgtgtctgtgcacttccaggaccagaatgatgtggagctgaaccggctgaacagcaacctgcacgcctgtgacagcggggccagcatccgctggcaggtggtggaccggcgcatccccctgtatgccaaccacaagaccctgctgcagaaggctgctgctgagtttggagcccactactag

SEQ ID NO: 173811 - DNA, 5136 bp, synthetic construct
  misc_feature 1..5136: note = Description of Artificial Sequence: Synthetic coding sequence
  source 1..5136: mol_type = other DNA
atgggcaagaagtggagagatgctgctgagatggagcggggctgcagcgacagagaagataatgctgagagcagaagaagaagccgcagcgccagccggggccgctttgctgagagctggaagaggctgagcagcaagcagggcagcaccaagaggagcggcctgcccagccagcagaccccagcccagaagtcctggattgagcgggccttctacaagagagaatgtgtgcacatcatccccagcaccaaggacccccaccgctgctgctgcggccgcctgattggccagcacgtgggcctgacccccagcatctctgtgctgcagaatgagaagaatgaaagccggctgagcagaaatgacatccagagcgagaagtggagcatcagcaagcacacccagctgagccccacagatgccttcggcaccatcgagttccagggcggcggccacagcaacaaggccatgtatgtgcgggtgtcctttgacaccaagccagacctgctgctgcacctgatgaccaaggagtggcagctggagctgcccaagctgctgatctctgtgcatggaggcctgcagaactttgagctgcagcccaagctgaagcaggtgtttgggaagggcctcatcaaggccgccatgaccaccggggcctggatcttcaccggcggcgtgaacacaggagtcatccgccacgtgggagatgccctgaaggaccacgccagcaagagccggggcaagatctgcaccatcggcatcgccccctggggcatcgtggagaaccaggaggacctgattggaagagatgtggtgcggccctaccagaccatgagcaaccccatgagcaagctgactgtgctgaacagcatgcacagccacttcatcctggccgacaatggcaccaccgggaagtatggagctgaggtgaagctgcggcggcagctggagaagcacatcagcctgcagaagatcaacacccgcatcggccagggcgtgcctgtggtggccctgattgtggagggcggccccaacgtcatcagcatcgtgctggagtacctgcgggacaccccacctgtgcctgtggtggtgtgtgatggcagcggccgggccagtgacatcctggccttcggccacaagtacagcgaggagggcggcctcatcaatgaaagcctgcgggaccagctgctggtgaccatccagaagaccttcacctacaccaggacccaggcccagcacctgttcatcatcctgatggagtgcatgaagaagaaggagctgatcaccgtcttcaggatgggcagcgagggccaccaggacatcgacctggccatcctgacagccctgctgaagggggccaatgccagcgccccagaccagctgagcctggccctggcctggaacagagtggacatcgcccggagccagatcttcatctacggccagcagtggcctgtgggcagcctggagcaggccatgctggatgccctggtgctggacagagtggactttgtgaagctgctgattgaaaatggagtgtccatgcaccgcttcctgaccatcagccggctggaggagctgtacaacaccaggcatggccccagcaacaccctgtaccacctggtgagagatgtgaagaagcgggagtacccaggcttcggctggatctacttcaagggcaacctgcccccagactaccgcatcagcctgattgacatcggcctggtgattgagtacctgatgggcggggcctaccgctgcaactacaccaggaagcgcttccgcaccctgtaccacaacctgtttggccccaagagagatgacatccccctgcggcggggcaggaagaccaccaagaagcgggaggaggaggtggacatcgacctggatgatcctgagatcaaccacttccccttccccttccacgagctgatggtgtgggccgtgctgatgaagaggcagaagatggccctcttcttctggcagcacggggaggaggccatggccaaggccctggtggcctgcaagctgtgcaaggccatggcccacgaggcctctgaaaatgacatggtggatgacatcagccaggagctgaaccacaacagccgggactttggccagctggccgtggagctgctggaccagagctacaagcaggatgagcagctggccatgaagctgctgacctatgagctgaagaactggagcaatgccacctgcctgcagctggccgtggccgccaagcaccgggacttcatcgcccacacctgcagccagatgctgctgacagacatgtggatgggccgcctgaggatgaggaagaacagcggcctgaaggtgatcctgggcatcctgctgccccccagcatcctgagcctggagttcaagaacaaggatgacatgccctacatgagccaggcccaggagatccacctgcaggagaaggaggccgaggagcctgagaagcccaccaaggagaaggaggaggaggacatggagctgacagccatgctgggcagaaataatggagagagcagcaggaagaaggatgaggaggaggtgcagagcaagcacaggctcatccccctgggcaggaagatctatgagttctacaatgcccccatcgtgaagttctggttctacaccctggcctacatcggctacctgatgctgttcaactacatcgtgctggtgaagatggagcgctggcccagcacccaggagtggatcgtcatctcctacatcttcaccctgggcatcgagaagatgagggagatcctgatgtctgagcccgggaagctgctgcagaaggtgaaggtgtggctgcaggagtactggaatgtgacagacctgattgccatcctgctcttctctgtgggcatgatcctgcggctgcaggaccagcccttcagaagtgatggccgggtcatctactgtgtgaacatcatctactggtacatccggctgctggacatcttcggcgtgaacaagtacctgggcccctacgtgatgatgattggcaagatgatgattgacatgatgtactttgtgatcatcatgctggtggtgctgatgagctttggagtggcccggcaggccatcctcttccccaatgaggagcccagctggaagctggccaagaacatcttctacatgccctactggatgatctatggagaggtgtttgctgaccagattgatcctccctgtggccagaatgagacccgggaggatggcaagatcatccagctgcccccctgcaagacaggagcctggatcgtgcctgccatcatggcctgctacctgctggtggccaacatcctgctggtgaacctgctgattgctgtgttcaacaacaccttctttgaggtgaagagcatcagcaaccaggtgtggaagttccagcgctaccagctgatcatgaccttccacgagaggcctgtgctgcccccacccctcatcatcttcagccacatgaccatgatcttccagcacctgtgctgccgctggaggaagcatgaaagtgaccctgatgagcgggactatggcctgaagctgttcatcacagatgatgagctgaagaaggtgcatgactttgaggagcagtgcatcgaggagtacttccgggagaaggatgaccgcttcaacagcagcaatgatgagcgcatccgggtgaccagcgagcgggtggagaacatgtccatgaggctggaggaggtgaatgaaagagagcacagcatgaaggccagcctgcagacagtggacatccggctggcccagctggaggacctgattggccgcatggccacagccctggagcggctgaccggcctggagcgggcagagagcaacaagatccgcagcaggaccagcagtgactgcacagatgctgcctacatcgtgcggcagagcagcttcaacagccaggagggcaacaccttcaagctgcaggagagcattgatcctgctggggaggagaccatgagccccaccagccccaccctgatgcccaggatgaggagccacagcttctacagcgtgaacatgaaggacaagggcggcatcgagaagctggagagcatcttcaaggagaggagcctgagcctgcaccgggccaccagcagccacagcgtggccaaggagcccaaggccccagctgccccagccaacaccctggccatcgtgcctgacagccggcggcccagcagctgcatcgacatctacgtgtctgccatggatgagctgcactgtgacatcgaccccctggacaacagcgtgaacatcctgggcctgggggagcccagcttcagcacccctgtgcccagcacagcccccagcagcagcgcctatgccaccctggcccccacagaccggccccccagccgcagcattgactttgaggacatcacctccatggacaccaggagcttcagcagtgactacacccacctgcctgagtgccagaacccctgggacagcgagccccccatgtaccacaccatcgagaggagcaagagcagccgctacctggccaccacccccttcctgctggaggaggcccccatcgtgaagagccacagcttcatgttcagccccagccgcagctactatgccaactttggagtgcctgtgaagacagctgagtacaccagcatcacagactgcatcgacacccgctgtgtgaatgccccccaggccatcgctgaccgggccgccttccctgggggcctgggggacaaggtggaggacctgacctgctgccaccctgagcgggaggccgagctgagccaccccagcagtgacagtgaagaaaatgaggccaagggcagaagagccaccatcgccatcagcagccaggagggggacaacagcgagaggaccctgagcaacaacatcaccgtgcccaagattgaaagagccaacagctacagcgctgaggagcccagcgccccctatgcccacaccaggaagagcttcagcatcagtgacaagctggaccggcagaggaacacagccagcctgaggaaccccttccagaggagcaagagcagcaagccagagggccgcggggacagcctgtccatgaggcggctgagcaggaccagcgccttccagagctttgagagcaagcacaactag

SEQ ID NO: 173812 - DNA, 4710 bp, synthetic construct
  misc_feature 1..4710: note = Description of Artificial Sequence: Synthetic coding sequence
  source 1..4710: mol_type = other DNA
atgtatgtgcgggtgtcctttgacaccaagccagacctgctgctgcacctgatgaccaaggagtggcagctggagctgcccaagctgctgatctctgtgcacggcggcctgcagaactttgagctgcagcccaagctgaagcaggtgtttgggaagggcctcatcaaggccgccatgaccactggagcctggatcttcaccggaggagtgaacacaggagtcatcagacatgtgggagatgccctgaaggaccacgccagcaagagccggggcaagatctgcaccatcggcatcgccccctggggcatcgtggagaaccaggaggacctgattggaagagatgtggtgcggccctaccagaccatgagcaaccccatgagcaagctgactgtgctgaacagcatgcacagccacttcatcctggccgacaatggcaccaccgggaagtacggggctgaggtgaagctgcggcggcagctggagaagcacatcagcctgcagaagatcaacacccgctgcctgcccttcttcagcctggacagccgcctcttctacagcttctggggcagctgccagctggacagcgtgggcatcggccagggcgtgcctgtggtggccctgattgtggagggcggccccaacgtcatcagcatcgtgctggagtacctgcgggacaccccacctgtgcctgtggtggtgtgtgatggcagcggccgggccagtgacatcctggccttcggccacaagtacagcgaggagggcggcctcatcaatgaaagcctgcgggaccagctgctggtgaccatccagaagaccttcacctacaccaggacccaggcccagcacctgttcatcatcctgatggagtgcatgaagaagaaggagctgatcaccgtcttcaggatgggcagcgagggccaccaggacatcgacctggccatcctgacagccctgctgaagggggccaatgccagcgccccagaccagctgagcctggccctggcctggaacagagtggacatcgcccggagccagatcttcatctacggccagcagtggcctgtgggcagcctggagcaggccatgctggatgccctggtgctggacagagtggactttgtgaagctgctgattgaaaatggagtgtccatgcaccgcttcctgaccatcagccggctggaggagctgtacaacaccaggcatggccccagcaacaccctgtaccacctggtgagagatgtgaagaagggcaacctgcccccagactaccgcatcagcctgattgacatcggcctggtgattgagtacctgatgggcggggcctaccgctgcaactacaccaggaagcgcttccgcaccctgtaccacaacctgtttggccccaagagagatgacatccccctgcggcggggcaggaagaccaccaagaagcgggaggaggaggtggacatcgacctggatgatcctgagatcaaccacttccccttccccttccacgagctgatggtgtgggccgtgctgatgaagaggcagaagatggccctcttcttctggcagcacggggaggaggccatggccaaggccctggtggcctgcaagctgtgcaaggccatggcccacgaggcctctgaaaatgacatggtggatgacatcagccaggagctgaaccacaacagccgggactttggccagctggccgtggagctgctggaccagagctacaagcaggatgagcagctggccatgaagctgctgacctatgagctgaagaactggagcaatgccacctgcctgcagctggccgtggccgccaagcaccgggacttcatcgcccacacctgcagccagatgctgctgacagacatgtggatgggccgcctgaggatgaggaagaacagcggcctgaaggtgatcctgggcatcctgctgccccccagcatcctgagcctggagttcaagaacaaggatgacatgccctacatgagccaggcccaggagatccacctgcaggagaaggaggccgaggagcctgagaagcccaccaaggagaaggaggaggaggacatggagctgacagccatgctgggcagaaataatggagagagcagcaggaagaaggatgaggaggaggtgcagagcaagcacaggctcatccccctgggcaggaagatctatgagttctacaatgcccccatcgtgaagttctggttctacaccctggcctacatcggctacctgatgctgttcaactacatcgtgctggtgaagatggagcgctggcccagcacccaggagtggatcgtcatctcctacatcttcaccctgggcatcgagaagatgagggagatcctgatgtctgagcccgggaagctgctgcagaaggtgaaggtgtggctgcaggagtactggaatgtgacagacctgattgccatcctgctcttctctgtgggcatgatcctgcggctgcaggaccagcccttcagaagtgatggccgggtcatctactgtgtgaacatcatctactggtacatccggctgctggacatcttcggcgtgaacaagtacctgggcccctacgtgatgatgattggcaagatgatgattgacatgatgtactttgtgatcatcatgctggtggtgctgatgagctttggagtggcccggcaggccatcctcttccccaatgaggagcccagctggaagctggccaagaacatcttctacatgccctactggatgatctatggagaggtgtttgctgaccagattgatcctccctgtggccagaatgagacccgggaggatggcaagatcatccagctgcccccctgcaagacaggagcctggatcgtgcctgccatcatggcctgctacctgctggtggccaacatcctgctggtgaacctgctgattgctgtgttcaacaacaccttctttgaggtgaagagcatcagcaaccaggtgtggaagttccagcgctaccagctgatcatgaccttccacgagaggcctgtgctgcccccacccctcatcatcttcagccacatgaccatgatcttccagcacctgtgctgccgctggaggaagcatgaaagtgaccctgatgagcgggactatggcctgaagctgttcatcacagatgatgagctgaagaaggtgcatgactttgaggagcagtgcatcgaggagtacttccgggagaaggatgaccgcttcaacagcagcaatgatgagcgcatccgggtgaccagcgagcgggtggagaacatgtccatgaggctggaggaggtgaatgaaagagagcacagcatgaaggccagcctgcagacagtggacatccggctggcccagctggaggacctgattggccgcatggccacagccctggagcggctgaccggcctggagcgggcagagagcaacaagatccgcagcaggaccagcagtgactgcacagatgctgcctacatcgtgcggcagagcagcttcaacagccaggagggcaacaccttcaagctgcaggagagcattgatcctgctggggaggagaccatgagccccaccagccccaccctgatgcccaggatgaggagccacagcttctacagcgtgaacatgaaggacaagggcggcatcgagaagctggagagcatcttcaaggagaggagcctgagcctgcaccgggccaccagcagccacagcgtggccaaggagcccaaggccccagctgccccagccaacaccctggccatcgtgcctgacagccggcggcccagcagctgcatcgacatctacgtgtctgccatggatgagctgcactgtgacatcgaccccctggacaacagcgtgaacatcctgggcctgggggagcccagcttcagcacccctgtgcccagcacagcccccagcagcagcgcctatgccaccctggcccccacagaccggccccccagccgcagcattgactttgaggacatcacctccatggacaccaggagcttcagcagtgactacacccacctgcctgagtgccagaacccctgggacagcgagccccccatgtaccacaccatcgagaggagcaagagcagccgctacctggccaccacccccttcctgctggaggaggcccccatcgtgaagagccacagcttcatgttcagccccagccgcagctactatgccaactttggagtgcctgtgaagacagctgagtacaccagcatcacagactgcatcgacacccgctgtgtgaatgccccccaggccatcgctgaccgggccgccttccctgggggcctgggggacaaggtggaggacctgacctgctgccaccctgagcgggaggccgagctgagccaccccagcagtgacagtgaagaaaatgaggccaagggcagaagagccaccatcgccatcagcagccaggagggggacaacagcgagaggaccctgagcaacaacatcaccgtgcccaagattgaaagagccaacagctacagcgctgaggagcccagcgccccctatgcccacaccaggaagagcttcagcatcagtgacaagctggaccggcagaggaacacagccagcctgaggaaccccttccagaggagcaagagcagcaagccagagggccgcggggacagcctgtccatgaggcggctgagcaggaccagcgccttccagagctttgagagcaagcacaactag

SEQ ID NO: 173813 - DNA, 4710 bp, synthetic construct; identical to SEQ ID NO: 173812
  misc_feature 1..4710: note = Description of Artificial Sequence: Synthetic coding sequence
  source 1..4710: mol_type = other DNA

SEQ ID NO: 173814 - DNA, 4701 bp, synthetic construct
  misc_feature 1..4701: note = Description of Artificial Sequence: Synthetic coding sequence
  source 1..4701: mol_type = other DNA
atgtatgtgcgggtgtcctttgacaccaagccagacctgctgctgcacctgatgaccaaggagtggcagctggagctgcccaagctgctgatctctgtgcacggcggcctgcagaactttgagctgcagcccaagctgaagcaggtgtttgggaagggcctcatcaaggccgccatgaccactggagcctggatcttcaccggaggagtgaacacaggagtcatcagacatgtgggagatgccctgaaggaccacgccagcaagagccggggcaagatctgcaccatcggcatcgccccctggggcatcgtggagaaccaggaggacctgattggaagagatgtggtgcggccctaccagaccatgagcaaccccatgagcaagctgactgtgctgaacagcatgcacagccacttcatcctggccgacaatggcaccaccgggaagtacggggctgaggtgaagctgcggcggcagctggagaagcacatcagcctgcagaagatcaacaccagaattggccagggcgtgcctgtggtggccctgattgtggagggcggccccaacgtcatcagcatcgtgctggagtacctgcgggacaccccacctgtgcctgtggtggtgtgtgatggcagcggccgggccagtgacatcctggccttcggccacaagtacagcgaggagggcggcctcatcaatgaaagcctgcgggaccagctgctggtgaccatccagaagaccttcacctacaccaggacccaggcccagcacctgttcatcatcctgatggagtgcatgaagaagaaggagctgatcaccgtcttcaggatgggcagcgagggccaccaggacatcgacctggccatcctgacagccctgctgaagggggccaatgccagcgccccagaccagctgagcctggccctggcctggaacagagtggacatcgcccggagccagatcttcatctacggccagcagtggcctgtgggcagcctggagcaggccatgctggatgccctggtgctggacagagtggactttgtgaagctgctgattgaaaatggagtgtccatgcaccgcttcctgaccatcagccggctggaggagctgtacaacaccaggcatggccccagcaacaccctgtaccacctggtgagagatgtgaagaagcgggagtacccaggcttcggctggatctacttcaagggcaacctgcccccagactaccgcatcagcctgattgatattggcctggtgattgagtacctgatgggcggggcctaccgctgcaactacaccaggaagcgcttccgcaccctgtaccacaacctgtttggccccaagaggcccaaggccctgaagctgctgggcatggaggatgacatccccctgcggcggggcaggaagaccaccaagaagcgggaggaggaggtggacatcgacctggatgatcctgagatcaaccacttccccttccccttccacgagctgatggtgtgggccgtgctgatgaagaggcagaagatggccctcttcttctggcagcacggggaggaggccatggccaaggccctggtggcctgcaagctgtgcaaggccatggcccacgaggcctctgaaaatgacatggtggatgacatcagccaggagctgaaccacaacagccgggactttggccagctggccgtggagctgctggaccagagctacaagcaggatgagcagctggccatgaagctgctgacctatgagctgaagaactggagcaatgccacctgcctgcagctggccgtggccgccaagcaccgggacttcatcgcccacacctgcagccagatgctgctgacagacatgtggatgggccgcctgaggatgaggaagaacagcggcctgaaggtgatcctgggcatcctgctgcccccatccatcctgagcctggagttcaagaacaaggatgacatgccctacatgagccaggcccaggagatccacctgcaggagaaggaggccgaggagcctgagaagcccaccaaggagaaggaggaggaggacatggagctgacagccatgctgggcaggaacaacggggagagcagcaggaagaaggatgaggaggaggtgcagagcaagcacaggctcatccccctgggcaggaagatctatgagttctacaatgcccccatcgtgaagttctggttctacaccctggcctacatcggctacctgatgctgttcaactacatcgtgctggtgaagatggagcgctggcccagcacccaggagtggatcgtcatctcctacatcttcaccctgggcatcgagaagatgagggagatcctgatgtctgagcccgggaagctgctgcagaaggtgaaggtgtggctgcaggagtactggaatgtgacagacctgattgccatcctgctcttctctgtgggcatgatcctgcggctgcaggaccagcccttcagaagtgatggccgggtcatctactgtgtgaacatcatctactggtacatccggctgctggacatctttggagtgaacaagtacctgggcccctacgtgatgatgattggcaagatgatgattgacatgatgtacttcgtcatcatcatgctggtggtgctgatgagctttggagtggcccggcaggccatcctcttccccaatgaggagcccagctggaagctggccaagaacatcttctacatgccctactggatgatctacggggaggtgtttgctgaccagattgaccccccctgtggccagaatgagaccagagaagatggcaagatcatccagctgcccccctgcaagacaggagcctggatcgtgcctgccatcatggcctgctacctgctggtggccaacatcctgctggtgaacctgctgattgctgtgttcaacaacaccttctttgaggtgaagagcatcagcaaccaggtgtggaagttccagcgctaccagctgatcatgaccttccacgagaggcctgtgctgcccccacccctcatcatcttcagccacatgaccatgatcttccagcacctgtgctgccgctggaggaagcatgaaagtgaccctgatgagcgggactatggcctgaagctgttcatcacagatgatgagctgaagaaggtgcatgactttgaggagcagtgcatcgaggagtacttccgggagaaggatgaccgcttcaacagcagcaatgatgagcgcatccgggtgaccagcgagcgggtggagaacatgtccatgaggctggaggaggtgaatgaaagagagcacagcatgaaggccagcctgcagacagtggacatccggctggcccagctggaggacctgattggaaggatggccacagccctggagcggctgaccggcctggagagagctgagagcaacaagatccgcagcaggaccagcagtgactgcacagatgctgcctacatcgtgcggcagagcagcttcaacagccaggagggcaacaccttcaagctgcaggagagcattgatcctgctggggaggagaccatgagccccaccagccccaccctgatgcccaggatgaggagccacagcttctacagcgtgaacatgaaggacaagggcggcatcgagaagctggagagcatcttcaaggagaggagcctgagcctgcaccgggccaccagcagccacagcgtggccaaggagcccaaggccccagctgccccagccaacaccctggccatcgtgcctgacagcagaagacccagcagctgcatcgacatctacgtgtctgccatggatgagctgcactgtgacatcgaccccctggacaacagcgtgaacatcctgggcctgggggagcccagcttcagcacccctgtgcccagcacagcccccagcagcagcgcctatgccaccctggcccccacagacaggcctcccagccgcagcattgactttgaggacatcacctccatggacaccaggagcttcagcagtgactacacccacctgcctgagtgccagaacccctgggacagcgagccccccatgtaccacaccatcgagaggagcaagagcagccgctacctggccaccacccccttcctgctggaggaggcccccatcgtgaagagccacagcttcatgttcagccccagccgcagctactatgccaactttggagtgcctgtgaagacagctgagtacaccagcatcacagactgcatcgacacccgctgtgtgaatgccccccaggccatcgctgacagagctgccttccctgggggcctgggggacaaggtggaggacctgacctgctgccaccctgagcgggaggccgagctgagccaccccagcagtgacagcgaggagaatgaggccaagggccggcgggccaccatcgccatcagcagccaggagggggacaacagcgagaggaccctgagcaacaacatcaccgtgcccaagattgagcgggccaacagctacagcgctgaggagcccagcgccccctatgcccacaccaggaagagcttcagcatcagtgacaagctggaccggcagaggaacacagccagcctgaggaaccccttccagaggagcaagagcagcaagccagagggccgcggggacagcctgtccatgaggcggctgagcaggaccagcgccttccagagctttgagagcaagcacaactag

SEQ ID NO: 173815 - DNA, 4740 bp, synthetic construct
  misc_feature 1..4740: note = Description of Artificial Sequence: Synthetic coding sequence
  source 1..4740: mol_type = other DNA
atgtatgtgcgggtgtcctttgacaccaagccagacctgctgctgcacctgatgaccaaggagtggcagctggagctgcccaagctgctgatctctgtgcacggcggcctgcagaactttgagctgcagcccaagctgaagcaggtgtttgggaagggcctcatcaaggccgccatgaccactggagcctggatcttcaccggaggagtgaacacaggagtcatcagacatgtgggagatgccctgaaggaccacgccagcaagagccggggcaagatctgcaccatcggcatcgccccctggggcatcgtggagaaccaggaggacctgattggaagagatgtggtgcggccctaccagaccatgagcaaccccatgagcaagctgactgtgctgaacagcatgcacagccacttcatcctggccgacaatggcaccaccgggaagtacggggctgaggtgaagctgcggcggcagctggagaagcacatcagcctgcagaagatcaacacccgctgcctgcccttcttcagcctggacagccgcctcttctacagcttctggggcagctgccagctggacagcgtgggcatcggccagggcgtgcctgtggtggccctgattgtggagggcggccccaacgtcatcagcatcgtgctggagtacctgcgggacaccccacctgtgcctgtggtggtgtgtgatggcagcggccgggccagtgacatcctggccttcggccacaagtacagcgaggagggcggcctcatcaatgaaagcctgcgggaccagctgctggtgaccatccagaagaccttcacctacaccaggacccaggcccagcacctgttcatcatcctgatggagtgcatgaagaagaaggagctgatcaccgtcttcaggatgggcagcgagggccaccaggacatcgacctggccatcctgacagccctgctgaagggggccaatgccagcgccccagaccagctgagcctggccctggcctggaacagagtggacatcgcccggagccagatcttcatctacggccagcagtggcctgtgggcagcctggagcaggccatgctggatgccctggtgctggacagagtggactttgtgaagctgctgattgaaaatggagtgtccatgcaccgcttcctgaccatcagccggctggaggagctgtacaacaccaggcatggccccagcaacaccctgtaccacctggtgagagatgtgaagaagggcaacctgcccccagactaccgcatcagcctgattgacatcggcctggtgattgagtacctgatgggcggggcctaccgctgcaactacaccaggaagcgcttccgcaccctgtaccacaacctgtttggccccaagaggcccaaggccctgaagctgctgggcatggaggatgacatccccctgcggcggggcaggaagaccaccaagaagcgggaggaggaggtggacatcgacctggatgatcctgagatcaaccacttccccttccccttccacgagctgatggtgtgggccgtgctgatgaagaggcagaagatggccctcttcttctggcagcacggggaggaggccatggccaaggccctggtggcctgcaagctgtgcaaggccatggcccacgaggcctctgaaaatgacatggtggatgacatcagccaggagctgaaccacaacagccgggactttggccagctggccgtggagctgctggaccagagctacaagcaggatgagcagctggccatgaagctgctgacctatgagctgaagaactggagcaatgccacctgcctgcagctggccgtggccgccaagcaccgggacttcatcgcccacacctgcagccagatgctgctgacagacatgtggatgggccgcctgaggatgaggaagaacagcggcctgaaggtgatcctgggcatcctgctgccccccagcatcctgagcctggagttcaagaacaaggatgacatgccctacatgagccaggcccaggagatccacctgcaggagaaggaggccgaggagcctgagaagcccaccaaggagaaggaggaggaggacatggagctgacagccatgctgggcagaaataatggagagagcagcaggaagaaggatgaggaggaggtgcagagcaagcacaggctcatccccctgggcaggaagatctatgagttctacaatgcccccatcgtgaagttctggttctacaccctggcctacatcggctacctgatgctgttcaactacatcgtgctggtgaagatggagcgctggcccagcacccaggagtggatcgtcatctcctacatcttcaccctgggcatcgagaagatgagggagatcctgatgtctgagcccgggaagctgctgcagaaggtgaaggtgtggctgcaggagtactggaatgtgacagacctgattgccatcctgctcttctctgtgggcatgatcctgcggctgcaggaccagcccttcagaagtgatggccgggtcatctactgtgtgaacatcatctactggtacatccggctgctggacatcttcggcgtgaacaagtacctgggcccctacgtgatgatgattggcaagatgatgattgacatgatgtactttgtgatcatcatgctggtggtgctgatgagctttggagtggcccggcaggccatcctcttccccaatgaggagcccagctggaagctggccaagaacatcttctacatgccctactggatgatctatggagaggtgtttgctgaccagattgatcctccctgtggccagaatgagacccgggaggatggcaagatcatccagctgcccccctgcaagacaggagcctggatcgtgcctgccatcatggcctgctacctgctggtggccaacatcctgctggtgaacctgctgattgctgtgttcaacaacaccttctttgaggtgaagagcatcagcaaccaggtgtggaagttccagcgctaccagctgatcatgaccttccacgagaggcctgtgctgcccccacccctcatcatcttcagccacatgaccatgatcttccagcacctgtgctgccgctggaggaagcatgaaagtgaccctgatgagcgggactatggcctgaagctgttcatcacagatgatgagctgaagaaggtgcatgactttgaggagcagtgcatcgaggagtacttccgggagaaggatgaccgcttcaacagcagcaatgatgagcgcatccgggtgaccagcgagcgggtggagaacatgtccatgaggctggaggaggtgaatgaaagagagcacagcatgaaggccagcctgcagacagtggacatccggctggcccagctggaggacctgattggccgcatggccacagccctggagcggctgaccggcctggagcgggcagagagcaacaagatccgcagcaggaccagcagtgactgcacagatgctgcctacatcgtgcggcagagcagcttcaacagccaggagggcaacaccttcaagctgcaggagagcattgatcctgctggggaggagaccatgagccccaccagccccaccctgatgcccaggatgaggagccacagcttctacagcgtgaacatgaaggacaagggcggcatcgagaagctggagagcatcttcaaggagaggagcctgagcctgcaccgggccaccagcagccacagcgtggccaaggagcccaaggccccagctgccccagccaacaccctggccatcgtgcctgacagccggcggcccagcagctgcatcgacatctacgtgtctgccatggatgagctgcactgtgacatcgaccccctggacaacagcgtgaacatcctgggcctgggggagcccagcttcagcacccctgtgcccagcacagcccccagcagcagcgcctatgccaccctggcccccacagaccggccccccagccgcagcattgactttgaggacatcacctccatggacaccaggagcttcagcagtgactacacccacctgcctgagtgccagaacccctgggacagcgagccccccatgtaccacaccatcgagaggagcaagagcagccgctacctggccaccacccccttcctgctggaggaggcccccatcgtgaagagccacagcttcatgttcagccccagccgcagctactatgccaactttggagtgcctgtgaagacagctgagtacaccagcatcacagactgcatcgacacccgctgtgtgaatgccccccaggccatcgctgaccgggccgccttccctgggggcctgggggacaaggtggaggacctgacctgctgccaccctgagcgggaggccgagctgagccaccccagcagtgacagtgaagaaaatgaggccaagggcagaagagccaccatcgccatcagcagccaggagggggacaacagcgagaggaccctgagcaacaacatcaccgtgcccaagattgaaagagccaacagctacagcgctgaggagcccagcgccccctatgcccacaccaggaagagcttcagcatcagtgacaagctggaccggcagaggaacacagccagcctgaggaaccccttccagaggagcaagagcagcaagccagagggccgcggggacagcctgtccatgaggcggctgagcaggaccagcgccttccagagctttgagagcaagcacaactag

SEQ ID NO: 173816 - DNA, 5124 bp, synthetic construct
  misc_feature 1..5124: note = Description of Artificial Sequence: Synthetic coding sequence
  source 1..5124: mol_type = other DNA
atgcctgagccctggggcaccgtgtacttcctgggcatcgcccaggtgttctccttcctgttctcctggtggaacctggagggcgtgatgaaccaggctgatgccccccggcccctgaactggaccatcaggaagctgtgccacgccgccttcctgcccagcgtgcggctgctgaaggcccagaagtcctggattgagcgggccttctacaagagagaatgtgtgcacatcatccccagcaccaaggacccccaccgctgctgctgcggccgcctgattggccagcacgtgggcctgacccccagcatctctgtgctgcagaatgagaagaatgaaagccggctgagcagaaatgacatccagagcgagaagtggagcatcagcaagcacacccagctgagccccacagatgccttcggcaccatcgagttccagggcggcggccacagcaacaaggccatgtatgtgcgggtgtcctttgacaccaagccagacctgctgctgcacctgatgaccaaggagtggcagctggagctgcccaagctgctgatctctgtgcatggaggcctgcagaactttgagctgcagcccaagctgaagcaggtgtttgggaagggcctcatcaaggccgccatgaccaccggggcctggatcttcaccggcggcgtgaacacaggagtcatccgccacgtgggagatgccctgaaggaccacgccagcaagagccggggcaagatctgcaccatcggcatcgccccctggggcatcgtggagaaccaggaggacctgattggaagagatgtggtgcggccctaccagaccatgagcaaccccatgagcaagctgactgtgctgaacagcatgcacagccacttcatcctggccgacaatggcaccaccgggaagtatggagctgaggtgaagctgcggcggcagctggagaagcacatcagcctgcagaagatcaacacccgcatcggccagggcgtgcctgtggtggccctgattgtggagggcggccccaacgtcatcagcatcgtgctggagtacctgcgggacaccccacctgtgcctgtggtggtgtgtgatggcagcggccgggccagtgacatcctggccttcggccacaagtacagcgaggagggcggcctcatcaatgaaagcctgcgggaccagctgctggtgaccatccagaagaccttcacctacaccaggacccaggcccagcacctgttcatcatcctgatggagtgcatgaagaagaaggagctgatcaccgtcttcaggatgggcagcgagggccaccaggacatcgacctggccatcctgacagccctgctgaagggggccaatgccagcgccccagaccagctgagcctggccctggcctggaacagagtggacatcgcccggagccagatcttcatctacggccagcagtggcctgtgggcagcctggagcaggccatgctggatgccctggtgctggacagagtggactttgtgaagctgctgattgaaaatggagtgtccatgcaccgcttcctgaccatcagccggctggaggagctgtacaacaccaggcatggccccagcaacaccctgtaccacctggtgagagatgtgaagaagggcaacctgcccccagactaccgcatcagcctgattgacatcggcctggtgattgagtacctgatgggcggggcctaccgctgcaactacaccaggaagcgcttccgcaccctgtaccacaacctgtttggccccaagaggcccaaggccctgaagctgctgggcatggaggatgacatccccctgcggcggggcaggaagaccaccaagaagcgggaggaggaggtggacatcgacctggatgatcctgagatcaaccacttccccttccccttccacgagctgatggtgtgggccgtgctgatgaagaggcagaagatggccctcttcttctggcagcacggggaggaggccatggccaaggccctggtggcctgcaagctgtgcaaggccatggcccacgaggcctctgaaaatgacatggtggatgacatcagccaggagctgaaccacaacagccgggactttggccagctggccgtggagctgctggaccagagctacaagcaggatgagcagctggccatgaagctgctgacctatgagctgaagaactggagcaatgccacctgcctgcagctggccgtggccgccaagcaccgggacttcatcgcccacacctgcagccagatgctgctgacagacatgtggatgggccgcctgaggatgaggaagaacagcggcctgaaggtgatcctgggcatcctgctgccccccagcatcctgagcctggagttcaagaacaaggatgacatgccctacatgagccaggcccaggagatccacctgcaggagaaggaggccgaggagcctgagaagcccaccaaggagaaggaggaggaggacatggagctgacagccatgctgggcagaaataatggagagagcagcaggaagaaggatgaggaggaggtgcagagcaagcacaggctcatccccctgggcaggaagatctatgagttctacaatgcccccatcgtgaagttctggttctacaccctggcctacatcggctacctgatgctgttcaactacatcgtgctggtgaagatggagcgctggcccagcacccaggagtggatcgtcatctcctacatcttcaccctgggcatcgagaagatgagggagatcctgatgtctgagcccgggaagctgctgcagaaggtgaaggtgtggctgcaggagtactggaatgtgacagacctgattgccatcctgctcttctctgtgggcatgatcctgcggctgcaggaccagcccttcagaagtgatggccgggtcatctactgtgtgaacatcatctactggtacatccggctgctggacatcttcggcgtgaacaagtacctgggcccctacgtgatgatgattggcaagatgatgattgacatgatgtactttgtgatcatcatgctggtggtgctgatgagctttggagtggcccggcaggccatcctcttccccaatgaggagcccagctggaagctggccaagaacatcttctacatgccctactggatgatctatggagaggtgtttgctgaccagattgatcctccctgtggccagaatgagacccgggaggatggcaagatcatccagctgcccccctgcaagacaggagcctggatcgtgcctgccatcatggcctgctacctgctggtggccaacatcctgctggtgaacctgctgattgctgtgttcaacaacaccttctttgaggtgaagagcatcagcaaccaggtgtggaagttccagcgctaccagctgatcatgaccttccacgagaggcctgtgctgcccccacccctcatcatcttcagccacatgaccatgatcttccagcacctgtgctgccgctggaggaagcatgaaagtgaccctgatgagcgggactatggcctgaagctgttcatcacagatgatgagctgaagaaggtgcatgactttgaggagcagtgcatcgaggagtacttccgggagaaggatgaccgcttcaacagcagcaatgatgagcgcatccgggtgaccagcgagcgggtggagaacatgtccatgaggctggaggaggtgaatgaaagagagcacagcatgaaggccagcctgcagacagtggacatccggctggcccagctggaggacctgattggccgcatggccacagccctggagcggctgaccggcctggagcgggcagagagcaacaagatccgcagcaggaccagcagtgactgcacagatgctgcctacatcgtgcggcagagcagcttcaacagccaggagggcaacaccttcaagctgcaggagagcattgatcctgctggggaggagaccatgagccccaccagccccaccctgatgcccaggatgaggagccacagcttctacagcgtgaacatgaaggacaagggcggcatcgagaagctggagagcatcttcaaggagaggagcctgagcctgcaccgggccaccagcagccacagcgtggccaaggagcccaaggccccagctgccccagccaacaccctggccatcgtgcctgacagccggcggcccagcagctgcatcgacatctacgtgtctgccatggatgagctgcactgtgacatcgaccccctggacaacagcgtgaacatcctgggcctgggggagcccagcttcagcacccctgtgcccagcacagcccccagcagcagcgcctatgccaccctggcccccacagaccggccccccagccgcagcattgactttgaggacatcacctccatggacaccaggagcttcagcagtgactacacccacctgcctgagtgccagaacccctgggacagcgagccccccatgtaccacaccatcgagaggagcaagagcagccgctacctggccaccacccccttcctgctggaggaggcccccatcgtgaagagccacagcttcatgttcagccccagccgcagctactatgccaactttggagtgcctgtgaagacagctgagtacaccagcatcacagactgcatcgacacccgctgtgtgaatgccccccaggccatcgctgaccgggccgccttccctgggggcctgggggacaaggtggaggacctgacctgctgccaccctgagcgggaggccgagctgagccaccccagcagtgacagtgaagaaaatgaggccaagggcagaagagccaccatcgccatcagcagccaggagggggacaacagcgagaggaccctgagcaacaacatcaccgtgcccaagattgaaagagccaacagctacagcgctgaggagcccagcgccccctatgcccacaccaggaagagcttcagcatcagtgacaagctggaccggcagaggaacacagccagcctgaggaaccccttccagaggagcaagagcagcaagccagagggccgcggggacagcctgtccatgaggcggctgagcaggaccagcgccttccagagctttgagagcaagcacaactag

SEQ ID NO: 173817 - DNA, 3978 bp, synthetic construct
  misc_feature 1..3978: note = Description of Artificial Sequence: Synthetic coding sequence
  source 1..3978: mol_type = other DNA
atgcctgagccctggggcaccgtgtacttcctgggcatcgcccaggtgttctccttcctgttctcctggtggaacctggagggcgtgatgaaccaggctgatgccccccggcccctgaactggaccatcaggaagctgtgccacgccgccttcctgcccagcgtgcggctgctgaaggcccagaagtcctggattgagcgggccttctacaagagagaatgtgtgcacatcatccccagcaccaaggacccccaccgctgctgctgcggccgcctgattggccagcacgtgggcctgacccccagcatctctgtgctgcagaatgagaagaatgaaagccggctgagcagaaatgacatccagagcgagaagtggagcatcagcaagcacacccagctgagccccacagatgccttcggcaccatcgagttccagggcggcggccacagcaacaaggccatgtatgtgcgggtgtcctttgacaccaagccagacctgctgctgcacctgatgaccaaggagtggcagctggagctgcccaagctgctgatctctgtgcatggaggcctgcagaactttgagctgcagcccaagctgaagcaggtgtttgggaagggcctcatcaaggccgccatgaccaccggggcctggatcttcaccggcggcgtgaacacaggagtcatccgccacgtgggagatgccctgaaggaccacgccagcaagagccggggcaagatctgcaccatcggcatcgccccctggggcatcgtggagaaccaggaggacctgattggaagagatgtggtgcggccctaccagaccatgagcaaccccatgagcaagctgactgtgctgaacagcatgcacagccacttcatcctggccgacaatggcaccaccgggaagtatggagctgaggtgaagctgcggcggcagctggagaagcacatcagcctgcagaagatcaacacccgcatcggccagggcgtgcctgtggtggccctgattgtggagggcggccccaacgtcatcagcatcgtgctggagtacctgcgggacaccccacctgtgcctgtggtggtgtgtgatggcagcggccgggccagtgacatcctggccttcggccacaagtacagcgaggagggcggcctcatcaatgaaagcctgcgggaccagctgctggtgaccatccagaagaccttcacctacaccaggacccaggcccagcacctgttcatcatcctgatggagtgcatgaagaagaaggagctgatcaccgtcttcaggatgggcagcgagggccaccaggacatcgacctggccatcctgacagccctgctgaagggggccaatgccagcgccccagaccagctgagcctggccctggcctggaacagagtggacatcgcccggagccagatcttcatctacggccagcagtggcctgtgggcagcctggagcaggccatgctggatgccctggtgctggacagagtggactttgtgaagctgctgattgaaaatggagtgtccatgcaccgcttcctgaccatcagccggctggaggagctgtacaacaccaggcatggccccagcaacaccctgtaccacctggtgagagatgtgaagaagggcaacctgcccccagactaccgcatcagcctgattgacatcggcctggtgattgagtacctgatgggcggggcctaccgctgcaactacaccaggaagcgcttccgcaccctgtaccacaacctgtttggccccaagaggcccaaggccctgaagctgctgggcatggaggatgacatccccctgcggcggggcaggaagaccaccaagaagcgggaggaggaggtggacatcgacctggatgatcctgagatcaaccacttccccttccccttccacgagctgatggtgtgggccgtgctgatgaagaggcagaagatggccctcttcttctggcagcacggggaggaggccatggccaaggccctggtggcctgcaagctgtgcaaggccatggcccacgaggcctctgaaaatgacatggtggatgacatcagccaggagctgaaccacaacagccgggactttggccagctggccgtggagctgctggaccagagctacaagcaggatgagcagctggccatgaagctgctgacctatgagctgaagaactggagcaatgccacctgcctgcagctggccgtggccgccaagcaccgggacttcatcgcccacacctgcagccagatgctgctgacagacatgtggatgggccgcctgaggatgaggaagaacagcggcctgaaggtgatcctgggcatcctgctgccccccagcatcctgagcctggagttcaagaacaaggatgacatgccctacatgagccaggcccaggagatccacctgcaggagaaggaggccgaggagcctgagaagcccaccaaggagaaggaggaggaggacatggagctgacagccatgctgggcagaaataatggagagagcagcaggaagaaggatgaggaggaggtgcagagcaagcacaggctcatccccctgggcaggaagatctatgagttctacaatgcccccatcgtgaagttctggttctacaccctggcctacatcggctacctgatgctgttcaactacatcgtgctggtgaagatggagcgctggcccagcacccaggagtggatcgtcatctcctacatcttcaccctgggcatcgagaagatgagggagatcctgatgtctgagcccgggaagctgctgcagaaggtgaaggtgtggctgcaggagtactggaatgtgacagacctgattgccatcctgctcttctctgtgggcatgatcctgcggctgcaggaccagcccttcagaagtgatggccgggtcatctactgtgtgaacatcatctactggtacatccggctgctggacatcttcggcgtgaacaagtacctgggcccctacgtgatgatgattggcaagatgatgattgacatgatgtactttgtgatcatcatgctggtggtgctgatgagctttggagtggcccggcaggccatcctcttccccaatgaggagcccagctggaagctggccaagaacatcttctacatgccctactggatgatctatggagaggtgtttgctgaccagattgatcctccctgtggccagaatgagacccgggaggatggcaagatcatccagctgcccccctgcaagacaggagcctggatcgtgcctgccatcatggcctgctacctgctggtggccaacatcctgctggtgaacctgctgattgctgtgttcaacaacaccttctttgaggtgaagagcatcagcaaccaggtgtggaagttccagcgctaccagctgatcatgaccttccacgagaggcctgtgctgcccccacccctcatcatcttcagccacatgaccatgatcttccagcacctgtgctgccgctggaggaagcatgaaagtgaccctgatgagcgggactatggcctgaagctgttcatcacagatgatgagctgaagaaggtgcatgactttgaggagcagtgcatcgaggagtacttccgggagaaggatgaccgcttcaacagcagcaatgatgagcgcatccgggtgaccagcgagcgggtggagaacatgtccatgaggctggaggaggtgaatgaaagagagcacagcatgaaggccagcctgcagacagtggacatccggctggcccagctggaggacctgattggccgcatggccacagccctggagcggctgaccggcctggagcgggcagagagcaacaagatccgcagcaggaccagcagtgactgcacagatgctgcctacatcgtgcggcagagcagcttcaacagccaggagggcaacaccttcaagctgcaggagagcattgatcctgctgagcaccccctgtacagcgtgtag

SEQ ID NO: 173818 - DNA, 4671 bp, synthetic construct
  misc_feature 1..4671: note = Description of Artificial Sequence: Synthetic coding sequence
  source 1..4671: mol_type = other DNA
tgatatgtgcgggtgtcctttgacaccaagccagacctgctgctgcacctgatgaccaaggagtggcagctggagctgcccaagctgctgatctctgtgcacggcggcctgcagaactttgagctgcagcccaagctgaagcaggtgtttgggaagggcctcatcaaggccgccatgaccactggagcctggatcttcaccggaggagtgaacacaggagtcatcagacatgtgggagatgccctgaaggaccacgccagcaagagccggggcaagatctgcaccatcggcatcgccccctggggcatcgtggagaaccaggaggacctgattggaagagatgtggtgcggccctaccagaccatgagcaaccccatgagcaagctgactgtgctgaacagcatgcacagccacttcatcctggccgacaatggcaccaccgggaagtacggggctgaggtgaagctgcggcggcagctggagaagcacatcagcctgcagaagatcaacaccagaattggccagggcgtgcctgtggtggccctgattgtggagggcggccccaacgtcatcagcatcgtgctggagtacctgcgggacaccccacctgtgcctgtggtggtgtgtgatggcagcggccgggccagtgacatcctggccttcggccacaagtacagcgaggagggcggcctcatcaatgaaagcctgcgggaccagctgctggtgaccatccagaagaccttcacctacaccaggacccaggcccagcacctgttcatcatcctgatggagtgcatgaagaagaaggagctgatcaccgtcttcaggatgggcagcgagggccaccaggacatcgacctggccatcctgacagccctgctgaagggggccaatgccagcgccccagaccagctgagcctggccctggcctggaacagagtggacatcgcccggagccagatcttcatctacggccagcagtggcctgtgggcagcctggagcaggccatgctggatgccctggtgctggacagagtggactttgtgaagctgctgattgaaaatggagtgtccatgcaccgcttcctgaccatcagccggctggaggagctgtacaacaccaggcatggccccagcaacaccctgtaccacctggtgagagatgtgaagaagcgggagtacccaggcttcggctggatctacttcaagggcaacctgcccccagactaccgcatcagcctgattgatattggcctggtgattgagtacctgatgggcggggcctaccgctgcaactacaccaggaagcgcttccgcaccctgtaccacaacctgtttggccccaagagagatgacatccccctgcggcggggcaggaagaccaccaagaagcgggaggaggaggtggacatcgacctggatgatcctgagatcaaccacttccccttccccttccacgagctgatggtgtgggccgtgctgatgaagaggcagaagatggccctcttcttctggcagcacggggaggaggccatggccaaggccctggtggcctgcaagctgtgcaaggccatggcccacgaggcctctgaaaatgacatggtggatgacatcagccaggagctgaaccacaacagccgggactttggccagctggccgtggagctgctggaccagagctacaagcaggatgagcagctggccatgaagctgctgacctatgagctgaagaactggagcaatgccacctgcctgcagctggccgtggccgccaagcaccgggacttcatcgcccacacctgcagccagatgctgctgacagacatgtggatgggccgcctgaggatgaggaagaacagcggcctgaaggtgatcctgggcatcctgctgcccccatccatcctgagcctggagttcaagaacaaggatgacatgccctacatgagccaggcccaggagatccacctgcaggagaaggaggccgaggagcctgagaagcccaccaaggagaaggaggaggaggacatggagctgacagccatgctgggcaggaacaacggggagagcagcaggaagaaggatgaggaggaggtgcagagcaagcacaggctcatccccctgggcaggaagatctatgagttctacaatgcccccatcgtgaagttctggttctacaccctggcctacatcggctacctgatgctgttcaactacatcgtgctggtgaagatggagcgctggcccagcacccaggagtggatcgtcatctcctacatcttcaccctgggcatcgagaagatgagggagatcctgatgtctgagcccgggaagctgctgcagaaggtgaaggtgtggctgcaggagtactggaatgtgacagacctgattgccatcctgctcttctctgtgggcatgatcctgcggctgcaggaccagcccttcagaagtgatggccgggtcatctactgtgtgaacatcatctactggtacatccggctgctggacatctttggagtgaacaagtacctgggcccctacgtgatgatgattggcaagatgatgattgacatgatgtacttcgtcatcatcatgctggtggtgctgatgagctttggagtggcccggcaggccatcctcttccccaatgaggagcccagctggaagctggccaagaacatcttctacatgccctactggatgatctacggggaggtgtttgctgaccagattgaccccccctgtggccagaatgagaccagagaagatggcaagatcatccagctgcccccctgcaagacaggagcctggatcgtgcctgccatcatggcctgctacctgctggtggccaacatcctgctggtgaacctgctgattgctgtgttcaacaacaccttctttgaggtgaagagcatcagcaaccaggtgtggaagttccagcgctaccagctgatcatgaccttccacgagaggcctgtgctgcccccacccctcatcatcttcagccacatgaccatgatcttccagcacctgtgctgccgctggaggaagcatgaaagtgaccctgatgagcgggactatggcctgaagctgttcatcacagatgatgagctgaagaaggtgcatgactttgaggagcagtgcatcgaggagtacttccgggagaaggatgaccgcttcaacagcagcaatgatgagcgcatccgggtgaccagcgagcgggtggagaacatgtccatgaggctggaggaggtgaatgaaagagagcacagcatgaaggccagcctgcagacagtggacatccggctggcccagctggaggacctgattggaaggatggccacagccctggagcggctgaccggcctggagagagctgagagcaacaagatccgcagcaggaccagcagtgactgcacagatgctgcctacatcgtgcggcagagcagcttcaacagccaggagggcaacaccttcaagctgcaggagagcattgatcctgctggggaggagaccatgagccccaccagccccaccctgatgcccaggatgaggagccacagcttctacagcgtgaacatgaaggacaagggcggcatcgagaagctggagagcatcttcaaggagaggagcctgagcctgcaccgggccaccagcagccacagcgtggccaaggagcccaaggccccagctgccccagccaacaccctggccatcgtgcctgacagcagaagacccagcagctgcatcgacatctacgtgtctgccatggatgagctgcactgtgacatcgaccccctggacaacagcgtgaacatcctgggcctgggggagcccagcttcagcacccctgtgcccagcacagcccccagcagcagcgcctatgccaccctggcccccacagacaggcctcccagccgcagcattgactttgaggacatcacctccatggacaccaggagcttcagcagtgactacacccacctgcctgagtgccagaacccctgggacagcgagccccccatgtaccacaccatcgagaggagcaagagcagccgctacctggccaccacccccttcctgctggaggaggcccccatcgtgaagagccacagcttcatgttcagccccagccgcagctactatgccaactttggagtgcctgtgaagacagctgagtacaccagcatcacagactgcatcgacacccgctgtgtgaatgccccccaggccatcgctgacagagctgccttccctgggggcctgggggacaaggtggaggacctgacctgctgccaccctgagcgggaggccgagctgagccaccccagcagtgacagcgaggagaatgaggccaagggccggcgggccaccatcgccatcagcagccaggagggggacaacagcgagaggaccctgagcaacaacatcaccgtgcccaagattgagcgggccaacagctacagcgctgaggagcccagcgccccctatgcccacaccaggaagagcttcagcatcagtgacaagctggaccggcagaggaacacagccagcctgaggaaccccttccagaggagcaagagcagcaagccagagggccgcggggacagcctgtccatgaggcggctgagcaggaccagcgccttccagagctttgagagcaagcacaactag

SEQ ID NO: 173819 - DNA, 4701 bp, synthetic construct
  misc_feature 1..4701: note = Description of Artificial Sequence: Synthetic coding sequence
  source 1..4701: mol_type = other DNA
atgtatgtgcgggtgtcctttgacaccaagccagacctgctgctgcacctgatgaccaaggagtggcagctggagctgcccaagctgctgatctctgtgcacggcggcctgcagaactttgagctgcagcccaagctgaagcaggtgtttgggaagggcctcatcaaggccgccatgaccactggagcctggatcttcaccggaggagtgaacacaggagtcatcagacatgtgggagatgccctgaaggaccacgccagcaagagccggggcaagatctgcaccatcggcatcgccccctggggcatcgtggagaaccaggaggacctgattggaagagatgtggtgcggccctaccagaccatgagcaaccccatgagcaagctgactgtgctgaacagcatgcacagccacttcatcctggccgacaatggcaccaccgggaagtacggggctgaggtgaagctgcggcggcagctggagaagcacatcagcctgcagaagatcaacaccagaattggccagggcgtgcctgtggtggccctgattgtggagggcggccccaacgtcatcagcatcgtgctggagtacctgcgggacaccccacctgtgcctgtggtggtgtgtgatggcagcggccgggccagtgacatcctggccttcggccacaagtacagcgaggagggcggcctcatcaatgaaagcctgcgggaccagctgctggtgaccatccagaagaccttcacctacaccaggacccaggcccagcacctgttcatcatcctgatggagtgcatgaagaagaaggagctgatcaccgtcttcaggatgggcagcgagggccaccaggacatcgacctggccatcctgacagccctgctgaagggggccaatgccagcgccccagaccagctgagcctggccctggcctggaacagagtggacatcgcccggagccagatcttcatctacggccagcagtggcctgtgggcagcctggagcaggccatgctggatgccctggtgctggacagagtggactttgtgaagctgctgattgaaaatggagtgtccatgcaccgcttcctgaccatcagccggctggaggagctgtacaacaccaggcatggccccagcaacaccctgtaccacctggtgagagatgtgaagaagggcaacctgcccccagactaccgcatcagcctgattgatattggcctggtgattgagtacctgatgggcggggcctaccgctgcaactacaccaggaagcgcttccgcaccctgtaccacaacctgtttggccccaagaggcccaaggccctgaagctgctgggcatggaggatgacatccccctgcggcggggcaggaagaccaccaagaagcgggaggaggaggtggacatcgacctggatgatcctgagatcaaccacttccccttccccttccacgagctgatggtgtgggccgtgctgatgaagaggcagaagatggccctcttcttctggcagcacggggaggaggccatggccaaggccctggtggcctgcaagctgtgcaaggccatggcccacgaggcctctgaaaatgacatggtggatgacatcagccaggagctgaaccacaacagccgggactttggccagctggccgtggagctgctggaccagagctacaagcaggatgagcagctggccatgaagctgctgacctatgagctgaagaactggagcaatgccacctgcctgcagctggccgtggccgccaagcaccgggacttcatcgcccacacctgcagccagatgctgctgacagacatgtggatgggccgcctgaggatgaggaagaacagcggcctgaaggtgatcctgggcatcctgctgcccccatccatcctgagcctggagttcaagaacaaggatgacatgccctacatgagccaggcccaggagatccacctgcaggagaaggaggccgaggagcctgagaagcccaccaaggagaaggaggaggaggacatggagctgacagccatgctgggcaggaacaacggggagagcagcaggaagaaggatgaggaggaggtgcagagcaagcacaggctcatccccctgggcaggaagatctatgagttctacaatgcccccatcgtgaagttctggttctacaccctggcctacatcggctacctgatgctgttcaactacatcgtgctggtgaagatggagcgctggcccagcacccaggagtggatcgtcatctcctacatcttcaccctgggcatcgagaagatgagggagatcctgatgtctgagcccgggaagctgctgcagaaggtgaaggtgtggctgcaggagtactggaatgtgacagacctgattgccatcctgctcttctctgtgggcatgatcctgcggctgcaggaccagcccttcagaagtgatggccgggtcatctactgtgtgaacatcatctactggtacatccggctgctggacatctttggagtgaacaagtacctgggcccctacgtgatgatgattggcaagatgatgattgacatgatgtacttcgtcatcatcatgctggtggtgctgatgagctttggagtggcccggcaggccatcctcttccccaatgaggagcccagctggaagctggccaagaacatcttctacatgccctactggatgatctacggggaggtgtttgctgaccagattgacaggaagcaggtgtatgacagccacacccccaagagcgccccctgtggccagaatgagaccagagaagatggcaagatcatccagctgcccccctgcaagacaggagcctggatcgtgcctgccatcatggcctgctacctgctggtggccaacatcctgctggtgaacctgctgattgctgtgttcaacaacaccttctttgaggtgaagagcatcagcaaccaggtgtggaagttccagcgctaccagctgatcatgaccttccacgagaggcctgtgctgcccccacccctcatcatcttcagccacatgaccatgatcttccagcacctgtgctgccgctggaggaagcatgaaagtgaccctgatgagcgggactatggcctgaagctgttcatcacagatgatgagctgaagaaggtgcatgactttgaggagcagtgcatcgaggagtacttccgggagaaggatgaccgcttcaacagcagcaatgatgagcgcatccgggtgaccagcgagcgggtggagaacatgtccatgaggctggaggaggtgaatgaaagagagcacagcatgaaggccagcctgcagacagtggacatccggctggcccagctggaggacctgattggaaggatggccacagccctggagcggctgaccggcctggagagagctgagagcaacaagatccgcagcaggaccagcagtgactgcacagatgctgcctacatcgtgcggcagagcagcttcaacagccaggagggcaacaccttcaagctgcaggagagcattgatcctgctggggaggagaccatgagccccaccagccccaccctgatgcccaggatgaggagccacagcttctacagcgtgaacatgaaggacaagggcggcatcgagaagctggagagcatcttcaaggagaggagcctgagcctgcaccgggccaccagcagccacagcgtggccaaggagcccaaggccccagctgccccagccaacaccctggccatcgtgcctgacagcagaagacccagcagctgcatcgacatctacgtgtctgccatggatgagctgcactgtgacatcgaccccctggacaacagcgtgaacatcctgggcctgggggagcccagcttcagcacccctgtgcccagcacagcccccagcagcagcgcctatgccaccctggcccccacagacaggcctcccagccgcagcattgactttgaggacatcacctccatggacaccaggagcttcagcagtgactacacccacctgcctgagtgccagaacccctgggacagcgagccccccatgtaccacaccatcgagaggagcaagagcagccgctacctggccaccacccccttcctgctggaggaggcccccatcgtgaagagccacagcttcatgttcagccccagccgcagctactatgccaactttggagtgcctgtgaagacagctgagtacaccagcatcacagactgcatcgacacccgctgtgtgaatgccccccaggccatcgctgacagagctgccttccctgggggcctgggggacaaggtggaggacctgacctgctgccaccctgagcgggaggccgagctgagccaccccagcagtgacagcgaggagaatgaggccaagggccggcgggccaccatcgccatcagcagccaggagggggacaacagcgagaggaccctgagcaacaacatcaccgtgcccaagattgagcgggccaacagctacagcgctgaggagcccagcgccccctatgcccacaccaggaagagcttcagcatcagtgacaagctggaccggcagaggaacacagccagcctgaggaaccccttccagaggagcaagagcagcaagccagagggccgcggggacagcctgtccatgaggcggctgagcaggaccagcgccttccagagctttgagagcaagcacaactag

SEQ ID NO: 173820 - DNA, 4740 bp, synthetic construct; identical to SEQ ID NO: 173815
  misc_feature 1..4740: note = Description of Artificial Sequence: Synthetic coding sequence
  source 1..4740: mol_type = other DNA

SEQ ID NO: 173821 - DNA, 4701 bp, synthetic construct; identical to SEQ ID NO: 173814
  misc_feature 1..4701: note = Description of Artificial Sequence: Synthetic coding sequence
  source 1..4701: mol_type = other DNA

SEQ ID NO: 173822 - DNA, 5205 bp, synthetic construct
  misc_feature 1..5205: note = Description of Artificial Sequence: Synthetic coding sequence
  source 1..5205: mol_type = other DNA
atgggcaagaagtggagagatgctgctgagatggagcggggctgcagcgacagagaagataatgctgagagcagaagaagaagccgcagcgccagccggggccgctttgctgagagctggaagaggctgagcagcaagcagggcagcaccaagaggagcggcctgcccagccagcagaccccagcccagaagtcctggattgagcgggccttctacaagagagaatgtgtgcacatcatccccagcaccaaggacccccaccgctgctgctgcggccgcctgattggccagcacgtgggcctgacccccagcatctctgtgctgcagaatgagaagaatgaaagccggctgagcagaaatgacatccagagcgagaagtggagcatcagcaagcacacccagctgagccccacagatgccttcggcaccatcgagttccagggcggcggccacagcaacaaggccatgtatgtgcgggtgtcctttgacaccaagccagacctgctgctgcacctgatgaccaaggagtggcagctggagctgcccaagctgctgatctctgtgcatggaggcctgcagaactttgagctgcagcccaagctgaagcaggtgtttgggaagggcctcatcaaggccgccatgaccaccggggcctggatcttcaccggcggcgtgaacacaggagtcatccgccacgtgggagatgccctgaaggaccacgccagcaagagccggggcaagatctgcaccatcggcatcgccccctggggcatcgtggagaaccaggaggacctgattggaagagatgtggtgcggccctaccagaccatgagcaaccccatgagcaagctgactgtgctgaacagcatgcacagccacttcatcctggccgacaatggcaccaccgggaagtatggagctgaggtgaagctgcggcggcagctggagaagcacatcagcctgcagaagatcaacacccgctgcctgcccttcttcagcctggacagccgcctcttctacagcttctggggcagctgccagctggacagcgtgggcatcggccagggcgtgcctgtggtggccctgattgtggagggcggccccaacgtcatcagcatcgtgctggagtacctgcgggacaccccacctgtgcctgtggtggtgtgtgatggcagcggccgggccagtgacatcctggccttcggccacaagtacagcgaggagggcggcctcatcaatgaaagcctgcgggaccagctgctggtgaccatccagaagaccttcacctacaccaggacccaggcccagcacctgttcatcatcctgatggagtgcatgaagaagaaggagctgatcaccgtcttcaggatgggcagcgagggccaccaggacatcgacctggccatcctgacagccctgctgaagggggccaatgccagcgccccagaccagctgagcctggccctggcctggaacagagtggacatcgcccggagccagatcttcatctacggccagcagtggcctgtgggcagcctggagcaggccatgctggatgccctggtgctggacagagtggactttgtgaagctgctgattgaaaatggagtgtccatgcaccgcttcctgaccatcagccggctggaggagctgtacaacaccaggcatggccccagcaacaccctgtaccacctggtgagagatgtgaagaagggcaacctgcccccagactaccgcatcagcctgattgatattggcctggtgattgagtacctgatgggcggggcctaccgctgcaactacaccaggaagcgcttccgcaccctgtaccacaacctgtttggccccaagaggcccaaggccctgaagctgctgggcatggaggatgacatccccctgcggcggggcaggaagaccaccaagaagcgggaggaggaggtggacatcgacctggatgatcctgagatcaaccacttccccttccccttccacgagctgatggtgtgggccgtgctgatgaagaggcagaagatggccctcttcttctggcagcacggggaggaggccatggccaaggccctggtggcctgcaagctgtgcaaggccatggcccacgaggcctctgaaaatgacatggtggatgacatcagccaggagctgaaccacaacagccgggactttggccagctggccgtggagctgctggaccagagctacaagcaggatgagcagctggccatgaagctgctgacctatgagctgaagaactggagcaatgccacctgcctgcagctggccgtggccgccaagcaccgggacttcatcgcccacacctgcagccagatgctgctgacagacatgtggatgggccgcctgaggatgaggaagaacagcggcctgaaggtgatcctgggcatcctgctgcccccatccatcctgagcctggagttcaagaacaaggatgacatgccctacatgagccaggcccaggagatccacctgcaggagaaggaggccgaggagcctgagaagcccaccaaggagaaggaggaggaggacatggagctgacagccatgctgggcaggaacaacggggagagcagcaggaagaaggatgaggaggaggtgcagagcaagcacaggctcatccccctgggcaggaagatctatgagttctacaatgcccccatcgtgaagttctggttctacaccctggcctacatcggctacctgatgctgttcaactacatcgtgctggtgaagatggagcgctggcccagcacccaggagtggatcgtcatctcctacatcttcaccctgggcatcgagaagatgagggagatcctgatgtctgagcccgggaagctgctgcagaaggtgaaggtgtggctgcaggagtactggaatgtgacagacctgattgccatcctgctcttctctgtgggcatgatcctgcggctgcaggaccagcccttcagaagtgatggccgggtcatctactgtgtgaacatcatctactggtacatccggctgctggacatctttggagtgaacaagtacctgggcccctacgtgatgatgattggcaagatgatgattgacatgatgtacttcgtcatcatcatgctggtggtgctgatgagctttggagtggcccggcaggccatcctcttccccaatgaggagcccagctggaagctggccaagaacatcttctacatgccctactggatgatctacggggaggtgtttgctgaccagattgaccccccctgtggccagaatgagaccagagaagatggcaagatcatccagctgcccccctgcaagacaggagcctggatcgtgcctgccatcatggcctgctacctgctggtggccaacatcctgctggtgaacctgctgattgctgtgttcaacaacaccttctttgaggtgaagagcatcagcaaccaggtgtggaagttccagcgctaccagctgatcatgaccttccacgagaggcctgtgctgcccccacccctcatcatcttcagccacatgaccatgatcttccagcacctgtgctgccgctggaggaagcatgaaagtgaccctgatgagcgggactatggcctgaagctgttcatcacagatgatgagctgaagaaggtgcatgactttgaggagcagtgcatcgaggagtacttccgggagaaggatgaccgcttcaacagcagcaatgatgagcgcatccgggtgaccagcgagcgggtggagaacatgtccatgaggctggaggaggtgaatgaaagagagcacagcatgaaggccagcctgcagacagtggacatccggctggcccagctggaggacctgattggaaggatggccacagccctggagcggctgaccggcctggagagagctgagagcaacaagatccgcagcaggaccagcagtgactgcacagatgctgcctacatcgtgcggcagagcagcttcaacagccaggagggcaacaccttcaagctgcaggagagcattgatcctgctggggaggagaccatgagccccaccagccccaccctgatgcccaggatgaggagccacagcttctacagcgtgaacatgaaggacaagggcggcatcgagaagctggagagcatcttcaaggagaggagcctgagcctgcaccgggccaccagcagccacagcgtggccaaggagcccaaggccccagctgccccagccaacaccctggccatcgtgcctgacagcagaagacccagcagctgcatcgacatctacgtgtctgccatggatgagctgcactgtgacatcgaccccctggacaacagcgtgaacatcctgggcctgggggagcccagcttcagcacccctgtgcccagcacagcccccagcagcagcgcctatgccaccctggcccccacagacaggcctcccagccgcagcattgactttgaggacatcacctccatggacaccaggagcttcagcagtgactacacccacctgcctgagtgccagaacccctgggacagcgagccccccatgtaccacaccatcgagaggagcaagagcagccgctacctggccaccacccccttcctgctggaggaggcccccatcgtgaagagccacagcttcatgttcagccccagccgcagctactatgccaactttggagtgcctgtgaagacagctgagtacaccagcatcacagactgcatcgacacccgctgtgtgaatgccccccaggccatcgctgacagagctgccttccctgggggcctgggggacaaggtggaggacctgacctgctgccaccctgagcgggaggccgagctgagccaccccagcagtgacagcgaggagaatgaggccaagggccggcgggccaccatcgccatcagcagccaggagggggacaacagcgagaggaccctgagcaacaacatcaccgtgcccaagattgagcgggccaacagctacagcgctgaggagcccagcgccccctatgcccacaccaggaagagcttcagcatcagtgacaagctggaccggcagaggaacacagccagcctgaggaaccccttccagaggagcaagagcagcaagccagagggccgcggggacagcctgtccatgaggcggctgagcaggaccagcgccttccagagctttgagagcaagcacaactag

SEQ ID NO: 173823 - DNA, 645 bp, synthetic construct
  misc_feature 1..645: note = Description of Artificial Sequence: Synthetic coding sequence
  source 1..645: mol_type = other DNA
atgtatgtgcgggtgtcctttgacaccaagccagacctgctgctgcacctgatgaccaaggagtggcagctggagctgcccaagctgctgatctctgtgcacggcggcctgcagaactttgagctgcagcccaagctgaagcaggtgtttgggaagggcctcatcaaggccgccatgaccactggagcctggatcttcaccggaggagtgaacacaggagtcatcagacatgtgggagatgccctgaaggaccacgccagcaagagccggggcaagatctgcaccatcggcatcgccccctggggcatcgtggagaaccaggaggacctgattggaagagatgtggtgcggccctaccagaccatgagcaaccccatgagcaagctgactgtgctgaacagcatgcacagccacttcatcctggccgacaatggcaccaccgggaagtacggggctgaggtgaagctgcggcggcagctggagaagcacatcagcctgcagaagatcaacaccagcttccacagctacaagacagcccacgtggacctgcaggacaagaggcaggtgaagacagccctggagcaggccgagtggcagcccggccggggcatgtttgaccatgacaacctgatgcagagcacctag

SEQ ID NO: 173824 - DNA, 3645 bp, synthetic construct
  misc_feature 1..3645: note = Description of Artificial Sequence: Synthetic coding sequence
  source 1..3645: mol_type = other DNA
atggtggtgcctgagaaggagcagagctggatccccaagatcttcaagaagaagacctgcaccaccttcatcgtggacagcacagaccccggcggcaccctgtgccagtgtggccggcccaggacagcccaccctgctgtggccatggaggatgcctttggagctgctgtggtgacagtgtgggacagtgatgcccacaccacagagaagcccacagatgcctatggagagctggacttcaccggggccggcaggaagcacagcaacttcctgcggctgagtgacagaacagatcctgctgctgtgtacagcctggtgaccaggacctggggcttccgggcccccaacctggtggtgtctgtgctgggcggcagcggcggccctgtgctgcagacctggctgcaggacctgctgcggcggggcctggtgcgggccgcccagagcactggagcctggatcgtgactggaggcctgcacacaggcatcggcagacatgtgggcgtggccgtgcgggaccaccagatggccagcactggaggcaccaaggtggtggccatgggcgtggccccctggggcgtggtgaggaacagagacaccctcatcaaccccaagggcagcttccctgcccgctaccgctggaggggggaccctgaagatggagtgcagttccccctggactacaactacagcgccttcttcctggtggatgatggcacccacggctgcctgggcggggagaaccgcttccggctgcggctggagagctacatcagccagcagaagacaggagtgggcggcactggaattgacatccctgtgctgctgctgctgattgatggagatgagaagatgctgaccagaattgaaaatgccacccaggcccagctgccctgcctgctggtggccggcagcggcggcgctgctgactgcctggccgagaccctggaggacaccctggcccctggcagcggcggggcccggcagggcgaggcccgggaccgcatccgccgcttcttccccaagggggacctggaggtgctgcaggcccaggtggagcgcatcatgaccaggaaggagctgctgactgtgtacagcagtgaagatggcagcgaggagtttgagaccatcgtgctgaaggccctggtgaaggcctgtggcagcagcgaggccagcgcctacctggatgagctgcggctggccgtggcctggaacagagtggacatcgcccagagcgagctgttccggggggacatccagtggaggagcttccacctggaggccagcctgatggatgccctgctgaatgacaggcctgagtttgtgcggctgctgatcagccacggcctgagcctgggccacttcctgacccccatgaggctggcccagctgtacagcgctgcccccagcaacagcctcatccggaacctgctggaccaggccagccacagcgctggcaccaaggccccagccctgaagggcggcgctgctgagctgcggcccccagatgtgggccacgtgctgaggatgctgctgggcaagatgtgtgccccccgctaccccagcggcggggcctgggacccccaccctggccagggctttggagagagcatgtacctgctgagtgacaaggccaccagccccctgagcctggatgctggcctgggccaggccccctggagcgacctgctgctgtgggccctgctgctgaacagagcccagatggccatgtacttctgggagatgggcagcaatgctgtgagcagcgccctgggcgcctgcctgctgctgcgggtgatggcccggctggagccagatgctgaggaggccgcccggaggaaggacctggccttcaagtttgagggcatgggcgtggacctgtttggagagtgctaccgcagcagcgaggtgcgggccgcccggctgctgctgcggcgctgccccctgtggggagatgccacctgcctgcagctggccatgcaggctgatgcccgggccttctttgcccaggatggagtgcagagcctgctgacccagaagtggtggggagacatggccagcaccacccccatctgggccctggtgctggccttcttctgccccccactcatctacaccaggctcatcaccttcaggaagtctgaggaggagcccacccgggaggagctggagtttgacatggacagcgtcatcaatggagagggccctgtgggcacagctgaccctgctgagaagacccccctgggcgtgccccggcagagcggccggcccggctgctgcggcggccgctgtggcggccgccgctgcctgcggcgctggttccacttctggggcgcccctgtgaccatcttcatgggaaatgtggtgtcctacctgctcttcctgctgctcttcagccgggtgctgctggtggacttccagcctgcccctcctggcagcctggagctgctgctgtacttctgggccttcaccctgctgtgtgaggagctgcggcagggcctgagcggcggcggcggcagcctggccagcggcggccctggccctggccacgccagcctgagccagaggctgcggctgtacctggccgacagctggaaccagtgtgacctggtggccctgacctgcttcctgctgggcgtgggctgccgcctgaccccaggcctgtaccacctgggccgcacagtgctgtgcatcgacttcatggtgttcaccgtgcggctgctgcacatcttcaccgtgaacaagcagctgggccccaagatcgtcatcgtgtccaagatgatgaaggatgtgttcttcttcctgttcttcctgggcgtgtggctggtggcctacggcgtggccacagagggcctgctgcggccccgggacagcgacttccccagcatcctgcggcgggtcttctaccggccctacctgcagatcttcggccagatcccccaggaggacatggatgtggccctgatggagcacagcaactgcagcagcgagcccggcttctgggcccaccccccaggggcccaggccggcacctgtgtgtcccagtatgccaactggctggtggtgctgctgctggtgatcttcctgctggtggccaacatcctgctggtgaacctgctgattgccatgttctcctacaccttcggcaaggtgcagggcaacagcgacctgtactggaaggcccagcgctaccgcctcatccgggagttccacagcaggcctgccctggccccacccttcatcgtcatcagccacctgcggctgctgctgcggcagctgtgccggcggcccaggagcccccagcccagcagccctgccctggagcacttccgggtgtacctgagcaaggaggccgagaggaagctgctgacctgggagagcgtgcacaaggagaacttcctgctggcccgggcccgggacaagcgggagagtgacagcgagcggctgaagaggaccagccagaaggtggacctggccctgaagcagctgggccacatccgggagtatgagcagaggctgaaggtgctggagcgggaggtgcagcagtgcagccgggtgctgggctgggtggccgaggccctgagccgcagcgccctgctgcccccaggcggccccccacctccagacctgcccggcagcaaggactag

SEQ ID NO: 173825 - DNA, 2583 bp, synthetic construct
  misc_feature 1..2583: note = Description of Artificial Sequence: Synthetic coding sequence
  source 1..2583: mol_type = other DNA
atgctgaccagaattgaaaatgccacccaggcccagctgccctgcctgctggtggccggcagcggcggcgctgctgactgcctggccgagaccctggaggacaccctggcccctggcagcggcggggcccggcagggcgaggcccgggaccgcatccgccgcttcttccccaagggggacctggaggtgctgcaggcccagagcttccacctggaggccagcctgatggatgccctgctgaatgacaggcctgagtttgtgcggctgctgatcagccacggcctgagcctgggccacttcctgacccccatgaggctggcccagctgtacagcgctgcccccagcaacagcctcatccggaacctgctggaccaggccagccacagcgctggcaccaaggccccagccctgaagggcggcgctgctgagctgcggcccccagatgtgggccacgtgctgaggatgctgctgggcaagatgtgtgccccccgctaccccagcggcggggcctgggacccccaccctggccagggctttggagagagcatgtacctgctgagtgacaaggccaccagccccctgagcctggatgctggcctgggccaggccccctggagcgacctgctgctgtgggccctgctgctgaacagagcccagatggccatgtacttctgggagatgggcagcaatgctgtgagcagcgccctgggcgcctgcctgctgctgcgggtgatggcccggctggagccagatgctgaggaggccgcccggaggaaggacctggccttcaagtttgagggcatgggcgtggacctgtttggagagtgctaccgcagcagcgaggtgcgggccgcccggctgctgctgcggcgctgccccctgtggggagatgccacctgcctgcagctggccatgcaggctgatgcccgggccttctttgcccaggatggagtgcagagcctgctgacccagaagtggtggggagacatggccagcaccacccccatctgggccctggtgctggccttcttctgccccccactcatctacaccaggctcatcaccttcaggaagtctgaggaggagcccacccgggaggagctggagtttgacatggacagcgtcatcaatggagagggccctgtgggcacagctgaccctgctgagaagacccccctgggcgtgccccggcagagcggccggcccggctgctgcggcggccgctgtggcggccgccgctgcctgcggcgctggttccacttctggggcgcccctgtgaccatcttcatgggaaatgtggtgtcctacctgctcttcctgctgctcttcagccgggtgctgctggtggacttccagcctgcccctcctggcagcctggagctgctgctgtacttctgggccttcaccctgctgtgtgaggagctgcggcagggcctgagcggcggcggcggcagcctggccagcggcggccctggccctggccacgccagcctgagccagaggctgcggctgtacctggccgacagctggaaccagtgtgacctggtggccctgacctgcttcctgctgggcgtgggctgccgcctgaccccaggcctgtaccacctgggccgcacagtgctgtgcatcgacttcatggtgttcaccgtgcggctgctgcacatcttcaccgtgaacaagcagctgggccccaagatcgtcatcgtgtccaagatgatgaaggatgtgttcttcttcctgttcttcctgggcgtgtggctggtggcctacggcgtggccacagagggcctgctgcggccccgggacagcgacttccccagcatcctgcggcgggtcttctaccggccctacctgcagatcttcggccagatcccccaggaggacatggatgtggccctgatggagcacagcaactgcagcagcgagcccggcttctgggcccaccccccaggggcccaggccggcacctgtgtgtcccagtatgccaactggctggtggtgctgctgctggtgatcttcctgctggtggccaacatcctgctggtgaacctgctgattgccatgttctcctacaccttcggcaaggtgcagggcaacagcgacctgtactggaaggcccagcgctaccgcctcatccgggagttccacagcaggcctgccctggccccacccttcatcgtcatcagccacctgcggctgctgctgcggcagctgtgccggcggcccaggagcccccagcccagcagccctgccctggagcacttccgggtgtacctgagcaaggaggccgagaggaagctgctgacctgggagagcgtgcacaaggagaacttcctgctggcccgggcccgggacaagcgggagagtgacagcgagcggctgaagaggaccagccagaaggtggacctggccctgaagcagctgggccacatccgggagtatgagcagaggctgaaggtgctggagcgggaggtgcagcagtgcagccgggtgctgggctgggtggccgaggccctgagccgcagcgccctgctgcccccaggcggccccccacctccagacctgcccggcagcaaggactag

SEQ ID NO: 173826 - DNA, 3210 bp, synthetic construct
  misc_feature 1..3210: note = Description of Artificial Sequence: Synthetic coding sequence
  source 1..3210: mol_type = other DNA
atggtggtgcctgagaaggagcagagctggatccccaagatcttcaagaagaagacctgcaccaccttcatcgtggacagcacagaccccggcggcaccctgtgccagtgtggccggcccaggacagcccaccctgctgtggccatggaggatgcctttggagctgctgtggtgacagtgtgggacagtgatgcccacaccacagagaagcccacagatgcctatggagagctggacttcaccggggccggcaggaagcacagcaacttcctgcggctgagtgacagaacagatcctgctgctgtgtacagcctggtgaccaggacctggggcttccgggcccccaacctggtggtgtctgtgctgggcggcagcggcggccctgtgctgcagacctggctgcaggacctgctgcggcggggcctggtgcgggccgcccagagcactggagcctggatcgtgactggaggcctgcacacaggcatcggcagacatgtgggcgtggccgtgcgggaccaccagatggccagcactggaggcaccaaggtggtggccatgggcgtggccccctggggcgtggtgaggaacagagacaccctcatcaaccccaagggcagcttccctgcccgctaccgctggaggggggaccctgaagatggagtgcagttccccctggactacaactacagcgccttcttcctggtggatgatggcacccacggctgcctgggcggggagaaccgcttccggctgcggctggagagctacatcagccagcagaagacaggagtgggcggcactggaattgacatccctgtgctgctgctgctgattgatggagatgagaagatgctgaccagaattgaaaatgccacccaggcccagctgccctgcctgctggtggccggcagcggcggcgctgctgactgcctggccgagaccctggaggacaccctggcccctggcagcggcggggcccggcagggcgaggcccgggaccgcatccgccgcttcttccccaagggggacctggaggtgctgcaggcccaggtggagcgcatcatgaccaggaaggagctgctgactgtgtacagcagtgaagatggcagcgaggagtttgagaccatcgtgctgaaggccctggtgaaggcctgtggcagcagcgaggccagcgcctacctggatgagctgcggctggccgtggcctggaacagagtggacatcgcccagagcgagctgttccggggggacatccagtggaggagcttccacctggaggccagcctgatggatgccctgctgaatgacaggcctgagtttgtgcggctgctgatcagccacggcctgagcctgggccacttcctgacccccatgaggctggcccagctgtacagcgctgcccccagcaacagcctcatccggaacctgctggaccaggccagccacagcgctggcaccaaggccccagccctgaagggcggcgctgctgagctgcggcccccagatgtgggccacgtgctgaggatgctgctgggcaagatgtgtgccccccgctaccccagcggcggggcctgggacccccaccctggccagggctttggagagagcatgtacctgctgagtgacaaggccaccagccccctgagcctggatgctggcctgggccaggccccctggagcgacctgctgctgtgggccctgctgctgaacagagcccagatggccatgtacttctgggagatgggcagcaatgctgtgagcagcgccctgggcgcctgcctgctgctgcgggtgatggcccggctggagccagatgctgaggaggccgcccggaggaaggacctggccttcaagtttgagggcatgggcgtggacctgtttggagagtgctaccgcagcagcgaggtgcgggccgcccggctgctgctgcggcgctgccccctgtggggagatgccacctgcctgcagctggccatgcaggctgatgcccgggccttctttgcccaggatggagtgcagagcctgctgacccagaagtggtggggagacatggccagcaccacccccatctgggccctggtgctggccttcttctgccccccactcatctacaccaggctcatcaccttcaggaagtctgaggaggagcccacccgggaggagctggagtttgacatggacagcgtcatcaatggagagggccctgtgggcctgaccccaggcctgtaccacctgggccgcacagtgctgtgcatcgacttcatggtgttcaccgtgcggctgctgcacatcttcaccgtgaacaagcagctgggccccaagatcgtgattgtgtccaagatgatgaaggatgtgttcttcttcctgttcttcctgggcgtgtggctggtggcctatggagtggccacagagggcctgctgcggccccgggacagcgacttccccagcatcctgcggcgggtcttctaccggccctacctgcagatcttcggccagatcccccaggaggacatggatgtggccctgatggagcacagcaactgcagcagcgagcccggcttctgggcccaccccccaggggcccaggccggcacctgtgtgtcccagtatgccaactggctggtggtgctgctgctggtgatcttcctgctggtggccaacatcctgctggtgaacctgctgattgccatgttctcctacaccttcggcaaggtgcagggcaacagcgacctgtactggaaggcccagcgctaccgcctcatccgggagttccacagcaggcctgccctggccccacccttcatcgtcatcagccacctgcggctgctgctgcggcagctgtgcagaagacccaggagcccccagcccagcagccctgccctggagcacttccgggtgtacctgagcaaggaggccgagaggaagctgctgacctgggagagcgtgcacaaggagaacttcctgctggcccgggcccgggacaagcgggagagtgacagcgagcggctgaagaggaccagccagaaggtggacctggccctgaagcagctgggccacatccgggagtatgagcagaggctgaaggtgctggagcgggaggtgcagcagtgcagccgggtgctgggctgggtggccgaggccctgagccgcagcgccctgctgcccccaggcggccccccacctccagacctgcccggcagcaaggactag

SEQ ID NO: 173827 - DNA, 3498 bp, synthetic construct
  misc_feature 1..3498: note = Description of Artificial Sequence: Synthetic coding sequence
  source 1..3498: mol_type = other DNA
atgcaggatgtgcagggccccaggcctggcagccctggagatgctgaggaccggcgggagctgggcctgcacagaggagaggtgaactttggaggcagcggcaagaagaggggcaagtttgtgcgggtgcccagcggcgtggcccccagcgtgctgtttgacctgctgctggccgagtggcacctgcctgcccccaacctggtggtgtccctggtgggggaggagcagccctttgccatgaagtcctggctgagagatgtgctgaggaagggcctggtgaaggccgcccagagcactggagcctggatcctgaccagcgccctgcgggtgggcctggcccggcacgtgggccaggccgtgcgggaccacagcctggccagcaccagcaccaaggtgcgggtggtggccgtgggcatggccagcctgggccgggtgctgcaccggcgcatcctggaggaggcccaggaggacttccctgtgcactacccagaagatgatggcggcagccagggccccctgtgcagcctggacagcaacctgagccacttcatcctggtggagcccggccccccaggaaaaggagatggcctgacagagctgcggctgcggctggagaagcacatcagcgagcagagagctggctatggaggcaccggcagcattgagatccctgtgctgtgcctgctggtgaatggagaccccaacaccctggagcgcatcagcagagctgtggagcaggccgccccctggctgatcctggtgggcagcggcggcattgctgatgtgctggccgccctggtgaaccagccccacctgctggtgcccaaggtggccgagaagcagttcaaggagaagttccccagcaagcacttctcctgggaggacatcgtgcgctggaccaagctgctgcagaacatcaccagccaccagcacctgctgactgtgtatgactttgagcaggagggcagcgaggagctggacaccgtcatcctgaaggccctggtgaaggcctgcaagagccacagccaggagccccaggactacctggatgagctgaagctggccgtggcctgggacagagtggacatcgccaagtctgagatcttcaatggagatgtggagtggaagagctgtgacctggaggaggtgatggtggatgccctggtgagcaacaagccagagtttgtgcggctgtttgtggacaacggggctgatgtggccgacttcctgacctacggccgcctgcaggagctgtacagatctgtgtccaggaagagcctgctgtttgacctgctgcagaggaagcaggaggaggcccggctgaccctggccggcctgggcacccagcaggcccgggagcccccagctggccccccagccttcagcctgcacgaggtgtcccgggtgctgaaggacttcctgcaggatgcctgccggggcttctaccaggacggccggcctggggacagaagaagagctgagaagggccctgccaagaggcccaccggccagaagtggctgctggacctgaaccagaagtctgagaacccctggagggacctcttcctgtgggccgtgctgcagaacagacatgagatggccacctacttctgggccatgggccaggagggcgtggccgccgccctggccgcctgcaagatcctgaaggagatgagccacctggagacagaagctgaggccgcccgggccacccgggaggccaagtatgaaaggctggccctggacctcttcagcgagtgctacagcaacagcgaggcccgggcctttgccctgctggtgagaagaaaccgctgctggagcaagaccacctgcctgcacctggccacagaagcagatgccaaggccttctttgcccatgatggagtgcaggccttcctgacccgcatctggtggggagacatggctgctggcacccccatcctgcggctgctgggcgccttcctgtgcccagccctggtgtacaccaacctgatcaccttcagcgaggaggcccccctgaggacaggcctggaggacctgcaggacctggacagcctggacacagagaagagccccctgtatggcctgcagagccgggtggaggagctggtggaggccccccgggcccagggcgaccggggccccagggctgtgttcctgctgacccgctggaggaagttctggggcgcccctgtgacagtgttcctgggcaatgtggtgatgtactttgccttcctgttcctgttcacctacgtgctgctggtggacttccggcccccaccccagggccccagcggccctgaggtgaccctgtacttctgggtgttcaccctggtgctggaggagatccggcagggcttcttcacagatgaggacacccacctggtgaagaagttcaccctgtatgtgggggacaactggaacaagtgtgacatggtggccatcttcctgttcatcgtgggcgtgacctgcaggatgctgcccagcgcctttgaagctggccgcacagtgctggccatggacttcatggtgttcaccctgcggctcatccacatctttgccatccacaagcagctgggccccaagatcatcgtggtggagaggatgatgaaggatgtgttcttcttcctgttcttcctgtctgtgtggctggtggcctatggagtgaccacccaggccctgctgcacccccatgatggccgcctggagtggatcttcagaagagtgctgtaccggccctacctgcagatcttcggccagatccccctggatgaaattgatgaggcccgggtgaactgcagcacccaccccctgctgctggaggacagccccagctgccccagcctgtatgccaactggctggtgatcctgctgctggtgaccttcctgctggtgaccaacgtgctgctgatgaacctgctgattgccatgttctcctacaccttccaggtggtgcagggcaatgctgacatgttctggaagttccagcgctacaacctgattgtggagtaccacgagaggcctgccctggccccacccttcatcctgctgagccacctgagcctgaccctgcggcgggtcttcaagaaggaggccgagcacaagcgggagcacctggagcgggacctgcctgaccccctggaccagaaggtggtgacctgggagaccgtgcagaaggagaacttcctgagcaagatggagaagagaagaagagattctgagggggaggtgctgaggaagacagcccaccgggtggacttcatcgccaagtacctgggcggcctgcgggagcaggagaagaggatcaagtgcctggagagccagatcaactactgcagcgtgctggtgtcctctgtggctgatgtgctggcccagggcggcggccccaggagcagccagcactgtggggagggcagccagctggtggccgctgaccaccggggcggcctggatggctgggagcagcccggggccggccagcccccaagtgacacctag

SEQ ID NO: 173828 - DNA, 2619 bp, synthetic construct
  misc_feature 1..2619: note = Description of Artificial Sequence: Synthetic coding sequence
  source 1..2619: mol_type = other DNA
atgcaggatgtgcagggccccaggcctggcagccctggagatgctgaggaccggcgggagctgggcctgcacagaggagaggtgaactttggaggcagcggcaagaagaggggcaagtttgtgcgggtgcccagcggcgtggcccccagcgtgctgtttgacctgctgctggccgagtggcacctgcctgcccccaacctggtggtgtccctggtgggggaggagcagccctttgccatgaagtcctggctgagagatgtgctgaggaagggcctggtgaaggccgcccagagcactggagcctggatcctgaccagcgccctgcgggtgggcctggcccggcacgtgggccaggccgtgcgggaccacagcctggccagcaccagcaccaaggtgcgggtggtggccgtgggcatggccagcctgggccgggtgctgcaccggcgcatcctggaggaggcccaggaggacttccctgtgcactacccagaagatgatggcggcagccagggccccctgtgcagcctggacagcaacctgagccacttcatcctggtggagcccggccccccaggaaaaggagatggcctgacagagctgcggctgcggctggagaagcacatcagcgagcagagagctggctatggaggcaccggcagcattgagatccctgtgctgtgcctgctggtgaatggagaccccaacaccctggagcgcatcagcagagctgtggagcaggccgccccctggctgatcctggtgggcagcggcggcattgctgatgtgctggccgccctggtgaaccagccccacctgctggtgcccaaggtggccgagaagcagttcaaggagaagttccccagcaagcacttctcctgggaggacatcgtgcgctggaccaagctgctgcagaacatcaccagccaccagcacctgctgactgtgtatgactttgagcaggagggcagcgaggagctggacaccgtcatcctgaaggccctggtgaaggcctgcaagagccacagccaggagccccaggactacctggatgagctgaagctggccgtggcctgggacagagtggacatcgccaagtctgagatcttcaatggagatgtggagtggaagagctgtgacctggaggaggtgatggtggatgccctggtgagcaacaagccagagtttgtgcggctgtttgtggacaacggggctgatgtggccgacttcctgacctacggccgcctgcaggagctgtacagatctgtgtccaggaagagcctgctgtttgacctgctgcagaggaagcaggaggaggcccggctgaccctggccggcctgggcacccagcaggcccgggagcccccagctggccccccagccttcagcctgcacgaggtgtcccgggtgctgaaggacttcctgcaggatgcctgccggggcttctaccaggacggccggcctggggacagaagaagagctgagaagggccctgccaagaggcccaccggccagaagtggctgctggacctgaaccagaagtctgagaacccctggagggacctcttcctgtgggccgtgctgcagaacagacatgagatggccacctacttctgggccatgggccaggagggcgtggccgccgccctggccgcctgcaagatcctgaaggagatgagccacctggagacagaagctgaggccgcccgggccacccgggaggccaagtatgaaaggctggccctggacctcttcagcgagtgctacagcaacagcgaggcccgggcctttgccctgctggtgagaagaaaccgctgctggagcaagaccacctgcctgcacctggccacagaagcagatgccaaggccttctttgcccatgatggagtgcaggccttcctgacccgcatctggtggggagacatggctgctggcacccccatcctgcggctgctgggcgccttcctgtgcccagccctggtgtacaccaacctgatcaccttcagcgaggaggcccccctgaggacaggcctggaggacctgcaggacctggacagcctggacacagagaagagccccctgtatggcctgcagagccgggtggaggagctggtggaggccccccgggcccagggcgaccggggccccagggctgtgttcctgctgacccgctggaggaagttctggggcgcccctgtgacagtgttcctgggcaatgtggtgatgtactttgccttcctgttcctgttcacctacgtgctgctggtggacttccggcccccaccccagggccccagcggccctgaggtgaccctgtacttctgggtgttcaccctggtgctggaggagatccggcagggcttcttcacagatgaggacacccacctggtgaagaagttcaccctgtatgtgggggacaactggaacaagtgtgacatggtggccatcttcctgttcatcgtgggcgtgacctgcaggatgctgcccagcgcctttgaagctggccgcacagtgctggccatggacttcatggtgttcaccctgcggctcatccacatctttgccatccacaagcagctgggccccaagatcatcgtggtggagaggatgaagcctgtgtag

SEQ ID NO: 173829 - DNA, 3504 bp, synthetic construct
  misc_feature 1..3504: note = Description of Artificial Sequence: Synthetic coding sequence
  source 1..3504: mol_type = other DNA
atgcaggatgtgcagggccccaggcctggcagccctggagatgctgaggaccggcgggagctgggcctgcacagaggagaggtgaactttggaggcagcggcaagaagaggggcaagtttgtgcgggtgcccagcggcgtggcccccagcgtgctgtttgacctgctgctggccgagtggcacctgcctgcccccaacctggtggtgtccctggtgggggaggagcagccctttgccatgaagtcctggctgagagatgtgctgaggaagggcctggtgaaggccgcccagagcactggagcctggatcctgaccagcgccctgcgggtgggcctggcccggcacgtgggccaggccgtgcgggaccacagcctggccagcaccagcaccaaggtgcgggtggtggccgtgggcatggccagcctgggccgggtgctgcaccggcgcatcctggaggaggcccaggtgcatgaggacttccctgtgcactacccagaagatgatggcggcagccagggccccctgtgcagcctggacagcaacctgagccacttcatcctggtggagcccggccccccaggaaaaggagatggcctgacagagctgcggctgcggctggagaagcacatcagcgagcagagagctggctatggaggcaccggcagcattgagatccctgtgctgtgcctgctggtgaatggagaccccaacaccctggagcgcatcagcagagctgtggagcaggccgccccctggctgatcctggtgggcagcggcggcattgctgatgtgctggccgccctggtgaaccagccccacctgctggtgcccaaggtggccgagaagcagttcaaggagaagttccccagcaagcacttctcctgggaggacatcgtgcgctggaccaagctgctgcagaacatcaccagccaccagcacctgctgactgtgtatgactttgagcaggagggcagcgaggagctggacaccgtcatcctgaaggccctggtgaaggcctgcaagagccacagccaggagccccaggactacctggatgagctgaagctggccgtggcctgggacagagtggacatcgccaagtctgagatcttcaatggagatgtggagtggaagagctgtgacctggaggaggtgatggtggatgccctggtgagcaacaagccagagtttgtgcggctgtttgtggacaacggggctgatgtggccgacttcctgacctacggccgcctgcaggagctgtacagatctgtgtccaggaagagcctgctgtttgacctgctgcagaggaagcaggaggaggcccggctgaccctggccggcctgggcacccagcaggcccgggagcccccagctggccccccagccttcagcctgcacgaggtgtcccgggtgctgaaggacttcctgcaggatgcctgccggggcttctaccaggacggccggcctggggacagaagaagagctgagaagggccctgccaagaggcccaccggccagaagtggctgctggacctgaaccagaagtctgagaacccctggagggacctcttcctgtgggccgtgctgcagaacagacatgagatggccacctacttctgggccatgggccaggagggcgtggccgccgccctggccgcctgcaagatcctgaaggagatgagccacctggagacagaagctgaggccgcccgggccacccgggaggccaagtatgaaaggctggccctggacctcttcagcgagtgctacagcaacagcgaggcccgggcctttgccctgctggtgagaagaaaccgctgctggagcaagaccacctgcctgcacctggccacagaagcagatgccaaggccttctttgcccatgatggagtgcaggccttcctgacccgcatctggtggggagacatggctgctggcacccccatcctgcggctgctgggcgccttcctgtgcccagccctggtgtacaccaacctgatcaccttcagcgaggaggcccccctgaggacaggcctggaggacctgcaggacctggacagcctggacacagagaagagccccctgtatggcctgcagagccgggtggaggagctggtggaggccccccgggcccagggcgaccggggccccagggctgtgttcctgctgacccgctggaggaagttctggggcgcccctgtgacagtgttcctgggcaatgtggtgatgtactttgccttcctgttcctgttcacctacgtgctgctggtggacttccggcccccaccccagggccccagcggccctgaggtgaccctgtacttctgggtgttcaccctggtgctggaggagatccggcagggcttcttcacagatgaggacacccacctggtgaagaagttcaccctgtatgtgggggacaactggaacaagtgtgacatggtggccatcttcctgttcatcgtgggcgtgacctgcaggatgctgcccagcgcctttgaagctggccgcacagtgctggccatggacttcatggtgttcaccctgcggctcatccacatctttgccatccacaagcagctgggccccaagatcatcgtggtggagaggatgatgaaggatgtgttcttcttcctgttcttcctgtctgtgtggctggtggcctatggagtgaccacccaggccctgctgcacccccatgatggccgcctggagtggatcttcagaagagtgctgtaccggccctacctgcagatcttcggccagatccccctggatgaaattgatgaggcccgggtgaactgcagcacccaccccctgctgctggaggacagccccagctgccccagcctgtatgccaactggctggtgatcctgctgctggtgaccttcctgctggtgaccaacgtgctgctgatgaacctgctgattgccatgttctcctacaccttccaggtggtgcagggcaatgctgacatgttctggaagttccagcgctacaacctgattgtggagtaccacgagaggcctgccctggccccacccttcatcctgctgagccacctgagcctgaccctgcggcgggtcttcaagaaggaggccgagcacaagcgggagcacctggagcgggacctgcctgaccccctggaccagaaggtggtgacctgggagaccgtgcagaaggagaacttcctgagcaagatggagaagagaagaagagattctgagggggaggtgctgaggaagacagcccaccgggtggacttcatcgccaagtacctgggcggcctgcgggagcaggagaagaggatcaagtgcctggagagccagatcaactactgcagcgtgctggtgtcctctgtggctgatgtgctggcccagggcggcggccccaggagcagccagcactgtggggagggcagccagctggtggccgctgaccaccggggcggcctggatggctgggagcagcccggggccggccagcccccaagtgacacctag

SEQ ID NO: 173830 - DNA, 3480 bp, synthetic construct
  misc_feature 1..3480: note = Description of Artificial Sequence: Synthetic coding sequence
  source 1..3480: mol_type = other DNA
cctggcagccctggagatgctgaggaccggcgggagctgggcctgcacagaggagaggtgaactttggaggcagcggcaagaagaggggcaagtttgtgcgggtgcccagcggcgtggcccccagcgtgctgtttgacctgctgctggccgagtggcacctgcctgcccccaacctggtggtgtccctggtgggggaggagcagccctttgccatgaagtcctggctgagagatgtgctgaggaagggcctggtgaaggccgcccagagcactggagcctggatcctgaccagcgccctgcgggtgggcctggcccggcacgtgggccaggccgtgcgggaccacagcctggccagcaccagcaccaaggtgcgggtggtggccgtgggcatggccagcctgggccgggtgctgcaccggcgcatcctggaggaggcccaggtgcatgaggacttccctgtgcactacccagaagatgatggcggcagccagggccccctgtgcagcctggacagcaacctgagccacttcatcctggtggagcccggccccccaggaaaaggagatggcctgacagagctgcggctgcggctggagaagcacatcagcgagcagagagctggctatggaggcaccggcagcattgagatccctgtgctgtgcctgctggtgaatggagaccccaacaccctggagcgcatcagcagagctgtggagcaggccgccccctggctgatcctggtgggcagcggcggcattgctgatgtgctggccgccctggtgaaccagccccacctgctggtgcccaaggtggccgagaagcagttcaaggagaagttccccagcaagcacttctcctgggaggacatcgtgcgctggaccaagctgctgcagaacatcaccagccaccagcacctgctgactgtgtatgactttgagcaggagggcagcgaggagctggacaccgtcatcctgaaggccctggtgaaggcctgcaagagccacagccaggagccccaggactacctggatgagctgaagctggccgtggcctgggacagagtggacatcgccaagtctgagatcttcaatggagatgtggagtggaagagctgtgacctggaggaggtgatggtggatgccctggtgagcaacaagccagagtttgtgcggctgtttgtggacaacggggctgatgtggccgacttcctgacctacggccgcctgcaggagctgtacagatctgtgtccaggaagagcctgctgtttgacctgctgcagaggaagcaggaggaggcccggctgaccctggccggcctgggcacccagcaggcccgggagcccccagctggccccccagccttcagcctgcacgaggtgtcccgggtgctgaaggacttcctgcaggatgcctgccggggcttctaccaggacggccggcctggggacagaagaagagctgagaagggccctgccaagaggcccaccggccagaagtggctgctggacctgaaccagaagtctgagaacccctggagggacctcttcctgtgggccgtgctgcagaacagacatgagatggccacctacttctgggccatgggccaggagggcgtggccgccgccctggccgcctgcaagatcctgaaggagatgagccacctggagacagaagctgaggccgcccgggccacccgggaggccaagtatgaaaggctggccctggacctcttcagcgagtgctacagcaacagcgaggcccgggcctttgccctgctggtgagaagaaaccgctgctggagcaagaccacctgcctgcacctggccacagaagcagatgccaaggccttctttgcccatgatggagtgcaggccttcctgacccgcatctggtggggagacatggctgctggcacccccatcctgcggctgctgggcgccttcctgtgcccagccctggtgtacaccaacctgatcaccttcagcgaggaggcccccctgaggacaggcctggaggacctgcaggacctggacagcctggacacagagaagagccccctgtatggcctgcagagccgggtggaggagctggtggaggccccccgggcccagggcgaccggggccccagggctgtgttcctgctgacccgctggaggaagttctggggcgcccctgtgacagtgttcctgggcaatgtggtgatgtactttgccttcctgttcctgttcacctacgtgctgctggtggacttccggcccccaccccagggccccagcggccctgaggtgaccctgtacttctgggtgttcaccctggtgctggaggagatccggcagggcttcttcacagatgaggacacccacctggtgaagaagttcaccctgtatgtgggggacaactggaacaagtgtgacatggtggccatcttcctgttcatcgtgggcgtgacctgcaggatgctgcccagcgcctttgaagctggccgcacagtgctggccatggacttcatggtgttcaccctgcggctcatccacatctttgccatccacaagcagctgggccccaagatcatcgtggtggagaggatgatgaaggatgtgttcttcttcctgttcttcctgtctgtgtggctggtggcctatggagtgaccacccaggccctgctgcacccccatgatggccgcctggagtggatcttcagaagagtgctgtaccggccctacctgcagatcttcggccagatccccctggatgaaattgatgaggcccgggtgaactgcagcacccaccccctgctgctggaggacagccccagctgccccagcctgtatgccaactggctggtgatcctgctgctggtgaccttcctgctggtgaccaacgtgctgctgatgaacctgctgattgccatgttctcctacaccttccaggtggtgcagggcaatgctgacatgttctggaagttccagcgctacaacctgattgtggagtaccacgagaggcctgccctggccccacccttcatcctgctgagccacctgagcctgaccctgcggcgggtcttcaagaaggaggccgagcacaagcgggagcacctggagcgggacctgcctgaccccctggaccagaaggtggtgacctgggagaccgtgcagaaggagaacttcctgagcaagatggagaagagaagaagagattctgagggggaggtgctgaggaagacagcccaccgggtggacttcatcgccaagtacctgggcggcctgcgggagcaggagaagaggatcaagtgcctggagagccagatcaactactgcagcgtgctggtgtcctctgtggctgatgtgctggcccagggcggcggccccaggagcagccagcactgtggggagggcagccagctggtggccgctgaccaccggggcggcctggatggctgggagcagcccggggccggccagcccccaagtgacacctag

SEQ ID NO: 173831 - DNA, 3402 bp, synthetic construct
  misc_feature 1..3402: note = Description of Artificial Sequence: Synthetic coding sequence
  source 1..3402: mol_type = other DNA
atgctgcggccccaggtgaaggaggagatcatctgcatgatccagaacaccttcaacttcagcctgaagcagagcaagcacctgttccagatcctgatggagtgcatggtgcaccgggactgcatcaccatctttgatgctgacagcgaggagcagcaggacctggacctggccatcctgacagccctgctgaagggcaccaacctgagcgccagcgagcagctgaacctggccatggcctgggacagagtggacatcgccaagaagcacatcctgatctatgagcagcactggaagccagatgccctggagcaggccatgtctgatgccctggtgatggacagagtggactttgtgaagctgctgattgaatatggagtgaacctgcaccgcttcctgaccatcccccggctggaggagctgtacaacaccaagcagggccccaccaacaccctgctgcaccacctggtgcaggatgtgaagcagcacaccctgctgagcggctaccgcatcaccctgattgacatcggcctggtggtggagtacctgattggccgggcctaccgcagcaactacaccaggaagcacttccgggccctgtacaacaacctgtacaggaagtacaagcaccagaggcacagcagcggcaacagaaatgaatctgctgagagcaccctgcacagccagttcatcagaacagcccagccctacaagttcaaggagaagagcatcgtgctgcacaagagcaggaagaagagcaaggagcagaatgtgtctgatgatcctgagagcacaggcttcctgtacccctacaatgacctgctggtgtgggccgtgctgatgaagaggcagaagatggccatgttcttctggcagcacggggaggaggccaccgtgaaggctgtgattgcctgcatcctgtaccgggccatggcccacgaggccaaggagagccacatggtggatgatgccagcgaggagctgaagaactacagcaagcagtttggccagctggccctggacctgctggagaaggccttcaagcagaatgaaagaatggccatgaccctgctgacctatgagctgaggaactggagcaacagcacctgcctgaagctggccgtgtctgggggcctgcggccctttgtgagccacacctgcacccagatgctgctgacagacatgtggatgggccgcctgaagatgaggaagaacagctggctgaagatcatcatcagcatcatcctgccccccaccatcctgaccctggagttcaagagcaaggccgagatgagccacgtgccccagagccaggacttccagttcatgtggtactacagcgaccagaatgccagcagcagcaaggagagcgcctctgtgaaggagtatgacctggagcggggccatgatgagaagctggatgagaaccagcacttcggcctggagagcggccaccagcacctgccctggaccaggaaggtgtatgagttctacagcgcccccatcgtgaagttctggttctacaccatggcctacctggccttcctgatgctgttcacctacacagtgctggtggagatgcagccccagcccagcgtgcaggagtggctggtgtccatctacatcttcaccaatgccatcgaggtggtgcgggagatctgcatcagcgagcccgggaagttcacccagaaggtgaaggtgtggatcagcgagtactggaacctgacagagaccgtggccatcggcctcttctctgctggctttgtgctgcgctggggagacccccccttccacacagctggccgcctcatctactgcatcgacatcatcttctggttcagccggctgctggacttctttgctgtgaaccagcacgccggcccctacgtgaccatgattgccaagatgacagccaacatgttctacatcgtcatcatcatggccatcgtgctgctgagctttggagtggccaggaaggccatcctgagccccaaggagcccccatcctggagcctggcccgggacatcgtgtttgagccctactggatgatctatggagaggtgtatgctggggagattgatgtgtgcagcagccagcccagctgccccccaggcagcttcctgacccccttcctgcaggccgtgtacctgtttgtgcagtacatcatcatggtgaacctgctgattgccttcttcaacaacgtgtacctggacatggagagcatcagcaacaacctgtggaagtacaaccgctaccgctacatcatgacctaccacgagaagccctggctgcccccacccctcatcctgctgagccacgtgggcctgctgctgcggcggctgtgctgccaccgggcccctcatgaccaggaggagggagatgtgggcctgaagctgtacctgagcaaggaggacctgaagaagctgcatgactttgaggagcagtgtgtggagaagtacttccacgagaagatggaggatgtgaactgcagctgtgaggagcgcatccgggtgaccagcgagcgggtgacagagatgtacttccagctgaaggagatgaatgagaaggtgtccttcatcaaggacagcctgctgagcctggacagccaggtgggccacctgcaggacctgagcgccctgactgtggacaccctgaaggtgctgtctgctgtggacaccctgcaggaggatgaggccctgctggccaagaggaagcacagcacctgcaagaagctgccccacagctggagcaatgtcatctgtgccgaggtgctgggctccatggagattgctggggagaagaagtaccagtactacagcatgcccagcagcctgctgcggagcctggccggcggccgccaccccccccgggtgcagagaggagccctgctggagatcaccaacagcaagcgggaggccaccaacgtgagaaatgaccaggagcggcaggagacccagagcagcatcgtggtgtctggagtgagccccaaccggcaggcccacagcaaatatggccagttcctgctggtgcccagcaacctgaagagggtgcccttctctgctgagaccgtgctgcccctgagccggcccagcgtgcctgatgtgctggccacagagcaggacatccagacagaggtgctggtgcacctgaccggccagacccctgtggtgtctgactgggcctctgtggatgagcccaaggagaagcatgagcccatcgcccacctgctggatggccaggacaaggccgagcaggtgctgcccaccctgagctgcaccccagagcccatgaccatgagcagccccctgcggcgctaccggccctttgcccggagccacagcttccgcttccacaaggaggagaagctgatgaagatctgcaagatcaagagcaaggagtag

SEQ ID NO: 173832 - DNA, 912 bp, synthetic construct
  misc_feature 1..912: note = Description of Artificial Sequence: Synthetic coding sequence
  source 1..912: mol_type = other DNA
atgaaggagcagcctgtgctggagcggctgcagagccagaagtcctggatcaagggcgtgtttgacaagagagaatgttccaccatcatccccagcagcaagaacccccaccgctgcacccctgtgtgccaggtgtgccagaacctgatccgctgctactgcggccgcctcatcggggaccacgccggcatcgactacagctggaccatctctgctgccaagggcaaggagagcgagcagtggagcgtggagaagcacaccaccaagagccccacagacaccttcggcaccatcaacttccaggatggagagcacacccaccacgccaagtacatccgcaccagctatgacaccaagctggaccacctgctgcacctgatgctgaaggagtggaagatggagctgcccaagctggtgatctctgtgcatggaggcatccagaacttcaccatgcccagcaagttcaaggagatcttcagccagggcctggtgaaggctgctgagaccaccggggcctggatcatcacagagggcatcaacacaggagtgtccaagcacgtgggagatgccctgaagagccacagcagccacagcctgaggaagatctggacagtgggcatccccccctggggcgtgattgagaaccagagggacctgattggcaaggatgtggtgtgcctgtaccagaccctggacaaccccctgagcaagctgaccaccctgaacagcatgcacagccacttcatcctgagtgatgatggcaccgtgggcaagtatggaaatgagatgaagctgcggaggaacctggagaagtacctgagcctgcagaagatccactgccgggagtaccaccggggctctgtgacccagagcggctgcaggcctgctgaggtgttccacggcctgccctag

SEQ ID NO: 173833 - DNA, 6069 bp, synthetic construct
  misc_feature 1..6069: note = Description of Artificial Sequence: Synthetic coding sequence
  source 1..6069: mol_type = other DNA
atgaaggagcagcctgtgctggagcggctgcagagccagaagtcctggatcaagggcgtgtttgacaagagagaatgttccaccatcatccccagcagcaagaacccccaccgctgcacccctgtgtgccaggtgtgccagaacctgatccgctgctactgcggccgcctcatcggggaccacgccggcatcgactacagctggaccatctctgctgccaagggcaaggagagcgagcagtggagcgtggagaagcacaccaccaagagccccacagacaccttcggcaccatcaacttccaggatggagagcacacccaccacgccaagtacatccgcaccagctatgacaccaagctggaccacctgctgcacctgatgctgaaggagtggaagatggagctgcccaagctggtgatctctgtgcatggaggcatccagaacttcaccatgcccagcaagttcaaggagatcttcagccagggcctggtgaaggctgctgagaccaccggggcctggatcatcacagagggcatcaacacaggagtgtccaagcacgtgggagatgccctgaagagccacagcagccacagcctgaggaagatctggacagtgggcatccccccctggggcgtgattgagaaccagagggacctgattggcaaggatgtggtgtgcctgtaccagaccctggacaaccccctgagcaagctgaccaccctgaacagcatgcacagccacttcatcctgagtgatgatggcaccgtgggcaagtatggaaatgagatgaagctgcggaggaacctggagaagtacctgagcctgcagaagatccactgccgcagccggcagggcgtgcctgtggtgggcctggtggtggagggcggccccaacgtcatcctgtctgtgtgggagaccgtgaaggacaaggaccctgtggtggtgtgtgagggcaccggccgggctgctgacctgctggccttcacccacaagcacctggctgatgagggcatgctgcggccccaggtgaaggaggagatcatctgcatgatccagaacaccttcaacttcagcctgaagcagagcaagcacctgttccagatcctgatggagtgcatggtgcaccgggactgcatcaccatctttgatgctgacagcgaggagcagcaggacctggacctggccatcctgacagccctgctgaagggcaccaacctgagcgccagcgagcagctgaacctggccatggcctgggacagagtggacatcgccaagaagcacatcctgatctatgagcagcactggaagccagatgccctggagcaggccatgtctgatgccctggtgatggacagagtggactttgtgaagctgctgattgaatatggagtgaacctgcaccgcttcctgaccatcccccggctggaggagctgtacaacaccaagcagggccccaccaacaccctgctgcaccacctggtgcaggatgtgaagcagcacaccctgctgagcggctaccgcatcaccctgattgatattggcctggtggtggagtacctgattggccgggcctaccgcagcaactacaccaggaagcacttccgggccctgtacaacaacctgtacaggaagtacaagcaccagaggcacagcagcggcaacagaaatgaatctgctgagagcaccctgcacagccagttcatcagaacagcccagccctacaagttcaaggagaagagcatcgtgctgcacaagagcaggaagaagagcaaggagcagaatgtgtctgatgatcctgagagcacaggcttcctgtacccctacaatgacctgctggtgtgggccgtgctgatgaagaggcagaagatggccatgttcttctggcagcacggggaggaggccaccgtgaaggccgtcatcgcctgcatcctgtaccgggccatggcccacgaggccaaggagagccacatggtggatgatgccagcgaggagctgaagaactacagcaagcagtttggccagctggccctggacctgctggagaaggccttcaagcagaatgaaagaatggccatgaccctgctgacctatgagctgaggaactggagcaacagcacctgcctgaagctggccgtgtctgggggcctgcggccctttgtgagccacacctgcacccagatgctgctgacagacatgtggatgggccgcctgaagatgaggaagaacagctggctgaagatcatcatcagcatcatcctgccccccaccatcctgaccctggagttcaagagcaaggccgagatgagccacgtgccccagagccaggacttccagttcatgtggtactacagcgaccagaatgccagcagcagcaaggagagcgcctctgtgaaggagtatgacctggagcggggccatgatgagaagctggatgagaaccagcacttcggcctggagagcggccaccagcacctgccctggaccaggaaggtgtatgagttctacagcgcccccatcgtgaagttctggttctacaccatggcctacctggccttcctgatgctgttcacctacacagtgctggtggagatgcagccccagcccagcgtgcaggagtggctggtgtccatctacatcttcaccaatgccatcgaggtggtgcgggagatctgcatcagcgagcccgggaagttcacccagaaggtgaaggtgtggatcagcgagtactggaacctgacagaaacagtggccatcggcctcttctctgctggctttgtgctgcgctggggagacccccccttccacacagctggccgcctcatctactgcatcgacatcatcttctggttcagccggctgctggacttctttgctgtgaaccagcacgccggcccctacgtgaccatgattgccaagatgacagccaacatgttctacatcgtcatcatcatggccatcgtgctgctgagctttggagtggccaggaaggccatcctgagccccaaggagccccccagctggagcctggcccgggacatcgtgtttgagccctactggatgatctacggggaggtgtatgctggggagattgatgtgtgcagcagccagcccagctgccccccaggcagcttcctgacccccttcctgcaggccgtgtacctgtttgtgcagtacatcatcatggtgaacctgctgattgccttcttcaacaacgtgtacctggacatggagagcatcagcaacaacctgtggaagtacaaccgctaccgctacatcatgacctaccacgagaagccctggctgcccccacccctcatcctgctgagccacgtgggcctgctgctgcggcggctgtgctgccaccgggcccctcatgaccaggaggagggagatgtgggcctgaagctgtacctgagcaaagaagacctgaagaagctgcatgactttgaggagcagtgtgtggagaagtacttccacgagaagatggaggatgtgaactgcagctgtgaggagcgcatccgggtgaccagcgagcgggtgacagagatgtacttccagctgaaggagatgaatgagaaggtgtccttcatcaaggacagcctgctgagcctggacagccaggtgggccacctgcaggacctgagcgccctgactgtggacaccctgaaggtgctgtctgctgtggacaccctgcaggaggatgaggccctgctggccaagaggaagcacagcacctgcaagaagctgccccacagctggagcaatgtcatctgtgccgaggtgctgggctccatggagattgctggggagaagaagtaccagtactacagcatgcccagcagcctgctgcggagcctggccggcggccgccaccccccccgggtgcagagaggagccctgctggagatcaccaacagcaagcgggaggccaccaacgtgagaaatgaccaggagcggcaggagacccagagcagcatcgtggtgtctggagtgagccccaaccggcaggcccacagcaaatatggccagttcctgctggtgcccagcaacctgaagagggtgcccttctctgctgagaccgtgctgcccctgagccggcccagcgtgcctgatgtgctggccacagagcaggacatccagacagaggtgctggtgcacctgaccggccagacccctgtggtgtctgactgggcctctgtggatgagcccaaggagaagcatgagcccatcgcccacctgctggatggccaggacaaggccgagcaggtgctgcccaccctgagctgcaccccagagcccatgaccatgagcagccccctgagccaggccaagatcatgcagacaggaggcggctacgtgaactgggccttctctgaaggagatgaaacaggagtcttcagcatcaagaagaagtggcagacctgcctgcccagcacctgtgacagcgacagcagccgctctgagcagcaccagaagcaggcccaggacagcagcctgagtgacaacagcaccaggtctgcccagagcagtgaatgttctgaggtgggcccctggctgcagcccaacaccagcttctggatcaaccccctgcggcgctaccggccctttgcccggagccacagcttccgcttccacaaggaggagaagctgatgaagatctgcaagatcaagaacctgagcggcagcagcgagatcggccagggcgcctgggtgaaggccaagatgctgaccaaggaccggcggctgagcaagaagaagaagaacacccagggcctgcaggtgcccatcatcaccgtgaatgcctgcagccagagcgaccagctgaaccctgagcccggggagaacagcatcagcgaggaggagtacagcaagaactggttcaccgtgtccaagttcagccacactggagtggagccctacatccaccagaagatgaagaccaaggagatcggccagtgtgccatccagatcagtgactacctgaagcagagccaggaggacctgagcaagaacagcctgtggaacagccgcagcaccaacctgaacagaaacagcctgctgaagagcagcattggagtggacaagatcagcgccagcctgaagagcccccaggagccccaccaccactacagcgccattgaaagaaacaacctgatgaggctgagccagaccatccccttcacccctgtgcagctgtttgctggggaggagatcaccgtgtaccgcctggaggagagcagccccctgaacctggacaagtccatgagctcctggagccagaggggccgggccgccatgatccaggtgctgagccgggaggagatggatggcggcctgaggaaggccatgagggtggtgtccacctggagcgaagatgacatcctgaagccaggccaggtgttcatcgtgaagagcttcctgcctgaggtggtgaggacctggcacaagatcttccaggagagcacagtgctgcacctgtgcctgcgggagatccagcagcagagagctgcccagaagctgatctacaccttcaaccaggtgaagccccagaccatcccctacaccccccgcttcctggaggtgttcctgatctactgccacagcgccaaccagtggctgaccatcgagaagtacatgaccggggagttcaggaagtacaacaacaacaatggagatgagatcacccccaccaacaccctggaggagctgatgctggccttcagccactggacctatgagtacaccagaggagagctgctggtgctggacctgcagggcgtgggggagaacctgacagaccccagcgtcatcaagccagaggtgaagcagagccggggcatggtgtttggacctgccaacctgggggaggatgccatccggaacttcatcgccaagcaccactgcaacagctgctgcaggaagctgaagctgcctgacctgaagagaaatgactacagccctgagcgcatcaacagcaccttcggcctggagatcaagattgagagcgctgaggagcccccagcccgggagactggaagaaacagcccagaagatgacatgcagctgtag

SEQ ID NO: 173834 - DNA, 6054 bp, synthetic construct
  misc_feature 1..6054: note = Description of Artificial Sequence: Synthetic coding sequence
  source 1..6054: mol_type = other DNA
atgacagcccctgtgaccagccagaagtcctggatcaagggcgtgtttgacaagcgggagtgcagcaccatcatccccagcagcaagaacccccaccgctgcacccctgtgtgccaggtgtgccagaacctgatccgctgctactgcggccgcctgattggagaccatgctggcatcgactacagctggaccatctctgctgccaagggcaaggagagcgagcagtggagcgtggagaagcacaccaccaagagccccacagacaccttcggcaccatcaacttccaggatggagagcacacccaccacgccaagtacatccgcaccagctatgacaccaagctggaccacctgctgcacctgatgctgaaggagtggaagatggagctgcccaagctggtgatctctgtgcacggcggcatccagaacttcaccatgcccagcaagttcaaggagatcttcagccagggcctggtgaaggctgctgagaccactggagcctggatcatcacagagggcatcaacacaggagtgtccaagcacgtgggagatgccctgaagagccacagcagccacagcctgaggaagatctggacagtgggcatccccccctggggcgtgattgagaaccagagggacctgattggcaaggatgtggtgtgcctgtaccagaccctggacaaccccctgagcaagctgaccaccctgaacagcatgcacagccacttcatcctgagtgatgatggcaccgtgggcaagtatggaaatgagatgaagctgcggaggaacctggagaagtacctgagcctgcagaagatccactgccgcagccggcagggcgtgcctgtggtgggcctggtggtggagggcggccccaacgtcatcctgtctgtgtgggagaccgtgaaggacaaggaccctgtggtggtgtgtgagggcaccggccgggctgctgacctgctggccttcacccacaagcacctggctgatgagggcatgctgcggccccaggtgaaggaggagatcatctgcatgatccagaacaccttcaacttcagcctgaagcagagcaagcacctgttccagatcctgatggagtgcatggtgcaccgggactgcatcaccatctttgatgctgacagcgaggagcagcaggacctggacctggccatcctgacagccctgctgaagggcaccaacctgagcgccagcgagcagctgaacctggccatggcctgggacagagtggacatcgccaagaagcacatcctgatctatgagcagcactggaagccagatgccctggagcaggccatgtctgatgccctggtgatggacagagtggactttgtgaagctgctgattgaatatggagtgaacctgcaccgcttcctgaccatcccccggctggaggagctgtacaacaccaagcagggccccaccaacaccctgctgcaccacctggtgcaggatgtgaagcagcacaccctgctgagcggctaccgcatcaccctgattgacatcggcctggtggtggagtacctgattggccgggcctaccgcagcaactacaccaggaagcacttccgggccctgtacaacaacctgtacaggaagtacaagcaccagaggcacagcagcggcaacagaaatgaatctgctgagagcaccctgcacagccagttcatcagaacagcccagccctacaagttcaaggagaagagcatcgtgctgcacaagagcaggaagaagagcaaggagcagaatgtgtctgatgatcctgagagcacaggcttcctgtacccctacaatgacctgctggtgtgggccgtgctgatgaagaggcagaagatggccatgttcttctggcagcacggggaggaggccaccgtgaaggctgtgattgcctgcatcctgtaccgggccatggcccacgaggccaaggagagccacatggtggatgatgccagcgaggagctgaagaactacagcaagcagtttggccagctggccctggacctgctggagaaggccttcaagcagaatgaaagaatggccatgaccctgctgacctatgagctgaggaactggagcaacagcacctgcctgaagctggccgtgtctgggggcctgcggccctttgtgagccacacctgcacccagatgctgctgacagacatgtggatgggccgcctgaagatgaggaagaacagctggctgaagatcatcatcagcatcatcctgccccccaccatcctgaccctggagttcaagagcaaggccgagatgagccacgtgccccagagccaggacttccagttcatgtggtactacagcgaccagaatgccagcagcagcaaggagagcgcctctgtgaaggagtatgacctggagcggggccatgatgagaagctggatgagaaccagcacttcggcctggagagcggccaccagcacctgccctggaccaggaaggtgtatgagttctacagcgcccccatcgtgaagttctggttctacaccatggcctacctggccttcctgatgctgttcacctacacagtgctggtggagatgcagccccagcccagcgtgcaggagtggctggtgtccatctacatcttcaccaatgccatcgaggtggtgcgggagatctgcatcagcgagcccgggaagttcacccagaaggtgaaggtgtggatcagcgagtactggaacctgacagagaccgtggccatcggcctcttctctgctggctttgtgctgcgctggggagacccccccttccacacagctggccgcctcatctactgcatcgacatcatcttctggttcagccggctgctggacttctttgctgtgaaccagcacgccggcccctacgtgaccatgattgccaagatgacagccaacatgttctacatcgtcatcatcatggccatcgtgctgctgagctttggagtggccaggaaggccatcctgagccccaaggagcccccatcctggagcctggcccgggacatcgtgtttgagccctactggatgatctatggagaggtgtatgctggggagattgatgtgtgcagcagccagcccagctgccccccaggcagcttcctgacccccttcctgcaggccgtgtacctgtttgtgcagtacatcatcatggtgaacctgctgattgccttcttcaacaacgtgtacctggacatggagagcatcagcaacaacctgtggaagtacaaccgctaccgctacatcatgacctaccacgagaagccctggctgcccccacccctcatcctgctgagccacgtgggcctgctgctgcggcggctgtgctgccaccgggcccctcatgaccaggaggagggagatgtgggcctgaagctgtacctgagcaaggaggacctgaagaagctgcatgactttgaggagcagtgtgtggagaagtacttccacgagaagatggaggatgtgaactgcagctgtgaggagcgcatccgggtgaccagcgagcgggtgacagagatgtacttccagctgaaggagatgaatgagaaggtgtccttcatcaaggacagcctgctgagcctggacagccaggtgggccacctgcaggacctgagcgccctgactgtggacaccctgaaggtgctgtctgctgtggacaccctgcaggaggatgaggccctgctggccaagaggaagcacagcacctgcaagaagctgccccacagctggagcaatgtcatctgtgccgaggtgctgggctccatggagattgctggggagaagaagtaccagtactacagcatgcccagcagcctgctgcggagcctggccggcggccgccaccccccccgggtgcagagaggagccctgctggagatcaccaacagcaagcgggaggccaccaacgtgagaaatgaccaggagcggcaggagacccagagcagcatcgtggtgtctggagtgagccccaaccggcaggcccacagcaaatatggccagttcctgctggtgcccagcaacctgaagagggtgcccttctctgctgagaccgtgctgcccctgagccggcccagcgtgcctgatgtgctggccacagagcaggacatccagacagaggtgctggtgcacctgaccggccagacccctgtggtgtctgactgggcctctgtggatgagcccaaggagaagcatgagcccatcgcccacctgctggatggccaggacaaggccgagcaggtgctgcccaccctgagctgcaccccagagcccatgaccatgagcagccccctgagccaggccaagatcatgcagacaggaggcggctacgtgaactgggccttctctgaaggagatgagaccggggtcttcagcatcaagaagaagtggcagacctgcctgcccagcacctgtgacagcgacagcagccgctctgagcagcaccagaagcaggcccaggacagcagcctgagtgacaacagcaccaggtctgcccagagcagcgagtgcagcgaggtgggcccctggctgcagcccaacaccagcttctggatcaaccccctgcggcgctaccggccctttgcccggagccacagcttccgcttccacaaggaggagaagctgatgaagatctgcaagatcaagaacctgagcggcagcagcgagatcggccagggcgcctgggtgaaggccaagatgctgaccaaggaccggcggctgagcaagaagaagaagaacacccagggcctgcaggtgcccatcatcaccgtgaatgcctgcagccagagcgaccagctgaaccctgagcctggagaaaattccatcagcgaggaggagtacagcaagaactggttcaccgtgtccaagttcagccacactggagtggagccctacatccaccagaagatgaagaccaaggagatcggccagtgtgccatccagatcagtgactacctgaagcagagccaggaggacctgagcaagaacagcctgtggaacagccgcagcaccaacctgaacagaaacagcctgctgaagagcagcattggagtggacaagatcagcgccagcctgaagagcccccaggagccccaccaccactacagcgccatcgagaggaacaacctgatgaggctgagccagaccatccccttcacccctgtgcagctgtttgctggggaggagatcaccgtgtaccgcctggaggagagcagccccctgaacctggacaagtccatgagctcctggagccagaggggccgggccgccatgatccaggtgctgagccgggaggagatggatggcggcctgaggaaggccatgagggtggtgtccacctggagcgaagatgacatcctgaagccaggccaggtgttcatcgtgaagagcttcctgcctgaggtggtgaggacctggcacaagatcttccaggagagcacagtgctgcacctgtgcctgcgggagatccagcagcagagagctgcccagaagctgatctacaccttcaaccaggtgaagccccagaccatcccctacaccccccgcttcctggaggtgttcctgatctactgccacagcgccaaccagtggctgaccatcgagaagtacatgactggagagttcaggaagtacaacaacaacaatggagatgagatcacccccaccaacaccctggaggagctgatgctggccttcagccactggacctatgagtacaccagaggagagctgctggtgctggacctgcagggcgtgggggagaacctgacagaccccagcgtcatcaagccagaggtgaagcagagccggggcatggtgtttggacctgccaacctgggagaagatgccatccggaacttcatcgccaagcaccactgcaacagctgctgcaggaagctgaagctgcctgacctgaagagaaatgactacagccctgagcgcatcaacagcaccttcggcctggagatcaagattgaatctgctgaggagcccccagcccgggagaccggcaggaacagcccagaagatgacatgcagctgtag

SEQ ID NO: 173835 - DNA, 5844 bp, synthetic construct
  misc_feature 1..5844: note = Description of Artificial Sequence: Synthetic coding sequence
  source 1..5844: mol_type = other DNA
atgaaggagcagcctgtgctggagcggctgcagagccagaagtcctggatcaagggcgtgtttgacaagagagaatgttccaccatcatccccagcagcaagaacccccaccgctgcacccctgtgtgccaggtgtgccagaacctgatccgctgctactgcggccgcctcatcggggaccacgccggcatcgactacagctggaccatctctgctgccaagggcaaggagagcgagcagtggagcgtggagaagcacaccaccaagagccccacagacaccttcggcaccatcaacttccaggatggagagcacacccaccacgccaagtacatccgcaccagctatgacaccaagctggaccacctgctgcacctgatgctgaaggagtggaagatggagctgcccaagctggtgatctctgtgcatggaggcatccagaacttcaccatgcccagcaagttcaaggagatcttcagccagggcctggtgaaggctgctgagaccaccggggcctggatcatcacagagggcatcaacacaggagtgtccaagcacgtgggagatgccctgaagagccacagcagccacagcctgaggaagatctggacagtgggcatccccccctggggcgtgattgagaaccagagggacctgattggcaaggatgtggtgtgcctgtaccagaccctggacaaccccctgagcaagctgaccaccctgaacagcatgcacagccacttcatcctgagtgatgatggcaccgtgggcaagtatggaaatgagatgaagctgcggaggaacctggagaagtacctgagcctgcagaagatccactgccgcagccggcagggcgtgcctgtggtgggcctggtggtggagggcggccccaacgtcatcctgtctgtgtgggagaccgtgaaggacaaggaccctgtggtggtgtgtgagggcaccggccgggctgctgacctgctggccttcacccacaagcacctggctgatgagggcatgctgcggccccaggtgaaggaggagatcatctgcatgatccagaacaccttcaacttcagcctgaagcagagcaagcacctgttccagatcctgatggagtgcatggtgcaccgggactgcatcaccatctttgatgctgacagcgaggagcagcaggacctggacctggccatcctgacagccctgctgaagggcaccaacctgagcgccagcgagcagctgaacctggccatggcctgggacagagtggacatcgccaagaagcacatcctgatctatgagcagcactggaagccagatgccctggagcaggccatgtctgatgccctggtgatggacagagtggactttgtgaagctgctgattgaatatggagtgaacctgcaccgcttcctgaccatcccccggctggaggagctgtacaacaccaagcagggccccaccaacaccctgctgcaccacctggtgcaggatgtgaagcagcacaccctgctgagcggctaccgcatcaccctgattgatattggcctggtggtggagtacctgattggccgggcctaccgcagcaactacaccaggaagcacttccgggccctgtacaacaacctgtacaggaagtacaagcaccagaggcacagcagcggcaacagaaatgaatctgctgagagcaccctgcacagccagttcatcagaacagcccagccctacaagttcaaggagaagagcatcgtgctgcacaagagcaggaagaagagcaaggagcagaatgtgtctgatgatcctgagagcacaggcttcctgtacccctacaatgacctgctggtgtgggccgtgctgatgaagaggcagaagatggccatgttcttctggcagcacggggaggaggccaccgtgaaggccgtcatcgcctgcatcctgtaccgggccatggcccacgaggccaaggagagccacatggtggatgatgccagcgaggagctgaagaactacagcaagcagtttggccagctggccctggacctgctggagaaggccttcaagcagaatgaaagaatggccatgaccctgctgacctatgagctgaggaactggagcaacagcacctgcctgaagctggccgtgtctgggggcctgcggccctttgtgagccacacctgcacccagatgctgctgacagacatgtggatgggccgcctgaagatgaggaagaacagctggctgaagatcatcatcagcatcatcctgccccccaccatcctgaccctggagttcaagagcaaggccgagatgagccacgtgccccagagccaggacttccagttcatgtggtactacagcgaccagaatgccagcagcagcaaggagagcgcctctgtgaaggagtatgacctggagcggggccatgatgagaagctggatgagaaccagcacttcggcctggagagcggccaccagcacctgccctggaccaggaaggtgtatgagttctacagcgcccccatcgtgaagttctggttctacaccatggcctacctggccttcctgatgctgttcacctacacagtgctggtggagatgcagccccagcccagcgtgcaggagtggctggtgtccatctacatcttcaccaatgccatcgaggtggtgcgggagatctgcatcagcgagcccgggaagttcacccagaaggtgaaggtgtggatcagcgagtactggaacctgacagaaacagtggccatcggcctcttctctgctggctttgtgctgcgctggggagacccccccttccacacagctggccgcctcatctactgcatcgacatcatcttctggttcagccggctgctggacttctttgctgtgaaccagcacgccggcccctacgtgaccatgattgccaagatgacagccaacatgttctacatcgtcatcatcatggccatcgtgctgctgagctttggagtggccaggaaggccatcctgagccccaaggagccccccagctggagcctggcccgggacatcgtgtttgagccctactggatgatctacggggaggtgtatgctggggagattgatgtgtgcagcagccagcccagctgccccccaggcagcttcctgacccccttcctgcaggccgtgtacctgtttgtgcagtacatcatcatggtgaacctgctgattgccttcttcaacaacgtgtacctggacatggagagcatcagcaacaacctgtggaagtacaaccgctaccgctacatcatgacctaccacgagaagccctggctgcccccacccctcatcctgctgagccacgtgggcctgctgctgcggcggctgtgctgccaccgggcccctcatgaccaggaggagggagatgtgggcctgaagctgtacctgagcaaagaagacctgaagaagctgcatgactttgaggagcagtgtgtggagaagtacttccacgagaagatggaggatgtgaactgcagctgtgaggagcgcatccgggtgaccagcgagcgggtgacagagatgtacttccagctgaaggagatgaatgagaaggtgtccttcatcaaggacagcctgctgagcctggacagccaggtgggccacctgcaggacctgagcgccctgactgtggacaccctgaaggtgctgtctgctgtggacaccctgcaggaggatgaggccctgctggccaagaggaagcacagcacctgcaagaagctgccccacagctggagcaatgtcatctgtgccgaggtgctgggctccatggagattgctggggagaagaagtaccagtactacagcatgcccagcagcctgctgcggagcctggccggcggccgccaccccccccgggtgcagagaggagccctgctggagatcaccaacagcaagcgggaggccaccaacgtgagaaatgaccaggagcggcaggagacccagagcagcatcgtggtgtctggagtgagccccaaccggcaggcccacagcaaatatggccagttcctgctggtgcccagcaacctgaagagggtgcccttctctgctgagaccgtgctgcccctgagccggcccagcgtgcctgatgtgctggccacagagcaggacatccagacagaggtgctggtgcacctgaccggccagacccctgtggtgtctgactgggcctctgtggatgagcccaaggagaagcatgagcccatcgcccacctgctggatggccaggacaaggccgagcaggtgctgcccaccctgagctgcaccccagagcccatgaccatgagcagccccctgagccaggccaagatcatgcagacaggaggcggctacgtgaactgggccttctctgaaggagatgaaacaggagtcttcagcatcaagaagaagtggcagacctgcctgcccagcacctgtgacagcgacagcagccgctctgagcagcaccagaagcaggcccaggacagcagcctgagtgacaacagcaccaggtctgcccagagcagtgaatgttctgaggtgggcccctggctgcagcccaacaccagcttctggatcaaccccctgcggcgctaccggccctttgcccggagccacagcttccgcttccacaaggaggagaagctgatgaagatctgcaagatcaagaacctgagcggcagcagcgagatcggccagggcgcctgggtgaaggccaagatgctgaccaaggaccggcggctgagcaagaagaagaagaacacccagggcctgcaggtgcccatcatcaccgtgaatgcctgcagccagagcgaccagctgaaccctgagcccggggagaacagcatcagcgaggaggagtacagcaagaactggttcaccgtgtccaagttcagccacactggagtggagccctacatccaccagaagatgaagaccaaggagatcggccagtgtgccatccagatcagtgactacctgaagcagagccaggaggacctgagcaagaacagcctgtggaacagccgcagcaccaacctgaacagaaacagcctgcacgtgatcaagatgcccatcagcagcctcatcagcgagatcagcgccagcctgaagagcccccaggagccccaccaccactacagcgccattgaaagaaacaacctgatgaggctgagccagaccatccccttcacccctgtgcagctgtttgctggggaggagatcaccgtgtaccgcctggaggagagcagccccctgaacctggacaagtccatgagctcctggagccagaggggccgggccgccatgatccaggtgctgagccgggaggagatggatggcggcctgaggaaggccatgagggtggtgtccacctggagcgaagatgacatcctgaagccaggccaggtgttcatcgtgaagagcttcctgcctgaggtggtgaggacctggcacaagatcttccaggagagcacagtgctgcacctgtgcctgcgggagatccagcagcagagagctgcccagaagctgatctacaccttcaaccaggtgaagccccagaccatcccctacaccccccgcttcctggaggtgttcctgatctactgccacagcgccaaccagtggctgaccatcgagaagtacatgaccggggagttcaggaagtacaacaacaacaatggagatgagatcacccccaccaacaccctggaggagctgatgctggccttcagccactggacctatgagtacaccagaggagagctgctggtgctggacctgcaggccctgtggttctgggacagcatgctgaaggcccggctgggcggctggaggatgtag

SEQ ID NO: 173836 - DNA, 1707 bp, synthetic construct
  misc_feature 1..1707: note = Description of Artificial Sequence: Synthetic coding sequence
  source 1..1707: mol_type = other DNA
cgggagagcccccacccagccctgctgcagagccagaagtcctggatcaagggcgtgtttgacaagcgggagtgcagcaccatcatccccagcagcaagaacccccaccgctgcacccctgtgtgccaggtgtgccagaacctgatccgctgctactgcggccgcctgattggagaccatgctggcatcgactacagctggaccatctctgctgccaagggcaaggagagcgagcagtggagcgtggagaagcacaccaccaagagccccacagacaccttcggcaccatcaacttccaggatggagagcacacccaccacgccaagtacatccgcaccagctatgacaccaagctggaccacctgctgcacctgatgctgaaggagtggaagatggagctgcccaagctggtgatctctgtgcacggcggcatccagaacttcaccatgcccagcaagttcaaggagatcttcagccagggcctggtgaaggctgctgagaccactggagcctggatcatcacagagggcatcaacacaggagtgtccaagcacgtgggagatgccctgaagagccacagcagccacagcctgaggaagatctggacagtgggcatccccccctggggcgtgattgagaaccagagggacctgattggcaaggatgtggtgtgcctgtaccagaccctggacaaccccctgagcaagctgaccaccctgaacagcatgcacagccacttcatcctgagtgatgatggcaccgtgggcaagtatggaaatgagatgaagctgcggaggaacctggagaagtacctgagcctgcagaagatccactgccctggagaggagatcaccgtgtaccgcctggaggagagcagccccctgaacctggacaagtccatgagctcctggagccagaggggccgggccgccatgatccaggtgctgagccgggaggagatggatggcggcctgaggaaggccatgagggtggtgtccacctggagcgaagatgacatcctgaagccaggccaggtgttcatcgtgaagagcttcctgcctgaggtggtgaggacctggcacaagatcttccaggagagcacagtgctgcacctgtgcctgcgggagatccagcagcagagagctgcccagaagctgatctacaccttcaaccaggtgaagccccagaccatcccctacaccccccgcttcctggaggtgttcctgatctactgccacagcgccaaccagtggctgaccatcgagaagtacatgaccggggagttcaggaagtacaacaacaacaatggagatgagatcacccccaccaacaccctggaggagctgatgctggccttcagccactggacctatgagtacaccagaggagagctgctggtgctggacctgcagggcgtgggggagaacctgacagaccccagcgtcatcaagccagaggtgaagcagagccggggcatggtgtttggacctgccaacctgggggaggatgccatccggaacttcatcgccaagcaccactgcaacagctgctgcaggaagctgaagctgcctgacctgaagagaaatgactacagccctgagcgcatcaacagcaccttcggcctggagatcaagattgagagcgctgaggagcccccagcccgggagactggaagaaacagcccagaagatgacatgcagctgtag

SEQ ID NO: 173837 - DNA, 2580 bp, synthetic construct
  misc_feature 1..2580: note = Description of Artificial Sequence: Synthetic coding sequence
  source 1..2580: mol_type = other DNA
atgaaggagcagcctgtgctggagcggctgcagagccagaagtcctggatcaagggcgtgtttgacaagagagaatgttccaccatcatccccagcagcaagaacccccaccgctgcacccctgtgtgccaggtgtgccagaacctgatccgctgctactgcggccgcctcatcggggaccacgccggcatcgactacagctggaccatctctgctgccaagggcaaggagagcgagcagtggagcgtggagaagcacaccaccaagagccccacagacaccttcggcaccatcaacttccaggatggagagcacacccaccacgccaagtacatccgcaccagctatgacaccaagctggaccacctgctgcacctgatgctgaaggagtggaagatggagctgcccaagctggtgatctctgtgcatggaggcatccagaacttcaccatgcccagcaagttcaaggagatcttcagccagggcctggtgaaggctgctgagaccaccggggcctggatcatcacagagggcatcaacacaggagtgtccaagcacgtgggagatgccctgaagagccacagcagccacagcctgaggaagatctggacagtgggcatccccccctggggcgtgattgagaaccagagggacctgattggcaaggatgtggtgtgcctgtaccagaccctggacaaccccctgagcaagctgaccaccctgaacagcatgcacagccacttcatcctgagtgatgatggcaccgtgggcaagtatggaaatgagatgaagctgcggaggaacctggagaagtacctgagcctgcagaagatccactgccgcagccggcagggcgtgcctgtggtgggcctggtggtggagggcggccccaacgtcatcctgtctgtgtgggagaccgtgaaggacaaggaccctgtggtggtgtgtgagggcaccggccgggctgctgacctgctggccttcacccacaagcacctggctgatgagggcatgctgcggccccaggtgaaggaggagatcatctgcatgatccagaacaccttcaacttcagcctgaagcagagcaagcacctgttccagatcctgatggagtgcatggtgcaccgggactgcatcaccatctttgatgctgacagcgaggagcagcaggacctggacctggccatcctgacagccctgctgaagggcaccaacctgagcgccagcgagcagctgaacctggccatggcctgggacagagtggacatcgccaagaagcacatcctgatctatgagcagcactggaagccagatgccctggagcaggccatgtctgatgccctggtgatggacagagtggactttgtgaagctgctgattgaatatggagtgaacctgcaccgcttcctgaccatcccccggctggaggagctgtacaacaccaagcagggccccaccaacaccctgctgcaccacctggtgcaggatgtgaagcaggacctgagcaagaacagcctgtggaacagccgcagcaccaacctgaacagaaacagcctgcacgtgatcaagatgcccatcagcagcctcatcagcgagatcagcgccagcctgaagagcccccaggagccccaccaccactacagcgccatcgagaggaacaacctgatgaggctgagccagaccatccccttcacccctgtgcagctgtttgctggggaggagatcaccgtgtaccgcctggaggagagcagccccctgaacctggacaagtccatgagctcctggagccagaggggccgggccgccatgatccaggtgctgagccgggaggagatggatggcggcctgaggaaggccatgagggtggtgtccacctggagcgaagatgacatcctgaagccaggccaggtgttcatcgtgaagagcttcctgcctgaggtggtgaggacctggcacaagatcttccaggagagcacagtgctgcacctgtgcctgcgggagatccagcagcagagagctgcccagaagctgatctacaccttcaaccaggtgaagccccagaccatcccctacaccccccgcttcctggaggtgttcctgatctactgccacagcgccaaccagtggctgaccatcgagaagtacatgactggagagttcaggaagtacaacaacaacaatggagatgagatcacccccaccaacaccctggaggagctgatgctggccttcagccactggacctatgagtacaccagaggagagctgctggtgctggacctgcagggcgtgggggagaacctgacagaccccagcgtcatcaagccagaggtgaagcagagccggggcatggtgtttggacctgccaacctgggagaagatgccatccggaacttcatcgccaagcaccactgcaacagctgctgcaggaagctgaagctgcctgacctgaagagaaatgactacagccctgagcgcatcaacagcaccttcggcctggagatcaagattgaatctgctgaggagcccccagcccgggagaccggcaggaacagcccagaagatgacatgcagctgtag

SEQ ID NO: 173838 - DNA, 2934 bp, synthetic construct
  misc_feature 1..2934: note = Description of Artificial Sequence: Synthetic coding sequence
  source 1..2934: mol_type = other DNA
atgaaggagcagcctgtgctggagcggctgcagagccagaagtcctggatcaagggcgtgtttgacaagagagaatgttccaccatcatccccagcagcaagaacccccaccgctgcacccctgtgtgccaggtgtgccagaacctgatccgctgctactgcggccgcctcatcggggaccacgccggcatcgactacagctggaccatctctgctgccaagggcaaggagagcgagcagtggagcgtggagaagcacaccaccaagagccccacagacaccttcggcaccatcaacttccaggatggagagcacacccaccacgccaagtacatccgcaccagctatgacaccaagctggaccacctgctgcacctgatgctgaaggagtggaagatggagctgcccaagctggtgatctctgtgcatggaggcatccagaacttcaccatgcccagcaagttcaaggagatcttcagccagggcctggtgaaggctgctgagaccaccggggcctggatcatcacagagggcatcaacacaggagtgtccaagcacgtgggagatgccctgaagagccacagcagccacagcctgaggaagatctggacagtgggcatccccccctggggcgtgattgagaaccagagggacctgattggcaaggatgtggtgtgcctgtaccagaccctggacaaccccctgagcaagctgaccaccctgaacagcatgcacagccacttcatcctgagtgatgatggcaccgtgggcaagtatggaaatgagatgaagctgcggaggaacctggagaagtacctgagcctgcagaagatccactgccgcagccggcagggcgtgcctgtggtgggcctggtggtggagggcggccccaacgtcatcctgtctgtgtgggagaccgtgaaggacaaggaccctgtggtggtgtgtgagggcaccggccgggctgctgacctgctggccttcacccacaagcacctggctgatgagggcatgctgcggccccaggtgaaggaggagatcatctgcatgatccagaacaccttcaacttcagcctgaagcagagcaagcacctgttccagatcctgatggagtgcatggtgcaccgggactgcatcaccatctttgatgctgacagcgaggagcagcaggacctggacctggccatcctgacagccctgctgaagggcaccaacctgagcgccagcgagcagctgaacctggccatggcctgggacagagtggacatcgccaagaagcacatcctgatctatgagcagcactggaagccagatgccctggagcaggccatgtctgatgccctggtgatggacagagtggactttgtgaagctgctgattgaatatggagtgaacctgcaccgcttcctgaccatcccccggctggaggagctgtacaacaccaagcagggccccaccaacaccctgctgcaccacctggtgcaggatgtgaagcagcacaccctgctgagcggctaccgcatcaccctgattgatattggcctggtggtggagtacctgattggccgggcctaccgcagcaactacaccaggaagcacttccgggccctgtacaacaacctgtacaggaagtacaagatcatcaccgtgaatgcctgcagccagagcgaccagctgaaccctgagcctggagaaaattccatcagcgaggaggagtacagcaagaactggttcaccgtgtccaagttcagccacactggagtggagccctacatccaccagaagatgaagaccaaggagatcggccagtgtgccatccagatcagtgactacctgaagcagagccaggaggacctgagcaagaacagcctgtggaacagccgcagcaccaacctgaacagaaacagcctgcacgtgatcaagatgcccatcagcagcctcatcagcgagatcagcgccagcctgaagagcccccaggagccccaccaccactacagcgccatcgagaggaacaacctgatgaggctgagccagaccatccccttcacccctgtgcagctgtttgctggggaggagatcaccgtgtaccgcctggaggagagcagccccctgaacctggacaagtccatgagctcctggagccagaggggccgggccgccatgatccaggtgctgagccgggaggagatggatggcggcctgaggaaggccatgagggtggtgtccacctggagcgaagatgacatcctgaagccaggccaggtgttcatcgtgaagagcttcctgcctgaggtggtgaggacctggcacaagatcttccaggagagcacagtgctgcacctgtgcctgcgggagatccagcagcagagagctgcccagaagctgatctacaccttcaaccaggtgaagccccagaccatcccctacaccccccgcttcctggaggtgttcctgatctactgccacagcgccaaccagtggctgaccatcgagaagtacatgactggagagttcaggaagtacaacaacaacaatggagatgagatcacccccaccaacaccctggaggagctgatgctggccttcagccactggacctatgagtacaccagaggagagctgctggtgctggacctgcagggcgtgggggagaacctgacagaccccagcgtcatcaagccagaggtgaagcagagccggggcatggtgtttggacctgccaacctgggagaagatgccatccggaacttcatcgccaagcaccactgcaacagctgctgcaggaagctgaagctgcctgacctgaagagaaatgactacagccctgagcgcatcaacagcaccttcggcctggagatcaagattgaatctgctgaggagcccccagcccgggagaccggcaggaacagcccagaagatgacatgcagctgtag

SEQ ID NO: 173839 - DNA, 3402 bp, synthetic construct
  misc_feature 1..3402: note = Description of Artificial Sequence: Synthetic coding sequence
  source 1..3402: mol_type = other DNA
atgctgcggccccaggtgaaggaggagatcatctgcatgatccagaacaccttcaacttcagcctgaagcagagcaagcacctgttccagatcctgatggagtgcatggtgcaccgggactgcatcaccatctttgatgctgacagcgaggagcagcaggacctggacctggccatcctgacagccctgctgaagggcaccaacctgagcgccagcgagcagctgaacctggccatggcctgggacagagtggacatcgccaagaagcacatcctgatctatgagcagcactggaagccagatgccctggagcaggccatgtctgatgccctggtgatggacagagtggactttgtgaagctgctgattgaatatggagtgaacctgcaccgcttcctgaccatcccccggctggaggagctgtacaacaccaagcagggccccaccaacaccctgctgcaccacctggtgcaggatgtgaagcagcacaccctgctgagcggctaccgcatcaccctgattgacatcggcctggtggtggagtacctgattggccgggcctaccgcagcaactacaccaggaagcacttccgggccctgtacaacaacctgtacaggaagtacaagcaccagaggcacagcagcggcaacagaaatgaatctgctgagagcaccctgcacagccagttcatcagaacagcccagccctacaagttcaaggagaagagcatcgtgctgcacaagagcaggaagaagagcaaggagcagaatgtgtctgatgatcctgagagcacaggcttcctgtacccctacaatgacctgctggtgtgggccgtgctgatgaagaggcagaagatggccatgttcttctggcagcacggggaggaggccaccgtgaaggctgtgattgcctgcatcctgtaccgggccatggcccacgaggccaaggagagccacatggtggatgatgccagcgaggagctgaagaactacagcaagcagtttggccagctggccctggacctgctggagaaggccttcaagcagaatgaaagaatggccatgaccctgctgacctatgagctgaggaactggagcaacagcacctgcctgaagctggccgtgtctgggggcctgcggccctttgtgagccacacctgcacccagatgctgctgacagacatgtggatgggccgcctgaagatgaggaagaacagctggctgaagatcatcatcagcatcatcctgccccccaccatcctgaccctggagttcaagagcaaggccgagatgagccacgtgccccagagccaggacttccagttcatgtggtactacagcgaccagaatgccagcagcagcaaggagagcgcctctgtgaaggagtatgacctggagcggggccatgatgagaagctggatgagaaccagcacttcggcctggagagcggccaccagcacctgccctggaccaggaaggtgtatgagttctacagcgcccccatcgtgaagttctggttctacaccatggcctacctggccttcctgatgctgttcacctacacagtgctggtggagatgcagccccagcccagcgtgcaggagtggctggtgtccatctacatcttcaccaatgccatcgaggtggtgcgggagatctgcatcagcgagcccgggaagttcacccagaaggtgaaggtgtggatcagcgagtactggaacctgacagagaccgtggccatcggcctcttctctgctggctttgtgctgcgctggggagacccccccttccacacagctggccgcctcatctactgcatcgacatcatcttctggttcagccggctgctggacttctttgctgtgaaccagcacgccggcccctacgtgaccatgattgccaagatgacagccaacatgttctacatcgtcatcatcatggccatcgtgctgctgagctttggagtggccaggaaggccatcctgagccccaaggagcccccatcctggagcctggcccgggacatcgtgtttgagccctactggatgatctatggagaggtgtatgctggggagattgatgtgtgcagcagccagcccagctgccccccaggcagcttcctgacccccttcctgcaggccgtgtacctgtttgtgcagtacatcatcatggtgaacctgctgattgccttcttcaacaacgtgtacctggacatggagagcatcagcaacaacctgtggaagtacaaccgctaccgctacatcatgacctaccacgagaagccctggctgcccccacccctcatcctgctgagccacgtgggcctgctgctgcggcggctgtgctgccaccgggcccctcatgaccaggaggagggagatgtgggcctgaagctgtacctgagcaaggaggacctgaagaagctgcatgactttgaggagcagtgtgtggagaagtacttccacgagaagatggaggatgtgaactgcagctgtgaggagcgcatccgggtgaccagcgagcgggtgacagagatgtacttccagctgaaggagatgaatgagaaggtgtccttcatcaaggacagcctgctgagcctggacagccaggtgggccacctgcaggacctgagcgccctgactgtggacaccctgaaggtgctgtctgctgtggacaccctgcaggaggatgaggccctgctggccaagaggaagcacagcacctgcaagaagctgccccacagctggagcaatgtcatctgtgccgaggtgctgggctccatggagattgctggggagaagaagtaccagtactacagcatgcccagcagcctgctgcggagcctggccggcggccgccaccccccccgggtgcagagaggagccctgctggagatcaccaacagcaagcgggaggccaccaacgtgagaaatgaccaggagcggcaggagacccagagcagcatcgtggtgtctggagtgagccccaaccggcaggcccacagcaaatatggccagttcctgctggtgcccagcaacctgaagagggtgcccttctctgctgagaccgtgctgcccctgagccggcccagcgtgcctgatgtgctggccacagagcaggacatccagacagaggtgctggtgcacctgaccggccagacccctgtggtgtctgactgggcctctgtggatgagcccaaggagaagcatgagcccatcgcccacctgctggatggccaggacaaggccgagcaggtgctgcccaccctgagctgcaccccagagcccatgaccatgagcagccccctgagccgctaccggccctttgcccggagccacagcttccgcttccacaaggaggagaagctgatgaagatctgcaagatcaagagcaaggagtag

SEQ ID NO: 173840 - DNA, 6054 bp, synthetic construct
  misc_feature 1..6054: note = Description of Artificial Sequence: Synthetic coding sequence
  source 1..6054: mol_type = other DNA
atgatcatcctgagcaagagccagaagtcctggatcaagggcgtgtttgacaagcgggagtgcagcaccatcatccccagcagcaagaacccccaccgctgcacccctgtgtgccaggtgtgccagaacctgatccgctgctactgcggccgcctgattggagaccatgctggcatcgactacagctggaccatctctgctgccaagggcaaggagagcgagcagtggagcgtggagaagcacaccaccaagagccccacagacaccttcggcaccatcaacttccaggatggagagcacacccaccacgccaagtacatccgcaccagctatgacaccaagctggaccacctgctgcacctgatgctgaaggagtggaagatggagctgcccaagctggtgatctctgtgcacggcggcatccagaacttcaccatgcccagcaagttcaaggagatcttcagccagggcctggtgaaggctgctgagaccactggagcctggatcatcacagagggcatcaacacaggagtgtccaagcacgtgggagatgccctgaagagccacagcagccacagcctgaggaagatctggacagtgggcatccccccctggggcgtgattgagaaccagagggacctgattggcaaggatgtggtgtgcctgtaccagaccctggacaaccccctgagcaagctgaccaccctgaacagcatgcacagccacttcatcctgagtgatgatggcaccgtgggcaagtatggaaatgagatgaagctgcggaggaacctggagaagtacctgagcctgcagaagatccactgccgcagccggcagggcgtgcctgtggtgggcctggtggtggagggcggccccaacgtcatcctgtctgtgtgggagaccgtgaaggacaaggaccctgtggtggtgtgtgagggcaccggccgggctgctgacctgctggccttcacccacaagcacctggctgatgagggcatgctgcggccccaggtgaaggaggagatcatctgcatgatccagaacaccttcaacttcagcctgaagcagagcaagcacctgttccagatcctgatggagtgcatggtgcaccgggactgcatcaccatctttgatgctgacagcgaggagcagcaggacctggacctggccatcctgacagccctgctgaagggcaccaacctgagcgccagcgagcagctgaacctggccatggcctgggacagagtggacatcgccaagaagcacatcctgatctatgagcagcactggaagccagatgccctggagcaggccatgtctgatgccctggtgatggacagagtggactttgtgaagctgctgattgaatatggagtgaacctgcaccgcttcctgaccatcccccggctggaggagctgtacaacaccaagcagggccccaccaacaccctgctgcaccacctggtgcaggatgtgaagcagcacaccctgctgagcggctaccgcatcaccctgattgacatcggcctggtggtggagtacctgattggccgggcctaccgcagcaactacaccaggaagcacttccgggccctgtacaacaacctgtacaggaagtacaagcaccagaggcacagcagcggcaacagaaatgaatctgctgagagcaccctgcacagccagttcatcagaacagcccagccctacaagttcaaggagaagagcatcgtgctgcacaagagcaggaagaagagcaaggagcagaatgtgtctgatgatcctgagagcacaggcttcctgtacccctacaatgacctgctggtgtgggccgtgctgatgaagaggcagaagatggccatgttcttctggcagcacggggaggaggccaccgtgaaggctgtgattgcctgcatcctgtaccgggccatggcccacgaggccaaggagagccacatggtggatgatgccagcgaggagctgaagaactacagcaagcagtttggccagctggccctggacctgctggagaaggccttcaagcagaatgaaagaatggccatgaccctgctgacctatgagctgaggaactggagcaacagcacctgcctgaagctggccgtgtctgggggcctgcggccctttgtgagccacacctgcacccagatgctgctgacagacatgtggatgggccgcctgaagatgaggaagaacagctggctgaagatcatcatcagcatcatcctgccccccaccatcctgaccctggagttcaagagcaaggccgagatgagccacgtgccccagagccaggacttccagttcatgtggtactacagcgaccagaatgccagcagcagcaaggagagcgcctctgtgaaggagtatgacctggagcggggccatgatgagaagctggatgagaaccagcacttcggcctggagagcggccaccagcacctgccctggaccaggaaggtgtatgagttctacagcgcccccatcgtgaagttctggttctacaccatggcctacctggccttcctgatgctgttcacctacacagtgctggtggagatgcagccccagcccagcgtgcaggagtggctggtgtccatctacatcttcaccaatgccatcgaggtggtgcgggagatctgcatcagcgagcccgggaagttcacccagaaggtgaaggtgtggatcagcgagtactggaacctgacagagaccgtggccatcggcctcttctctgctggctttgtgctgcgctggggagacccccccttccacacagctggccgcctcatctactgcatcgacatcatcttctggttcagccggctgctggacttctttgctgtgaaccagcacgccggcccctacgtgaccatgattgccaagatgacagccaacatgttctacatcgtcatcatcatggccatcgtgctgctgagctttggagtggccaggaaggccatcctgagccccaaggagcccccatcctggagcctggcccgggacatcgtgtttgagccctactggatgatctatggagaggtgtatgctggggagattgatgtgtgcagcagccagcccagctgccccccaggcagcttcctgacccccttcctgcaggccgtgtacctgtttgtgcagtacatcatcatggtgaacctgctgattgccttcttcaacaacgtgtacctggacatggagagcatcagcaacaacctgtggaagtacaaccgctaccgctacatcatgacctaccacgagaagccctggctgcccccacccctcatcctgctgagccacgtgggcctgctgctgcggcggctgtgctgccaccgggcccctcatgaccaggaggagggagatgtgggcctgaagctgtacctgagcaaggaggacctgaagaagctgcatgactttgaggagcagtgtgtggagaagtacttccacgagaagatggaggatgtgaactgcagctgtgaggagcgcatccgggtgaccagcgagcgggtgacagagatgtacttccagctgaaggagatgaatgagaaggtgtccttcatcaaggacagcctgctgagcctggacagccaggtgggccacctgcaggacctgagcgccctgactgtggacaccctgaaggtgctgtctgctgtggacaccctgcaggaggatgaggccctgctggccaagaggaagcacagcacctgcaagaagctgccccacagctggagcaatgtcatctgtgccgaggtgctgggctccatggagattgctggggagaagaagtaccagtactacagcatgcccagcagcctgctgcggagcctggccggcggccgccaccccccccgggtgcagagaggagccctgctggagatcaccaacagcaagcgggaggccaccaacgtgagaaatgaccaggagcggcaggagacccagagcagcatcgtggtgtctggagtgagccccaaccggcaggcccacagcaaatatggccagttcctgctggtgcccagcaacctgaagagggtgcccttctctgctgagaccgtgctgcccctgagccggcccagcgtgcctgatgtgctggccacagagcaggacatccagacagaggtgctggtgcacctgaccggccagacccctgtggtgtctgactgggcctctgtggatgagcccaaggagaagcatgagcccatcgcccacctgctggatggccaggacaaggccgagcaggtgctgcccaccctgagctgcaccccagagcccatgaccatgagcagccccctgagccaggccaagatcatgcagacaggaggcggctacgtgaactgggccttctctgaaggagatgagaccggggtcttcagcatcaagaagaagtggcagacctgcctgcccagcacctgtgacagcgacagcagccgctctgagcagcaccagaagcaggcccaggacagcagcctgagtgacaacagcaccaggtctgcccagagcagcgagtgcagcgaggtgggcccctggctgcagcccaacaccagcttctggatcaaccccctgcggcgctaccggccctttgcccggagccacagcttccgcttccacaaggaggagaagctgatgaagatctgcaagatcaagaacctgagcggcagcagcgagatcggccagggcgcctgggtgaaggccaagatgctgaccaaggaccggcggctgagcaagaagaagaagaacacccagggcctgcaggtgcccatcatcaccgtgaatgcctgcagccagagcgaccagctgaaccctgagcctggagaaaattccatcagcgaggaggagtacagcaagaactggttcaccgtgtccaagttcagccacactggagtggagccctacatccaccagaagatgaagaccaaggagatcggccagtgtgccatccagatcagtgactacctgaagcagagccaggaggacctgagcaagaacagcctgtggaacagccgcagcaccaacctgaacagaaacagcctgctgaagagcagcattggagtggacaagatcagcgccagcctgaagagcccccaggagccccaccaccactacagcgccatcgagaggaacaacctgatgaggctgagccagaccatccccttcacccctgtgcagctgtttgctggggaggagatcaccgtgtaccgcctggaggagagcagccccctgaacctggacaagtccatgagctcctggagccagaggggccgggccgccatgatccaggtgctgagccgggaggagatggatggcggcctgaggaaggccatgagggtggtgtccacctggagcgaagatgacatcctgaagccaggccaggtgttcatcgtgaagagcttcctgcctgaggtggtgaggacctggcacaagatcttccaggagagcacagtgctgcacctgtgcctgcgggagatccagcagcagagagctgcccagaagctgatctacaccttcaaccaggtgaagccccagaccatcccctacaccccccgcttcctggaggtgttcctgatctactgccacagcgccaaccagtggctgaccatcgagaagtacatgactggagagttcaggaagtacaacaacaacaatggagatgagatcacccccaccaacaccctggaggagctgatgctggccttcagccactggacctatgagtacaccagaggagagctgctggtgctggacctgcagggcgtgggggagaacctgacagaccccagcgtcatcaagccagaggtgaagcagagccggggcatggtgtttggacctgccaacctgggagaagatgccatccggaacttcatcgccaagcaccactgcaacagctgctgcaggaagctgaagctgcctgacctgaagagaaatgactacagccctgagcgcatcaacagcaccttcggcctggagatcaagattgaatctgctgaggagcccccagcccgggagaccggcaggaacagcccagaagatgacatgcagctgtag

SEQ ID NO: 173841 - DNA, 6081 bp, synthetic construct
  misc_feature 1..6081: note = Description of Artificial Sequence: Synthetic coding sequence
  source 1..6081: mol_type = other DNA
atgaaggagcagcctgtgctggagcggctgcagagccagaagtcctggatcaagggcgtgtttgacaagagagaatgttccaccatcatccccagcagcaagaacccccaccgctgcacccctgtgtgccaggtgtgccagaacctgatccgctgctactgcggccgcctcatcggggaccacgccggcatcgactacagctggaccatctctgctgccaagggcaaggagagcgagcagtggagcgtggagaagcacaccaccaagagccccacagacaccttcggcaccatcaacttccaggatggagagcacacccaccacgccaagtacatccgcaccagctatgacaccaagctggaccacctgctgcacctgatgctgaaggagtggaagatggagctgcccaagctggtgatctctgtgcatggaggcatccagaacttcaccatgcccagcaagttcaaggagatcttcagccagggcctggtgaaggctgctgagaccaccggggcctggatcatcacagagggcatcaacacaggagtgtccaagcacgtgggagatgccctgaagagccacagcagccacagcctgaggaagatctggacagtgggcatccccccctggggcgtgattgagaaccagagggacctgattggcaaggatgtggtgtgcctgtaccagaccctggacaaccccctgagcaagctgaccaccctgaacagcatgcacagccacttcatcctgagtgatgatggcaccgtgggcaagtatggaaatgagatgaagctgcggaggaacctggagaagtacctgagcctgcagaagatccactgccgcagccggcagggcgtgcctgtggtgggcctggtggtggagggcggccccaacgtcatcctgtctgtgtgggagaccgtgaaggacaaggaccctgtggtggtgtgtgagggcaccggccgggctgctgacctgctggccttcacccacaagcacctggctgatgagggcatgctgcggccccaggtgaaggaggagatcatctgcatgatccagaacaccttcaacttcagcctgaagcagagcaagcacctgttccagatcctgatggagtgcatggtgcaccgggactgcatcaccatctttgatgctgacagcgaggagcagcaggacctggacctggccatcctgacagccctgctgaagggcaccaacctgagcgccagcgagcagctgaacctggccatggcctgggacagagtggacatcgccaagaagcacatcctgatctatgagcagcactggaagccagatgccctggagcaggccatgtctgatgccctggtgatggacagagtggactttgtgaagctgctgattgaatatggagtgaacctgcaccgcttcctgaccatcccccggctggaggagctgtacaacaccaagcagggccccaccaacaccctgctgcaccacctggtgcaggatgtgaagcagcacaccctgctgagcggctaccgcatcaccctgattgatattggcctggtggtggagtacctgattggccgggcctaccgcagcaactacaccaggaagcacttccgggccctgtacaacaacctgtacaggaagtacaagcaccagaggcacagcagcggcaacagaaatgaatctgctgagagcaccctgcacagccagttcatcagaacagcccagccctacaagttcaaggagaagagcatcgtgctgcacaagagcaggaagaagagcaaggagcagaatgtgtctgatgatcctgagagcacaggcttcctgtacccctacaatgacctgctggtgtgggccgtgctgatgaagaggcagaagatggccatgttcttctggcagcacggggaggaggccaccgtgaaggccgtcatcgcctgcatcctgtaccgggccatggcccacgaggccaaggagagccacatggtggatgatgccagcgaggagctgaagaactacagcaagcagtttggccagctggccctggacctgctggagaaggccttcaagcagaatgaaagaatggccatgaccctgctgacctatgagctgaggaactggagcaacagcacctgcctgaagctggccgtgtctgggggcctgcggccctttgtgagccacacctgcacccagatgctgctgacagacatgtggatgggccgcctgaagatgaggaagaacagctggctgaagatcatcatcagcatcatcctgccccccaccatcctgaccctggagttcaagagcaaggccgagatgagccacgtgccccagagccaggacttccagttcatgtggtactacagcgaccagaatgccagcagcagcaaggagagcgcctctgtgaaggagtatgacctggagcggggccatgatgagaagctggatgagaaccagcacttcggcctggagagcggccaccagcacctgccctggaccaggaaggtgtatgagttctacagcgcccccatcgtgaagttctggttctacaccatggcctacctggccttcctgatgctgttcacctacacagtgctggtggagatgcagccccagcccagcgtgcaggagtggctggtgtccatctacatcttcaccaatgccatcgaggtggtgcgggagatctgcatcagcgagcccgggaagttcacccagaaggtgaaggtgtggatcagcgagtactggaacctgacagaaacagtggccatcggcctcttctctgctggctttgtgctgcgctggggagacccccccttccacacagctggccgcctcatctactgcatcgacatcatcttctggttcagccggctgctggacttctttgctgtgaaccagcacgccggcccctacgtgaccatgattgccaagatgacagccaacatgttctacatcgtcatcatcatggccatcgtgctgctgagctttggagtggccaggaaggccatcctgagccccaaggagccccccagctggagcctggcccgggacatcgtgtttgagccctactggatgatctacggggaggtgtatgctggggagattgatgtgtgcagcagccagcccagctgccccccaggcagcttcctgacccccttcctgcaggccgtgtacctgtttgtgcagtacatcatcatggtgaacctgctgattgccttcttcaacaacgtgtacctggacatggagagcatcagcaacaacctgtggaagtacaaccgctaccgctacatcatgacctaccacgagaagccctggctgcccccacccctcatcctgctgagccacgtgggcctgctgctgcggcggctgtgctgccaccgggcccctcatgaccaggaggagggagatgtgggcctgaagctgtacctgagcaaagaagacctgaagaagctgcatgactttgaggagcagtgtgtggagaagtacttccacgagaagatggaggatgtgaactgcagctgtgaggagcgcatccgggtgaccagcgagcgggtgacagagatgtacttccagctgaaggagatgaatgagaaggtgtccttcatcaaggacagcctgctgagcctggacagccaggtgggccacctgcaggacctgagcgccctgactgtggacaccctgaaggtgctgtctgctgtggacaccctgcaggaggatgaggccctgctggccaagaggaagcacagcacctgcaagaagctgccccacagctggagcaatgtcatctgtgccgaggtgctgggctccatggagattgctggggagaagaagtaccagtactacagcatgcccagcagcctgctgcggagcctggccggcggccgccaccccccccgggtgcagagaggagccctgctggagatcaccaacagcaagcgggaggccaccaacgtgagaaatgaccaggagcggcaggagacccagagcagcatcgtggtgtctggagtgagccccaaccggcaggcccacagcaaatatggccagttcctgctggtgcccagcaacctgaagagggtgcccttctctgctgagaccgtgctgcccctgagccggcccagcgtgcctgatgtgctggccacagagcaggacatccagacagaggtgctggtgcacctgaccggccagacccctgtggtgtctgactgggcctctgtggatgagcccaaggagaagcatgagcccatcgcccacctgctggatggccaggacaaggccgagcaggtgctgcccaccctgagctgcaccccagagcccatgaccatgagcagccccctgagccaggccaagatcatgcagacaggaggcggctacgtgaactgggccttctctgaaggagatgaaacaggagtcttcagcatcaagaagaagtggcagacctgcctgcccagcacctgtgacagcgacagcagccgctctgagcagcaccagaagcaggcccaggacagcagcctgagtgacaacagcaccaggtctgcccagagcagtgaatgttctgaggtgggcccctggctgcagcccaacaccagcttctggatcaaccccctgcggcgctaccggccctttgcccggagccacagcttccgcttccacaaggaggagaagctgatgaagatctgcaagatcaagaacctgagcggcagcagcgagatcggccagggcgcctgggtgaaggccaagatgctgaccaaggaccggcggctgagcaagaagaagaagaacacccagggcctgcaggtgcccatcatcaccgtgaatgcctgcagccagagcgaccagctgaaccctgagcccggggagaacagcatcagcgaggaggagtacagcaagaactggttcaccgtgtccaagttcagccacactggagtggagccctacatccaccagaagatgaagaccaaggagatcggccagtgtgccatccagatcagtgactacctgaagcagagccaggaggacctgagcaagaacagcctgtggaacagccgcagcaccaacctgaacagaaacagcctgcacgtgatcaagatgcccatcagcagcctcatcagcgagatcagcgccagcctgaagagcccccaggagccccaccaccactacagcgccattgaaagaaacaacctgatgaggctgagccagaccatccccttcacccctgtgcagctgtttgctggggaggagatcaccgtgtaccgcctggaggagagcagccccctgaacctggacaagtccatgagctcctggagccagaggggccgggccgccatgatccaggtgctgagccgggaggagatggatggcggcctgaggaaggccatgagggtggtgtccacctggagcgaagatgacatcctgaagccaggccaggtgttcatcgtgaagagcttcctgcctgaggtggtgaggacctggcacaagatcttccaggagagcacagtgctgcacctgtgcctgcgggagatccagcagcagagagctgcccagaagctgatctacaccttcaaccaggtgaagccccagaccatcccctacaccccccgcttcctggaggtgttcctgatctactgccacagcgccaaccagtggctgaccatcgagaagtacatgaccggggagttcaggaagtacaacaacaacaatggagatgagatcacccccaccaacaccctggaggagctgatgctggccttcagccactggacctatgagtacaccagaggagagctgctggtgctggacctgcagggcgtgggggagaacctgacagaccccagcgtcatcaagccagaggtgaagcagagccggggcatggtgtttggacctgccaacctgggggaggatgccatccggaacttcatcgccaagcaccactgcaacagctgctgcaggaagctgaagctgcctgacctgaagagaaatgactacagccctgagcgcatcaacagcaccttcggcctggagatcaagattgagagcgctgaggagcccccagcccgggagactggaagaaacagcccagaagatgacatgcagctgtag

SEQ ID NO: 173842 - DNA, 5598 bp, synthetic construct
  misc_feature 1..5598: note = Description of Artificial Sequence: Synthetic coding sequence
  source 1..5598: mol_type = other DNA
atgagccagaagtcctggattgagagcaccctgaccaagagagaatgtgtgtacatcatccccagcagcaaggacccccaccgctgcctgcccggctgccagatctgccagcagctggtgcgctgcttctgtggccgcctggtgaagcagcacgcctgcttcaccgccagcctggccatgaagtacagtgatgtgaagctgggggaccacttcaaccaggccatcgaggagtggagcgtggagaagcacacagagcagagccccacagatgcctacggcgtcatcaacttccagggcggcagccacagctaccgggccaagtatgtgcggctgtcctatgacaccaagccagaggtgatcctgcagctgctgctgaaggagtggcagatggagctgcccaagctggtgatctctgtgcacggcggcatgcagaagtttgagctgcacccccgcatcaagcagctgctgggcaagggcctcatcaaggctgctgtgaccactggagcctggatcctgactggaggagtgaacacaggagtggccaagcacgtgggagatgccctgaaggagcacgccagccgcagcagcaggaagatctgcaccatcggcatcgccccctggggcgtgattgaaaatagaaatgacctggtgggcagagatgtggtggccccctaccagaccctgctgaaccccctgagcaagctgaatgtgctgaacaacctgcacagccacttcatcctggtggatgatggcaccgtgggcaagtacggggctgaggtgcggctgcggcgggagctggagaagaccatcaaccagcagaggatccacgccagaattggccagggcgtgcctgtggtggccctgatctttgagggcggccccaacgtcatcctgactgtgctggagtacctgcaggagagcccccctgtgcctgtggtggtgtgtgagggcaccggccgggctgctgacctgctggcctacatccacaagcagacagaggagggcggcaacctgcctgatgctgctgagccagacatcatcagcaccatcaagaagaccttcaactttggccagaatgaggccctgcacctgttccagaccctgatggagtgcatgaagaggaaggagctgatcaccgtcttccacatcggcagtgatgagcaccaggacattgatgtggccatcctgacagccctgctgaagggcaccaatgccagcgcctttgaccagctgatcctgaccctggcctgggacagagtggacatcgccaagaaccacgtgtttgtgtatggccagcagtggctggtgggcagcctggagcaggccatgctggatgccctggtgatggacagagtggcctttgtgaagctgctgattgaaaatggagtgtccatgcacaagttcctgaccatcccccggctggaggagctgtacaacaccaagcagggccccaccaaccccatgctgttccacctggtgagagatgtgaagcagggcaacctgcccccaggctacaagatcaccctgattgacatcggcctggtgattgagtacctgatgggcggcacctaccgctgcacctacaccaggaagcgcttccgcctcatctacaacagcctgggcggcaacaacagaagaagtggaagaaacaccagcagcagcaccccccagctgaggaagagccatgagagctttggaaacagagctgacaagaaggagaagatgaggcacaaccacttcatcaagacagcccagccctaccggcccaagattgacacagtgatggaggagggcaagaagaagaggaccaaggatgaaattgtggacattgatgatcctgagaccaagcgcttcccctaccccctgaatgagctgctgatctgggcctgcctgatgaagaggcaggtgatggcccgcttcctgtggcagcacggggaggagagcatggccaaggccctggtggcctgcaagatctaccgctccatggcctatgaggccaagcagagcgacctggtggatgacaccagcgaggagctgaagcagtacagcaatgactttggccagctggccgtggagctgctggagcagagcttccggcaggatgagaccatggccatgaagctgctgacctatgagctgaagaactggagcaacagcacctgcctgaagctggccgtgagcagccggctgcggccctttgtggcccacacctgcacccagatgctgctgagtgacatgtggatgggccgcctgaacatgaggaagaacagctggtacaaggtgatcctgagcatcctggtgcccccagccatcctgctgctggagtacaagaccaaggccgagatgagccacatcccccagagccaggatgcccaccagatgaccatggatgattctgagaacaacttccagaacatcacagaggagatccccatggaggtgttcaaggaggtgcgcatcctggacagcaatgaaggcaagaatgagatggagatccagatgaagagcaagaagctgcccatcaccaggaagttctacgccttctaccacgcccccatcgtgaagttctggttcaacaccctggcctacctgggcttcctgatgctgtacacctttgtggtgctggtgcagatggagcagctgcccagcgtgcaggagtggatcgtcatcgcctacatcttcacctacgccatcgagaaggtgcgggagatcttcatgtctgaggccggcaaggtgaaccagaagatcaaggtgtggttcagtgactacttcaacatcagtgacaccatcgccatcatctccttcttcatcggcttcggcctgcgctttggagccaagtggaactttgccaatgcctatgacaaccacgtgtttgtggccggccgcctcatctactgcctgaacatcatcttctggtacgtgcggctgctggacttcctggccgtgaaccagcaggccggcccctacgtgatgatgattggcaagatggtggccaacatgttctacatcgtggtgatcatggccctggtgctgctgagctttggagtgcccaggaaggccatcctgtacccccatgaggcccccagctggaccctggccaaggacatcgtgttccacccctactggatgatctttggagaggtgtatgcctatgaaattgatgtgtgtgccaatgacagcgtcatcccccagatctgtggccctggcacctggctgacccccttcctgcaggccgtgtacctgtttgtgcagtacatcatcatggtgaacctgctgattgccttcttcaacaacgtgtacctgcaggtgaaggccatcagcaacatcgtgtggaagtaccagcgctaccacttcatcatggcctaccacgagaagcctgtgctgcccccacccctcatcatcctgagccacatcgtgtccctcttctgctgcatctgcaagaggaggaagaaggacaagaccagtgatggccccaagctgttcctgacagaggaggaccagaagaagctgcatgactttgaggagcagtgtgtggagatgtacttcaatgagaaggatgacaagttccacagcggcagcgaggagcgcatccgggtgacctttgagcgggtggagcagatgtgcatccagatcaaggaggtgggggacagagtgaactacatcaagaggagcctgcagagcctggacagccagatcggccacctgcaggacctgagcgccctgactgtggacaccctgaagaccctgacagcccagaaggccagcgaggccagcaaggtgcacaatgagatcacccgggagctgagcatcagcaagcacctggcccagaacctgattgatgatggccctgtgcggcccagcgtgtggaagaagcacggcgtggtgaacaccctgagcagcagcctgccccagggcgacctggagagcaacaaccccttccactgcaacatcctgatgaaggatgacaaggacccccagtgcaacatcttcggccaggacctgcctgctgtgccccagaggaaggagttcaacttccctgaggccggcagcagcagcggggccctcttccccagcgctgtgagccccccagagctgcggcagaggctgcacggcgtggagctgctgaagatcttcaacaagaaccagaagctgggcagcagcagcaccagcatcccccacctgagcagcccccccaccaagttctttgtgtccacccccagccagcccagctgcaagagccacctggagaccggcaccaaggaccaggagaccgtgtgcagcaaggccacagaaggagacaacacagaatttggagcctttgtgggccaccgggacagcatggacctgcagcgcttcaaggagaccagcaacaagatcaagatcctgagcaacaacaacaccagcgagaacaccctgaagagggtgagcagcctggccggcttcacagactgccacaggaccagcatccctgtgcacagcaagcaggccgagaagatcagcagaagacccagcacagaggacacccatgaggtggacagcaaggccgccctgatcccagactggctgcaggaccggcccagcaaccgggagatgcccagcgaggagggcaccctgaatggcctgaccagccccttcaagccagccatggacaccaactactactacagcgctgtggagaggaacaacctgatgaggctgagccagagcatccccttcacccctgtgcccccaagaggagagcctgtgacagtgtaccgcctggaggagagcagccccaacatcctgaacaacagcatgagctcctggagccagctgggcctgtgtgccaagattgagttcctgagcaaggaggagatgggcggcggcctgcggcgggctgtgaaggtgcagtgcacctggagcgagcatgacatcctgaagagcggccacctgtacatcatcaagagcttcctgcctgaggtggtgaacacctggagcagcatctacaaggaggacacagtgctgcacctgtgcctgcgggagatccagcagcagagagctgcccagaagctgacctttgccttcaaccagatgaagcccaagagcatcccctacagcccccgcttcctggaggtgttcctgctgtactgccacagcgctggccagtggtttgctgtggaggagtgcatgaccggggagttcaggaagtacaacaacaacaatggagatgagatcatccccaccaacaccctggaggagatcatgctggccttcagccactggacctatgagtacaccagaggagagctgctggtgctggacctgcagggcgtgggggagaacctgacagaccccagcgtcatcaaggccgaggagaagaggagctgtgacatggtgtttggacctgccaacctgggggaggatgccatcaagaacttccgggccaagcaccactgcaacagctgctgcaggaagctgaagctgcctgacctgaagagaaatgactacaccccagacaagatcatcttcccccaggatgagcccagcgacctgaacctgcagcccggcaacagcaccaaggagagcgagagcaccaacagcgtgcggctgatgctgtag

SEQ ID NO: 173843 - DNA, 3315 bp, synthetic construct
  misc_feature 1..3315: note = Description of Artificial Sequence: Synthetic coding sequence
  source 1..3315: mol_type = other DNA
atgtccttccgggccgcccggctgtccatgaggaacagaagaaatgacaccctggacagcaccaggaccctgtacagcagcgccagccgcagcacagacctgagctacagcgagagtgacctggtgaacttcatccaggccaacttcaagaagagagaatgtgtgttcttcaccaaggacagcaaggccacagaaaatgtgtgcaagtgtggctacgcccagagccagcacatggagggcacccagatcaaccagagcgagaagtggaactacaagaagcacaccaaggagttccccacagatgcctttggagacatccagtttgagaccctgggcaagaagggcaagtacatccggctgagctgtgacacagatgctgagatcctgtatgagctgctgacccagcactggcacctgaagacccccaacctggtgatctctgtgactggaggagccaagaactttgccctgaagcccaggatgaggaagatcttcagccgcctcatctacatcgcccagagcaaaggagcctggatcctgactggaggcacccactacggcctgatgaagtacatcggggaggtggtgcgggacaacaccatcagccgcagcagtgaagaaaatattgtggccatcggcattgctgcctggggcatggtgagcaacagagacaccctcatccggaactgtgatgctgagggctacttcctggcccagtacctgatggatgacttcacccgggaccccctgtacatcctggacaacaaccacacccacctgctgctggtggacaatggctgccacggccaccccaccgtggaggccaagctgaggaaccagctggagaagtacatcagcgagaggaccatccaggacagcaactatggaggcaagatccccatcgtgtgctttgcccagggcggcggcaaggagaccctgaaggccatcaacaccagcatcaagaacaagatcccctgtgtggtggtggagggcagcggccagattgctgatgtgattgccagcctggtggaggtggaggatgccctgaccagcagcgctgtgaaggagaagctggtgcgcttcctgcccaggacagtgtcccggctgcctgaggaggagacagagagctggatcaagtggctgaaggagatcctggagtgcagccacctgctgaccgtcatcaagatggaggaggccggagatgaaattgtgtccaatgccatctcctatgccctgtacaaggccttcagcaccagcgagcaggacaaggacaactggaatggccagctgaagctgctgctggagtggaaccagctggacctggccaatgatgagatcttcaccaatgaccggcgctgggagagcgctgacctgcaggaggtgatgttcaccgccctgatcaaggaccggcccaagtttgtgcggctcttcctggagaatggcctgaacctgaggaagttcctgacccatgatgtgctgacagagctgttcagcaaccacttcagcaccctggtgtacagaaacctgcagatcgccaagaacagctacaatgatgccctgctgacctttgtgtggaagctggtggccaacttccggcggggcttcaggaaggaggacagaaatggaagagatgagatggacatcgagctgcatgatgtgagccccatcaccaggcaccccctgcaggccctcttcatctgggccatcctgcagaacaagaaggagctgagcaaggtgatctgggagcagacccggggctgcaccctggccgccctgggcgccagcaagctgctgaagaccctggccaaggtgaagaatgacatcaatgctgctggggagagcgaggagctggccaatgaatatgagaccagggctgtggagctgttcacagagtgctacagcagtgatgaggacctggccgagcagctgctggtgtacagctgtgaggcctggggcggcagcaactgcctggagctggccgtggaggccacagaccagcacttcatcgcccagcccggggtgcagaacttcctgagcaagcagtggtatggagagatcagccgggacaccaagaactggaagatcatcctgtgcctcttcatcatccccctggtgggctgcggctttgtgtccttcaggaagaagcctgtggacaagcacaagaagctgctgtggtactacgtggccttcttcaccagcccctttgtggtgttctcctggaatgtggtgttctacatcgccttcctgctgctgtttgcctacgtgctgctgatggacttccacagcgtgccccaccccccagagctggtgctgtacagcctggtgtttgtgctcttctgtgatgaggtgcggcagtggtacgtgaatggagtgaactacttcacagacctgtggaatgtgatggacaccctgggcctcttctacttcatcgccggcatcgtgttccggctgcacagcagcaacaagagcagcctgtacagcggccgggtcatcttctgcctggactacatcatcttcaccctgcggctcatccacatcttcaccgtgtccaggaacctgggccccaagatcatcatgctgcagaggatgctgattgatgtgttcttcttcctgttcctgtttgctgtgtggatggtggcctttggagtggcccggcagggcatcctgcggcagaatgagcagcgctggcgctggatcttccgcagcgtcatctatgagccctacctggccatgtttggccaggtgcccagtgatgtggatggcaccacctatgactttgcccactgcaccttcaccggaaatgaaagcaagcccctgtgtgtggagctggatgagcacaacctgccccgcttccctgagtggatcaccatccccctggtgtgcatctacatgctgagcaccaacatcctgctggtgaacctgctggtggccatgtttggctacacagtgggcaccgtgcaggagaacaatgaccaggtgtggaagttccagcgctacttcctggtgcaggagtactgcagccggctgaacatccccttccccttcatcgtgtttgcctacttctacatggtggtgaagaagtgcttcaagtgctgctgcaaggagaagaacatggagagctctgtgtgctgcttcaagaatgaagataatgagaccctggcctgggagggcgtgatgaaggagaactacctggtgaagatcaacaccaaggccaatgacaccagcgaggagatgaggcaccgcttccggcagctggacaccaagctgaatgacctgaagggcctgctgaaggagatcgccaacaagatcaagtag

SEQ ID NO: 173844 - DNA, 579 bp, synthetic construct
  misc_feature 1..579: note = Description of Artificial Sequence: Synthetic coding sequence
  source 1..579: mol_type = other DNA
atgaagagcttcctgcctgtgcacaccatcgtgctgatcagagaaaatgtgtgcaagtgtggctacgcccagagccagcacatggagggcacccagatcaaccagagcgagaagtggaactacaagaagcacaccaaggagttccccacagatgcctttggagacatccagtttgagaccctgggcaagaagggcaagtacatccggctgagctgtgacacagatgctgagatcctgtatgagctgctgacccagcactggcacctgaagacccccaacctggtgatctctgtgactggaggagccaagaactttgccctgaagcccaggatgaggaagatcttcagccgcctcatctacatcgcccagagcaaaggagcctggatcctgactggaggcacccactacggcctgatgaagtacatcggggaggtggtgcgggacaacaccatcagccgcagcagtgaagaaaatattgtggccatcggcattgctgcctggggcatggtgagcaacagagacaccctcatccggaactgtgatgctgaggtgcctgtgggccaggaggaggtgtgctag

SEQ ID NO: 173845 - DNA, 498 bp, synthetic construct
  misc_feature 1..498: note = Description of Artificial Sequence: Synthetic coding sequence
  source 1..498: mol_type = other DNA
atggagggcacccagatcaaccagagcgagaagtggaactacaagaagcacaccaaggagttccccacagatgccttcggggacatccagtttgagaccctgggcaagaagggcaagtacatccggctgagctgtgacacagatgctgagatcctgtatgagctgctgacccagcactggcacctgaagacccccaacctggtgatctctgtgactggaggagccaagaactttgccctgaagcccaggatgaggaagatcttcagccgcctcatctacatcgcccagagcaagggggcctggatcctgaccggcggcacccactacggcctgatgaagtacatcggggaggtggtgcgggacaacaccatcagccgcagcagcgaggagaacatcgtggccatcggcattgctgcctggggcatggtgagcaacagagacaccctcatccggaactgtgatgctgaggtgcctgtgggccaggaggaggtgtgctag

SEQ ID NO: 173846 - DNA, 2049 bp, synthetic construct
  misc_feature 1..2049: note = Description of Artificial Sequence: Synthetic coding sequence
  source 1..2049: mol_type = other DNA
atgcaggccatcaacaccagcatcaagaacaagatcccctgtgtggtggtggagggcagcggccagattgctgatgtgattgccagcctggtggaggtggaggatgccctgaccagcagcgctgtgaaggagaagctggtgcgcttcctgcccaggacagtgtcccggctgcctgaggaggagacagagagctggatcaagtggctgaaggagatcctggagtgcagccacctgctgaccgtcatcaagatggaggaggccggagatgaaattgtgtccaatgccatctcctatgccctgtacaaggccttcagcaccagcgagcaggacaaggacaactggaatggccagctgaagctgctgctggagtggaaccagctggacctggccaatgatgagatcttcaccaatgaccggcgctgggagagcgctgacctgcaggaggtgatgttcaccgccctgatcaaggaccggcccaagtttgtgcggctcttcctggagaatggcctgaacctgaggaagttcctgacccatgatgtgctgacagagctgttcagcaaccacttcagcaccctggtgtacagaaacctgcagatcgccaagaacagctacaatgatgccctgctgacctttgtgtggaagctggtggccaacttccggcggggcttcaggaaggaggacagaaatggaagagatgagatggacatcgagctgcatgatgtgagccccatcaccaggcaccccctgcaggccctcttcatctgggccatcctgcagaacaagaaggagctgagcaaggtgatctgggagcagacccggggctgcaccctggccgccctgggcgccagcaagctgctgaagaccctggccaaggtgaagaatgacatcaatgctgctggggagagcgaggagctggccaatgaatatgagaccagggctgtggagctgttcacagagtgctacagcagtgatgaggacctggccgagcagctgctggtgtacagctgtgaggcctggggcggcagcaactgcctggagctggccgtggaggccacagaccagcacttcatcgcccagcccggggtgcagtggtacgtgaatggagtgaactacttcacagacctgtggaatgtgatggacaccctgggcctcttctacttcatcgccggcatcgtgttccggctgcacagcagcaacaagagcagcctgtacagcggccgggtcatcttctgcctggactacatcatcttcaccctgcggctcatccacatcttcaccgtgtccaggaacctgggccccaagatcatcatgctgcagaggatgctgattgatgtgttcttcttcctgttcctgtttgctgtgtggatggtggcctttggagtggcccggcagggcatcctgcggcagaatgagcagcgctggcgctggatcttccgcagcgtcatctatgagccctacctggccatgtttggccaggtgcccagtgatgtggatggcaccacctatgactttgcccactgcaccttcaccggaaatgaaagcaagcccctgtgtgtggagctggatgagcacaacctgccccgcttccctgagtggatcaccatccccctggtgtgcatctacatgctgagcaccaacatcctgctggtgaacctgctggtggccatgtttggctacacagtgggcaccgtgcaggagaacaatgaccaggtgtggaagttccagcgctacttcctggtgcaggagtactgcagccggctgaacatccccttccccttcatcgtgtttgcctacttctacatggtggtgaagaagtgcttcaagtgctgctgcaaggagaagaacatggagagctctgtgtgctgcttcaagaatgaagataatgagaccctggcctgggagggcgtgatgaaggagaactacctggtgaagatcaacaccaaggccaatgacaccagcgaggagatgaggcaccgcttccggcagctggacaccaagctgaatgacctgaagggcctgctgaaggagatcgccaacaagatcaagtag

SEQ ID NO: 173847 - DNA, 2514 bp, synthetic construct
  misc_feature 1..2514: note = Description of Artificial Sequence: Synthetic coding sequence
  source 1..2514: mol_type = other DNA
atggagaccctgaccccaggccacctgcagcccagccccagcagcccccggccccgggccgcccctggcagcctgggccgggtgacccggcggcggctgagccgctggatcgccctgaccaggaaggtgtcctggaccccagcccggcccagccagagcgccctgctgagccccagccggggccaggagacagcccctcctgtgcccggctgctgccccaggaccctgagccccccagccccccggcggcccagcggctccatgattgctggggtgtccctgaagcccctgctgcgcatcacagcccgcatctggagggcctgctgcagcagctgcagaagagcccggagcaccagccagaccaccagcagcaaggtggccccagccctgggcagcggccgggccccagccctggcctgcccagacccccccctgtgcctgagtgaccctgagaccgggaagacctgcctgctgaaggccatgctgaacctgcatgatggccagaacaccaccatccccctgctgctggagatcgcccggcagacagacagcctgaaggagctggtgaatgccagctacacagacagctactacaagggccagacagccctgcacatcgccatcgagaggaggaacatggccctggtgaccctgctggtggagaatggagcagatgtgcaggccgccgcccatggagacttcttcaagaagaccaagggccggcccggcttctactttggagagctgcccctgagcctggccgcctgcaccaaccagctgggcatcgtgaagttcctgctgcagaacagctggcagacagctgacatcagcgcccgggacagcgtgggcaacacagtgctgcacgccctggtggaggtggccgacaacacagctgacaacaccaagtttgtgacctccatgtacaatgagatcctgatgctgggcgccaagctgcaccccaccctgaagctggaggagctgaccaacaagaagggcatgacccccctggccctggccgccggcaccgggaagattggagtgctggcctacatcctgcagcgggagatccaggagcctgagtgccgccacctgagcaggaagttcacagagtgggcctacggccctgtgcacagcagcctgtatgacctgagctgcatcgacacctgtgagaagaacagcgtgctggaggtgattgcctacagcagcagcgagacccccaacagacatgacatgctgctggtggagcccctgaaccggctgctgcaggacaagtgggacagatttgtgaagaggatcttctacttcaacttcctggtgtactgcctgtacatgatcatcttcaccatggccgcctactacagacctgtggatggcctgccccccttcaagatggagaagacaggagactacttccgggtgactggagagatcctgtctgtgctgggcggcgtgtacttcttcttccggggcatccagtacttcctgcagaggcggcccagcatgaagaccctgtttgtggacagctacagcgagatgctgttcttcctgcagagcctcttcatgctggccaccgtggtgctgtacttcagccacctgaaggagtatgtggcctccatggtgttcagcctggccctgggctggaccaacatgctgtactacacccggggcttccagcagatgggcatctatgctgtgatgattgagaagatgatcctgcgggacctgtgccgcttcatgtttgtgtacatcgtgttcctgtttggcttcagcacagctgtggtgaccctgattgaagatggcaagaatgacagcctgcccagcgagagcaccagccaccgctggaggggccctgcctgccggcccccagacagcagctacaacagcctgtacagcacctgcctggagctgttcaagttcaccatcggcatgggagacctggagttcacagagaactatgacttcaaggctgtgttcatcatcctgctgctggcctacgtgatcctgacctacatcctgctgctgaacatgctgattgccctgatgggagagaccgtgaacaagatcgcccaggagagcaagaacatctggaagctgcagagggccatcaccatcctggacacagagaagagcttcctgaagtgcatgaggaaggccttccgcagcggcaagctgctgcaggtgggctacaccccagatggcaaggatgactaccgctggtgcttccgggtggatgaggtgaactggaccacctggaacaccaacgtgggcatcatcaatgaagaccccggcaactgtgaaggagtgaagaggaccctgtccttcagcctgcggagcagccgggtgtctggccgccactggaagaactttgccctggtgcccctgctgcgggaggccagcgcccgggaccggcagagcgcccagcctgaggaggtgtacctgcggcagttcagcggcagcctgaagccagaagatgctgaggtgttcaagagccctgctgccagcggggagaagtag

SEQ ID NO: 173848 - DNA, 2340 bp, synthetic construct
  misc_feature 1..2340: note = Description of Artificial Sequence: Synthetic coding sequence
  source 1..2340: mol_type = other DNA
atgaagaagtggagcagcacagacctgggcgctgctgctgaccccctgcagaaggacacctgcccagaccccctggatggagaccccaacagcaggcctcctccagccaagccccagctgagcacagccaagagcaggacccggctgtttgggaagggggacagcgaggaggccttccctgtggactgcccccatgaggagggggagctggacagctgccccaccatcaccgtgtcccctgtgatcaccatccagaggcctggagatggccccaccggggcccggctgctgagccaggacagcgtggccgccagcacagagaagaccctgcggctgtatgacagaagaagcatctttgaagctgtggcccagaacaactgccaggacctggagagcctgctgctcttcctgcagaagagcaagaagcacctgacagacaatgagttcaaggaccctgagaccgggaagacctgcctgctgaaggccatgctgaacctgcatgatggccagaacaccaccatccccctgctgctggagatcgcccggcagacagacagcctgaaggagctggtgaatgccagctacacagacagctactacaagggccagacagccctgcacatcgccatcgagaggaggaacatggccctggtgaccctgctggtggagaatggagcagatgtgcaggccgccgcccatggagacttcttcaagaagaccaagggccggcccggcttctactttggagagctgcccctgagcctggccgcctgcaccaaccagctgggcatcgtgaagttcctgctgcagaacagctggcagacagctgacatcagcgcccgggacagcgtgggcaacacagtgctgcacgccctggtggaggtggccgacaacacagctgacaacaccaagtttgtgacctccatgtacaatgagatcctgatgctgggcgccaagctgcaccccaccctgaagctggaggagctgaccaacaagaagggcatgacccccctggccctggccgccggcaccgggaagattggcaacagacatgacatgctgctggtggagcccctgaaccggctgctgcaggacaagtgggacagatttgtgaagaggatcttctacttcaacttcctggtgtactgcctgtacatgatcatcttcaccatggccgcctactacagacctgtggatggcctgccccccttcaagatggagaagacaggagactacttccgggtgactggagagatcctgtctgtgctgggcggcgtgtacttcttcttccggggcatccagtacttcctgcagaggcggcccagcatgaagaccctgtttgtggacagctacagcgagatgctgttcttcctgcagagcctcttcatgctggccaccgtggtgctgtacttcagccacctgaaggagtatgtggcctccatggtgttcagcctggccctgggctggaccaacatgctgtactacacccggggcttccagcagatgggcatctatgctgtgatgattgagaagatgatcctgcgggacctgtgccgcttcatgtttgtgtacatcgtgttcctgtttggcttcagcacagctgtggtgaccctgattgaagatggcaagaatgacagcctgcccagcgagagcaccagccaccgctggaggggccctgcctgccggcccccagacagcagctacaacagcctgtacagcacctgcctggagctgttcaagttcaccatcggcatgggagacctggagttcacagagaactatgacttcaaggctgtgttcatcatcctgctgctggcctacgtgatcctgacctacatcctgctgctgaacatgctgattgccctgatgggagagaccgtgaacaagatcgcccaggagagcaagaacatctggaagctgcagagggccatcaccatcctggacacagagaagagcttcctgaagtgcatgaggaaggccttccgcagcggcaagctgctgcaggtgggctacaccccagatggcaaggatgactaccgctggtgcttccgggtggatgaggtgaactggaccacctggaacaccaacgtgggcatcatcaatgaagaccccggcaactgtgaaggagtgaagaggaccctgtccttcagcctgcggagcagccgggtgtctggccgccactggaagaactttgccctggtgcccctgctgcgggaggccagcgcccgggaccggcagagcgcccagcctgaggaggtgtacctgcggcagttcagcggcagcctgaagccagaagatgctgaggtgttcaagagccctgctgccagcggggagaagtag

SEQ ID NO: 173849 - DNA, 2520 bp, synthetic construct; identical to SEQ ID NO: 173779
  misc_feature 1..2520: note = Description of Artificial Sequence: Synthetic coding sequence
  source 1..2520: mol_type = other DNA

SEQ ID NO: 173850 - DNA, 2520 bp, synthetic construct; identical to SEQ ID NO: 173779
  misc_feature 1..2520: note = Description of Artificial Sequence: Synthetic coding sequence
  source 1..2520: mol_type = other DNA

SEQ ID NO: 173851 - DNA, 2553 bp, synthetic construct
  misc_feature 1..2553: note = Description of Artificial Sequence: Synthetic coding sequence
  source 1..2553: mol_type = other DNA
atgaagaagtggagcagcacagacctgggcgctgctgctgaccccctgcagaaggacacctgcccagaccccctggatggagaccccaacagcaggcctcctccagccaagccccagctgagcacagccaagagcaggacccggctgtttgggaagggggacagcgaggaggccttccctgtggactgcccccatgaggagggggagctggacagctgccccaccatcaccgtgtcccctgtgatcaccatccagaggcctggagatggccccaccggggcccggctgctgagccaggacagcgtggccgccagcacagagaagaccctgcggctgtatgacagaagaagcatctttgaagctgtggcccagaacaactgccaggacctggagagcctgctgctcttcctgcagaagagcaagaagcacctgacagacaatgagttcaaggaccctgagaccgggaagacctgcctgctgaaggccatgctgaacctgcatgatggccagaacaccaccatccccctgctgctggagatcgcccggcagacagacagcctgaaggagctggtgaatgccagctacacagacagctactacaagggccagacagccctgcacatcgccatcgagaggaggaacatggccctggtgaccctgctggtggagaatggagcagatgtgcaggccgccgcccatggagacttcttcaagaagaccaagggccggcccggcttctactttggagagctgcccctgagcctggccgcctgcaccaaccagctgggcatcgtgaagttcctgctgcagaacagctggcagacagctgacatcagcgcccgggacagcgtgggcaacacagtgctgcacgccctggtggaggtggccgacaacacagctgacaacaccaagtttgtgacctccatgtacaatgagatcctgatgctgggcgccaagctgcaccccaccctgaagctggaggagctgaccaacaagaagggcatgacccccctggccctggccgccggcaccgggaagattggagtgattgaaaatggcccccccctgtccttcatggtgctggcctacatcctgcagcgggagatccaggagccagaatgtcgccacctgagcaggaagttcacagagtgggcctacggccctgtgcacagcagcctgtatgacctgagctgcatcgacacctgtgagaagaacagcgtgctggaggtgattgcctacagcagcagcgagacccccaacagacatgacatgctgctggtggagcccctgaaccggctgctgcaggacaagtgggacagatttgtgaagaggatcttctacttcaacttcctggtgtactgcctgtacatgatcatcttcaccatggccgcctactacagacctgtggatggcctgccccccttcaagatggagaagacaggagactacttccgggtgactggagagatcctgtctgtgctgggcggcgtgtacttcttcttccggggcatccagtacttcctgcagaggcggcccagcatgaagaccctgtttgtggacagctacagcgagatgctgttcttcctgcagagcctcttcatgctggccaccgtggtgctgtacttcagccacctgaaggagtatgtggcctccatggtgttcagcctggccctgggctggaccaacatgctgtactacacccggggcttccagcagatgggcatctatgctgtgatgattgagaagatgatcctgcgggacctgtgccgcttcatgtttgtgtacatcgtgttcctgtttggcttcagcacagctgtggtgaccctgattgaagatggcaagaatgacagcctgcccagcgagagcaccagccaccgctggaggggccctgcctgccggcccccagacagcagctacaacagcctgtacagcacctgcctggagctgttcaagttcaccatcggcatgggagacctggagttcacagaaaattatgacttcaaggctgtgttcatcatcctgctgctggcctacgtgatcctgacctacatcctgctgctgaacatgctgattgccctgatgggagaaacagtgaacaagatcgcccaggagagcaagaacatctggaagctgcagagggccatcaccatcctggacacagagaagagcttcctgaagtgcatgaggaaggccttccgcagcggcaagctgctgcaggtgggctacaccccagatggcaaggatgactaccgctggtgcttccgggtggatgaggtgaactggaccacctggaacaccaacgtgggcatcatcaatgaagatcctggcaactgtgagggcgtgaagaggaccctgtccttcagcctgcggagcagccgggtgtctggccgccactggaagaactttgccctggtgcccctgctgcgggaggccagcgcccgggaccggcagagcgcccagcctgaggaggtgtacctgcggcagttcagcggcagcctgaagccagaagatgctgaggtgttcaagagccctgctgccagcggggagaagtag

SEQ ID NO: 173852 - DNA, 2295 bp, synthetic construct
  misc_feature 1..2295: note = Description of Artificial Sequence: Synthetic coding sequence
  source 1..2295: mol_type = other DNA
atgaccagccccagcagcagccctgtgttccggctggagaccctggatggcggccaggaggatggcagcgaggccgaccggggcaagctggactttggcagcggcctgccccccatggagagccagttccagggcgaggacaggaagtttgccccccagatccgggtgaacctgaactacaggaagggcaccggggccagccagcctgaccccaacagatttgaccgggacaggctcttcaatgctgtgtcccggggcgtgcctgaggacctggccggcctgcctgagtacctgagcaagaccagcaagtacctgacagacagcgagtacacagagggcagcacaggcaagacctgcctgatgaaggctgtgctgaacctgaaggatggagtgaatgcctgcatcctgcccctgctgcagattgaccgggacagcggcaacccccagcccctggtgaatgcccagtgcacagatgactactaccggggccacagcgccctgcacatcgccatcgagaagaggagcctgcagtgtgtgaagctgctggtggagaatggagccaacgtgcacgcccgggcctgtggccgcttcttccagaagggccagggcacctgcttctactttggagagctgcccctgagcctggccgcctgcaccaagcagtgggatgtggtgtcctacctgctggagaacccccaccagcctgccagcctgcaggccacagacagccagggcaacacagtgctgcacgccctggtgatgatcagtgacaacagcgcagaaaatattgccctggtgacctccatgtatgatggcctgctgcaggccggggcccggctgtgccccaccgtgcagctggaggacatccggaacctgcaggacctgacccccctgaagctggccgccaaggagggcaagattgagatcttccgccacatcctgcagcgggagttcagcggcctgagccacctgagcaggaagttcacagagtggtgctacggccctgtgcgggtgtccctgtatgacctggcctctgtggacagctgtgaagaaaattctgtgctggagatcatcgccttccactgcaagagcccccaccgccacaggatggtggtgctggagcccctgaacaagctgctgcaggccaagtgggacctgctgatccccaagttcttcctgaacttcctgtgcaacctgatctacatgttcatcttcaccgctgtggcctaccaccagcccaccctgaagaagcaggccgccccccacctgaaggccgaggtgggcaacagcatgctgctgaccggccacatcctgatcctgctgggcggcatctacctgctggtgggccagctgtggtacttctggaggagacatgtgttcatctggatctccttcatcgacagctactttgagatcctcttcctgttccaggccctgctgactgtggtgtcccaggtgctgtgcttcctggccatcgagtggtacctgcccctgctggtgtctgccctggtgctgggctggctgaacctgctgtactacacccggggcttccagcacacaggcatctacagcgtgatgatccagaaggtgatcctgcgggacctgctgcgcttcctgctgatctacctggtgttcctgtttggatttgctgtggccctggtgtccctgagccaggaggcctggaggcctgaggcccccaccggccccaatgccacagagagcgtgcagcccatggagggccaggaggatgagggcaatggagcccagtaccggggcatcctggaggccagcctggagctgttcaagttcaccatcggcatgggagagctggccttccaggagcagctgcacttccggggcatggtgctgctgctgctgctggcctacgtgctgctgacctacatcctgctgctgaacatgctgattgccctgatgtctgagaccgtgaacagcgtggccacagacagctggagcatctggaagctgcagaaggccatctctgtgctggagatggagaatggctactggtggtgcaggaagaagcagagagctggggtgatgctgactgtgggcaccaagccagatggcagcccagatgagcgctggtgcttccgggtggaggaggtgaactgggcctcctgggagcagaccctgcccaccctgtgtgaggaccccagcggggccggcgtgcccaggaccctggagaaccctgtgctggccagcccccccaaggaggatgaagatggagcctctgaagaaaattatgtgcctgtgcagctgctgcagagcaactag

SEQ ID NO: 173853 - DNA, 801 bp, synthetic construct
  misc_feature 1..801: note = Description of Artificial Sequence: Synthetic coding sequence
  source 1..801: mol_type = other DNA
tgagacttcagcctgggcgtgcccagctggtggtgcctgatctgcttcaacatcggccccagcgtgggccccagccagcctgaccccaacagatttgaccgggacaggctcttcaatgctgtgtcccggggcgtgcctgaggacctggccggcctgcctgagtacctgagcaagaccagcaagtacctgacagacagcgagtacacagagggcagcacaggcaagacctgcctgatgaaggctgtgctgaacctgaaggatggagtgaatgcctgcatcctgcccctgctgcagattgaccgggacagcggcaacccccagcccctggtgaatgcccagtgcacagatgactactaccggggccacagcgccctgcacatcgccatcgagaagaggagcctgcagtgtgtgaagctgctggtggagaatggagccaacgtgcacgcccgggcctgtggccgcttcttccagaagggccagggcacctgcttctactttggagagctgcccctgagcctggccgcctgcaccaagcagtgggatgtggtgtcctacctgctggagaacccccaccagcctgccagcctgcaggccacagacagccagggcaacacagtgctgcacgccctggtgatgatcagtgacaacagcgcagaaaatattgccctggtgacctccatgtatgatggcctgctgcaggccggggcccggctgtgccccaccgtgcagctggaggacatccggaacctgcaggacctgacccccctgaagctggccgccaaggagggcaagattgaatag

SEQ ID NO: 173854 - DNA, 2373 bp, synthetic construct; identical to SEQ ID NO: 173780
  misc_feature 1..2373: note = Description of Artificial Sequence: Synthetic coding sequence
  source 1..2373: mol_type = other DNA

SEQ ID NO: 173855 - DNA, 2376 bp, synthetic construct
  misc_feature 1..2376: note = Description of Artificial Sequence: Synthetic coding sequence
  source 1..2376: mol_type = other DNA
atgaaggcccaccccaaggagatggtgcccctgatgggcaagagggtggccgcccccagcggcaacccagccatcctgcctgagaagaggcctgctgagatcacccccaccaagaagagcgcccacttcttcctggagattgagggctttgagcccaaccccaccgtggccaagaccagcccccctgtgttcagcaagcccatggacagcaacatccggcagtgcatcagcggcaactgtgatgacatggacagcccccagagcccccaggatgatgtgacagagacccccagcaaccccaacagccccagcgcccagctggccaaggaggagcagaggaggaagaagaggcggctgaagaagaggatctttgctgctgtgtctgagggctgtgtggaggagctggtggagctgctggtggagctgcaggagctgtgcagaagaagacatgatgaagatgtgcctgacttcctgatgcacaagctgacagccagtgacaccgggaagacctgcctgatgaaggccctgctgaacatcaaccccaacaccaaggagatcgtgcgcatcctgctggcctttgctgaggagaatgacatcctgggccgcttcatcaatgctgagtacacagaggaggcctatgagggccagacagccctgaacatcgccattgaaagacggcagggcgacattgctgccctgctgattgctgctggagcagatgtgaatgcccacgccaagggggccttcttcaaccccaagtaccagcacgagggcttctactttggagagacccccctggccctggccgcctgcaccaaccagcctgagatcgtgcagctgctgatggagcacgagcagacagacatcaccagccgggacagccggggcaacaacatcctgcacgccctggtgacagtggccgaggacttcaagacccagaatgactttgtgaagaggatgtatgacatgatcctgctgcggagcggcaactgggagctggagaccaccagaaataatgatggcctgacccccctgcagctggccgccaagatgggcaaggccgagatcctgaagtacatcctgagccgggagatcaaggagaagaggctgcggagcctgagcaggaagttcacagactgggcctacggccctgtgagcagcagcctgtatgacctgaccaacgtggacaccaccacagacaacagcgtgctggagatcaccgtgtacaacaccaacatcgacaacagacatgagatgctgaccctggagcccctgcacaccctgctgcacatgaagtggaagaagtttgccaagcacatgttcttcctgtccttctgcttctacttcttctacaacatcaccctgaccctggtgtcctactaccggccccgggaggaggaggccatcccccaccccctggccctgacccacaagatgggctggctgcagctgctgggccgcatgtttgtgctgatctgggccatgtgcatctctgtgaaggagggcatcgccatcttcctgctgcggcccagcgacctgcagagcatcctgagtgatgcctggttccactttgtgttcttcatccaggccgtgctggtgatcctgagcgtcttcctgtacctgtttgcctacaaggagtacctggcctgcctggtgctggccatggccctgggctgggccaacatgctgtactacacccggggcttccagagcatgggcatgtacagcgtgatgatccagaaggtgatcctgcatgatgtgctgaagttcctgtttgtgtacatcgtgttcctgctgggctttggagtggccctggccagcctgattgaaaaatgtcccaaggacaacaaggactgcagcagctatggcagcttcagtgatgctgtgctggagctgttcaagctgaccatcggcctgggggacctgaacatccagcagaacagcaagtaccccatcctcttcctgttcctgctgatcacctacgtgatcctgacctttgtgctgctgctgaacatgctgattgccctgatgggagagaccgtggagaatgtgtccaaggagagcgagcgcatctggaggctgcagagggcccggaccatcctggagtttgagaagatgctgcctgagtggctgcggagccgcttcaggatgggagagctgtgcaaggtggctgaagatgacttccggctgtgcctgcgcatcaatgaggtgaagtggacagagtggaagacccacgtgtccttcctgaatgaagatcctggccctgtgagaagaacagctgacttcaacaagatccaggacagcagcaggaacaacagcaagaccaccctgaatgcctttgaggaggtggaggagttccctgagacctctgtgtag

SEQ ID NO: 173856 - DNA, 2328 bp, synthetic construct
  misc_feature 1..2328: note = Description of Artificial Sequence: Synthetic coding sequence
  source 1..2328: mol_type = other DNA
atgagccaccacacctggcccagccctgccctgaacctggactttgccacctacctgctgcgggacctgggcgcccacttcttcctggagattgagggctttgagcccaaccccaccgtggccaagaccagcccccctgtgttcagcaagcccatggacagcaacatccggcagtgcatcagcggcaactgtgatgacatggacagcccccagagcccccaggatgatgtgacagagacccccagcaaccccaacagccccagcgcccagctggccaaggaggagcagaggaggaagaagaggcggctgaagaagaggatctttgctgctgtgtctgagggctgtgtggaggagctggtggagctgctggtggagctgcaggagctgtgcagaagaagacatgatgaagatgtgcctgacttcctgatgcacaagctgacagccagtgacaccgggaagacctgcctgatgaaggccctgctgaacatcaaccccaacaccaaggagatcgtgcgcatcctgctggcctttgctgaggagaatgacatcctgggccgcttcatcaatgctgagtacacagaggaggcctatgagggccagacagccctgaacatcgccattgaaagacggcagggcgacattgctgccctgctgattgctgctggagcagatgtgaatgcccacgccaagggggccttcttcaaccccaagtaccagcacgagggcttctactttggagagacccccctggccctggccgcctgcaccaaccagcctgagatcgtgcagctgctgatggagcacgagcagacagacatcaccagccgggacagccggggcaacaacatcctgcacgccctggtgacagtggccgaggacttcaagacccagaatgactttgtgaagaggatgtatgacatgatcctgctgcggagcggcaactgggagctggagaccaccagaaataatgatggcctgacccccctgcagctggccgccaagatgggcaaggccgagatcctgaagtacatcctgagccgggagatcaaggagaagaggctgcggagcctgagcaggaagttcacagactgggcctacggccctgtgagcagcagcctgtatgacctgaccaacgtggacaccaccacagacaacagcgtgctggagatcaccgtgtacaacaccaacatcgacaacagacatgagatgctgaccctggagcccctgcacaccctgctgcacatgaagtggaagaagtttgccaagcacatgttcttcctgtccttctgcttctacttcttctacaacatcaccctgaccctggtgtcctactaccggccccgggaggaggaggccatcccccaccccctggccctgacccacaagatgggctggctgcagctgctgggccgcatgtttgtgctgatctgggccatgtgcatctctgtgaaggagggcatcgccatcttcctgctgcggcccagcgacctgcagagcatcctgagtgatgcctggttccactttgtgttcttcatccaggccgtgctggtgatcctgagcgtcttcctgtacctgtttgcctacaaggagtacctggcctgcctggtgctggccatggccctgggctgggccaacatgctgtactacacccggggcttccagagcatgggcatgtacagcgtgatgatccagaaggtgatcctgcatgatgtgctgaagttcctgtttgtgtacatcgtgttcctgctgggctttggagtggccctggccagcctgattgaaaaatgtcccaaggacaacaaggactgcagcagctatggcagcttcagtgatgctgtgctggagctgttcaagctgaccatcggcctgggggacctgaacatccagcagaacagcaagtaccccatcctcttcctgttcctgctgatcacctacgtgatcctgacctttgtgctgctgctgaacatgctgattgccctgatgggagagaccgtggagaatgtgtccaaggagagcgagcgcatctggaggctgcagagggcccggaccatcctggagtttgagaagatgctgcctgagtggctgcggagccgcttcaggatgggagagctgtgcaaggtggctgaagatgacttccggctgtgcctgcgcatcaatgaggtgaagtggacagagtggaagacccacgtgtccttcctgaatgaagatcctggccctgtgagaagaacagctgacttcaacaagatccaggacagcagcaggaacaacagcaagaccaccctgaatgcctttgaggaggtggaggagttccctgagacctctgtgtag

SEQ ID NO: 173857 - DNA, 2616 bp, synthetic construct
  misc_feature 1..2616: note = Description of Artificial Sequence: Synthetic coding sequence
  source 1..2616: mol_type = other DNA
atggctgacagcagcgagggcccccgggccggccctggagaggtggccgagctgcctggagatgaaagtggcaccccaggaggagaggccttccccctgagcagcctggccaacctgtttgaaggagaagatggcagcctgagccccagccctgcagatgccagcaggcctgctggccctggagatggccggcccaacctgaggatgaagttccagggcgccttcagaaaaggagtgcccaaccccatcgacctgctggagagcaccctgtatgagagctctgtggtgcccggccccaagaaggcccccatggacagcctgtttgattatggcacctaccgccaccacagcagtgacaacaagcgctggaggaagaagatcatcgagaagcagccccagagccccaaggccccagccccccagcccccacccatcctgaaggtgttcaaccggcccatcctgtttgatattgtgtcccggggcagcacagctgacctggatggcctgctgcccttcctgctgacccacaagaagaggctgacagatgaggagttccgggagcccagcacaggcaagacctgcctgcccaaggccctgctgaacctgagcaatggaagaaatgacaccatccctgtgctgctggacattgctgagaggacaggcaacatgagggagttcatcaacagccccttccgggacatctactaccggggccagacagccctgcacatcgccatcgagcggcgctgcaagcactacgtggagctgctggtggcccagggcgcagatgtgcacgcccaggcccggggccgcttcttccagcccaaggatgaaggaggctacttctactttggagagctgcccctgagcctggccgcctgcaccaaccagccccacatcgtgaactacctgacagagaacccccacaagaaggctgacatgaggcggcaggacagccggggcaacacagtgctgcacgccctggtggccatcgctgacaacacccgggagaacaccaagtttgtgaccaagatgtatgacctgctgctgctgaagtgtgcccggctcttcccagacagcaacctggaggccgtgctgaacaatgatggcctgagccccctgatgatggccgccaagacaggcaagattggcatcttccagcacatcatcagaagagaggtgacagatgaggacaccaggcacctgagcaggaagttcaaggactgggcctacggccctgtgtacagcagcctgtatgacctgagcagcctggacacctgtggggaggaggcctctgtgctggagatcctggtgtacaacagcaagattgagaacagacatgagatgctggccgtggagcccatcaatgagctgctgcgggacaagtggaggaagtttggagctgtgtccttctacatcaacgtggtgtcctacctgtgtgccatggtgatcttcaccctgacagcctactaccagcccctggagggcaccccaccctacccctaccgcaccaccgtggactacctgcggctggccggggaggtgatcaccctcttcaccggggtgctcttcttcttcaccaacatcaaggacctcttcatgaagaagtgccctggggtgaacagcctcttcattgatggcagcttccagctgctgtacttcatctacagcgtgctggtgattgtgtctgctgccctgtacctggccggcatcgaggcctacctggccgtgatggtgtttgccctggtgctgggctggatgaatgccctgtacttcacccggggcctgaagctgaccggcacctacagcatcatgatccagaagatcctcttcaaggacctcttccgcttcctgctggtgtacctgctcttcatgattggctacgccagcgccctggtgtccctgctgaacccctgtgccaacatgaaggtgtgcaatgaagaccagaccaactgcaccgtgcccacctaccccagctgccgggacagcgagaccttcagcaccttcctgctggacctcttcaagctgaccatcggcatgggagacctggagatgctgagcagcaccaagtaccctgtggtgttcatcatcctgctggtgacctacatcatcctgacctttgtgctgctgctgaacatgctgattgccctgatgggagaaacagtgggccaggtgtccaaggagagcaagcacatctggaagctgcagtgggccaccaccatcctggacatcgagaggagcttccctgtgttcctgaggaaggccttccgcagcggggagatggtgacagtgggcaagagcagtgatggcaccccagaccggcgctggtgcttccgggtggatgaggtgaactggagccactggaaccagaacctgggcatcatcaatgaagatcctgggaagaatgagacctaccagtactacggcttcagccacacagtgggccgcctgcggcgggaccgctggagctctgtggtgccccgggtggtggagctgaacaagaacagcaacccagatgaggtggtggtgcccctggacagcatgggcaacccccgctgtgatggccaccagcagggctaccccaggaagtggaggacagatgatgcccccctgtag

SEQ ID NO: 173858 - DNA, 2436 bp, synthetic construct
  misc_feature 1..2436: note = Description of Artificial Sequence: Synthetic coding sequence
  source 1..2436: mol_type = other DNA
atggctgacagcagcgagggcccccgggccggccctggagaggtggccgagctgcctggagatgaaagtggcaccccaggaggagaggccttccccctgagcagcctggccaacctgtttgaaggagaagatggcagcctgagccccagccctgcagatgccagcaggcctgctggccctggagatggccggcccaacctgaggatgaagttccagggcgccttcagaaaaggagtgcccaaccccatcgacctgctggagagcaccctgtatgagagctctgtggtgcccggccccaagaaggcccccatggacagcctgtttgattatggcacctaccgccaccacagcagtgacaacaagcgctggaggaagaagatcatcgagaagcagccccagagccccaaggccccagccccccagcccccacccatcctgaaggtgttcaaccggcccatcctgtttgatattgtgtcccggggcagcacagctgacctggatggcctgctgcccttcctgctgacccacaagaagaggctgacagatgaggagttccgggagcccagcacaggcaagacctgcctgcccaaggccctgctgaacctgagcaatggaagaaatgacaccatccctgtgctgctggacattgctgagaggacaggcaacatgagggagttcatcaacagccccttccgggacatctactaccggggccagacagccctgcacatcgccatcgagcggcgctgcaagcactacgtggagctgctggtggcccagggcgcagatgtgcacgcccaggcccggggccgcttcttccagcccaaggatgaaggaggctacttctactttggagagctgcccctgagcctggccgcctgcaccaaccagccccacatcgtgaactacctgacagagaacccccacaagaaggctgacatgaggcggcaggacagccggggcaacacagtgctgcacgccctggtggccatcgctgacaacacccgggagaacaccaagtttgtgaccaagatgtatgacctgctgctgctgaagtgtgcccggctcttcccagacagcaacctggaggccgtgctgaacaatgatggcctgagccccctgatgatggccgccaagacaggcaagattggcaacagacatgagatgctggccgtggagcccatcaatgagctgctgcgggacaagtggaggaagtttggagctgtgtccttctacatcaacgtggtgtcctacctgtgtgccatggtgatcttcaccctgacagcctactaccagcccctggagggcaccccaccctacccctaccgcaccaccgtggactacctgcggctggccggggaggtgatcaccctcttcaccggggtgctcttcttcttcaccaacatcaaggacctcttcatgaagaagtgccctggggtgaacagcctcttcattgatggcagcttccagctgctgtacttcatctacagcgtgctggtgattgtgtctgctgccctgtacctggccggcatcgaggcctacctggccgtgatggtgtttgccctggtgctgggctggatgaatgccctgtacttcacccggggcctgaagctgaccggcacctacagcatcatgatccagaagatcctcttcaaggacctcttccgcttcctgctggtgtacctgctcttcatgattggctacgccagcgccctggtgtccctgctgaacccctgtgccaacatgaaggtgtgcaatgaagaccagaccaactgcaccgtgcccacctaccccagctgccgggacagcgagaccttcagcaccttcctgctggacctcttcaagctgaccatcggcatgggagacctggagatgctgagcagcaccaagtaccctgtggtgttcatcatcctgctggtgacctacatcatcctgacctttgtgctgctgctgaacatgctgattgccctgatgggagaaacagtgggccaggtgtccaaggagagcaagcacatctggaagctgcagtgggccaccaccatcctggacatcgagaggagcttccctgtgttcctgaggaaggccttccgcagcggggagatggtgacagtgggcaagagcagtgatggcaccccagaccggcgctggtgcttccgggtggatgaggtgaactggagccactggaaccagaacctgggcatcatcaatgaagatcctgggaagaatgagacctaccagtactacggcttcagccacacagtgggccgcctgcggcgggaccgctggagctctgtggtgccccgggtggtggagctgaacaagaacagcaacccagatgaggtggtggtgcccctggacagcatgggcaacccccgctgtgatggccaccagcagggctaccccaggaagtggaggacagatgatgcccccctgtag

SEQ ID NO: 173859 - DNA, 2475 bp, synthetic construct
  misc_feature 1..2475: note = Description of Artificial Sequence: Synthetic coding sequence
  source 1..2475: mol_type = other DNA
atggctgacagcagcgagggcccccgggccggccctggagaggtggccgagctgcctggagatgaaagtggcaccccaggaggagaggccttccccctgagcagcctggccaacctgtttgaaggagaagatggcagcctgagccccagccctgcagatgccagcaggcctgctggccctggagatggccggcccaacctgaggatgaagttccagggcgccttcagaaaaggagtgcccaaccccatcgacctgctggagagcaccctgtatgagagctctgtggtgcccggccccaagaaggcccccatggacagcctgtttgattatggcacctaccgccaccacagcagtgacaacaagcgctggaggaagaagatcatcgagaagcagccccagagccccaaggccccagccccccagcccccacccatcctgaaggtgttcaaccggcccatcctgtttgatattgtgtcccggggcagcacagctgacctggatggcctgctgcccttcctgctgacccacaagaagaggctgacagatgaggagttccgggagcccagcacaggcaagacctgcctgcccaaggccctgctgaacctgagcaatggaagaaatgacaccatccctgtgctgctggacattgctgagaggacaggcaacatgagggagttcatcaacagccccttccgggacatctactacagaggagagctgcccctgagcctggccgcctgcaccaaccagccccacatcgtgaactacctgacagagaacccccacaagaaggctgacatgaggcggcaggacagccggggcaacacagtgctgcacgccctggtggccatcgctgacaacacccgggagaacaccaagtttgtgaccaagatgtatgacctgctgctgctgaagtgtgcccggctcttcccagacagcaacctggaggccgtgctgaacaatgatggcctgagccccctgatgatggccgccaagacaggcaagattggcatcttccagcacatcatccggcgggaggtgacagatgaggacaccaggcacctgagcaggaagttcaaggactgggcctacggccctgtgtacagcagcctgtatgacctgagcagcctggacacctgtggggaggaggcctctgtgctggagatcctggtgtacaacagcaagattgaaaatagacatgagatgctggccgtggagcccatcaatgagctgctgcgggacaagtggaggaagtttggagctgtgtccttctacatcaacgtggtgtcctacctgtgtgccatggtgatcttcaccctgacagcctactaccagcccctggagggcaccccaccctacccctaccgcaccaccgtggactacctgcggctggccggggaggtgatcaccctcttcaccggggtgctcttcttcttcaccaacatcaaggacctcttcatgaagaagtgccctggggtgaacagcctcttcattgatggcagcttccagctgctgtacttcatctacagcgtgctggtgattgtgtctgctgccctgtacctggccggcatcgaggcctacctggccgtgatggtgtttgccctggtgctgggctggatgaatgccctgtacttcacccggggcctgaagctgaccggcacctacagcatcatgatccagaagatcctcttcaaggacctcttccgcttcctgctggtgtacctgctcttcatgattggctacgccagcgccctggtgtccctgctgaacccctgtgccaacatgaaggtgtgcaatgaagaccagaccaactgcaccgtgcccacctaccccagctgccgggacagcgagaccttcagcaccttcctgctggacctcttcaagctgaccatcggcatgggagacctggagatgctgagcagcaccaagtaccctgtggtgttcatcatcctgctggtgacctacatcatcctgacctttgtgctgctgctgaacatgctgattgccctgatgggagagaccgtgggccaggtgtccaaggagagcaagcacatctggaagctgcagtgggccaccaccatcctggacatcgagaggagcttccctgtgttcctgaggaaggccttccgctctggagagatggtgacagtgggcaagagcagtgatggcaccccagaccggcgctggtgcttccgggtggatgaggtgaactggagccactggaaccagaacctgggcatcatcaatgaagaccccgggaagaatgagacctaccagtactacggcttcagccacacagtgggccgcctgcggcgggaccgctggagctctgtggtgccccgggtggtggagctgaacaagaacagcaacccagatgaggtggtggtgcccctggacagcatgggcaacccccgctgtgatggccaccagcagggctaccccaggaagtggaggacagatgatgcccccctgtag

SEQ ID NO: 173860 - DNA, 2616 bp, synthetic construct; identical to SEQ ID NO: 173857
  misc_feature 1..2616: note = Description of Artificial Sequence: Synthetic coding sequence
  source 1..2616: mol_type = other DNA

SEQ ID NO: 173861 - DNA, 2514 bp, synthetic construct
  misc_feature 1..2514: note = Description of Artificial Sequence: Synthetic coding sequence
  source 1..2514: mol_type = other DNA
atggctgacagcagcgagggcccccgggccggccctggagaggtggccgagctgcctggagatgaaagtggcaccccaggagatggccggcccaacctgaggatgaagttccagggcgccttcagaaaaggagtgcccaaccccatcgacctgctggagagcaccctgtatgagagctctgtggtgcccggccccaagaaggcccccatggacagcctgtttgattatggcacctaccgccaccacagcagtgacaacaagcgctggaggaagaagatcatcgagaagcagccccagagccccaaggccccagccccccagcccccacccatcctgaaggtgttcaaccggcccatcctgtttgatattgtgtcccggggcagcacagctgacctggatggcctgctgcccttcctgctgacccacaagaagaggctgacagatgaggagttccgggagcccagcacaggcaagacctgcctgcccaaggccctgctgaacctgagcaatggaagaaatgacaccatccctgtgctgctggacattgctgagaggacaggcaacatgagggagttcatcaacagccccttccgggacatctactaccggggccagacagccctgcacatcgccatcgagcggcgctgcaagcactacgtggagctgctggtggcccagggcgcagatgtgcacgcccaggcccggggccgcttcttccagcccaaggatgaaggaggctacttctactttggagagctgcccctgagcctggccgcctgcaccaaccagccccacatcgtgaactacctgacagagaacccccacaagaaggctgacatgaggcggcaggacagccggggcaacacagtgctgcacgccctggtggccatcgctgacaacacccgggagaacaccaagtttgtgaccaagatgtatgacctgctgctgctgaagtgtgcccggctcttcccagacagcaacctggaggccgtgctgaacaatgatggcctgagccccctgatgatggccgccaagacaggcaagattggcatcttccagcacatcatcagaagagaggtgacagatgaggacaccaggcacctgagcaggaagttcaaggactgggcctacggccctgtgtacagcagcctgtatgacctgagcagcctggacacctgtggggaggaggcctctgtgctggagatcctggtgtacaacagcaagattgagaacagacatgagatgctggccgtggagcccatcaatgagctgctgcgggacaagtggaggaagtttggagctgtgtccttctacatcaacgtggtgtcctacctgtgtgccatggtgatcttcaccctgacagcctactaccagcccctggagggcaccccaccctacccctaccgcaccaccgtggactacctgcggctggccggggaggtgatcaccctcttcaccggggtgctcttcttcttcaccaacatcaaggacctcttcatgaagaagtgccctggggtgaacagcctcttcattgatggcagcttccagctgctgtacttcatctacagcgtgctggtgattgtgtctgctgccctgtacctggccggcatcgaggcctacctggccgtgatggtgtttgccctggtgctgggctggatgaatgccctgtacttcacccggggcctgaagctgaccggcacctacagcatcatgatccagaagatcctcttcaaggacctcttccgcttcctgctggtgtacctgctcttcatgattggctacgccagcgccctggtgtccctgctgaacccctgtgccaacatgaaggtgtgcaatgaagaccagaccaactgcaccgtgcccacctaccccagctgccgggacagcgagaccttcagcaccttcctgctggacctcttcaagctgaccatcggcatgggagacctggagatgctgagcagcaccaagtaccctgtggtgttcatcatcctgctggtgacctacatcatcctgacctttgtgctgctgctgaacatgctgattgccctgatgggagaaacagtgggccaggtgtccaaggagagcaagcacatctggaagctgcagtgggccaccaccatcctggacatcgagaggagcttccctgtgttcctgaggaaggccttccgcagcggggagatggtgacagtgggcaagagcagtgatggcaccccagaccggcgctggtgcttccgggtggatgaggtgaactggagccactggaaccagaacctgggcatcatcaatgaagatcctgggaagaatgagacctaccagtactacggcttcagccacacagtgggccgcctgcggcgggaccgctggagctctgtggtgccccgggtggtggagctgaacaagaacagcaacccagatgaggtggtggtgcccctggacagcatgggcaacccccgctgtgatggccaccagcagggctaccccaggaagtggaggacagatgatgcccccctgtag

SEQ ID NO: 173862 - DNA, 2436 bp, synthetic construct; identical to SEQ ID NO: 173858
  misc_feature 1..2436: note = Description of Artificial Sequence: Synthetic coding sequence
  source 1..2436: mol_type = other DNA

SEQ ID NO: 173863 - DNA, 2475 bp, synthetic construct; identical to SEQ ID NO: 173859
  misc_feature 1..2475: note = Description of Artificial Sequence: Synthetic coding sequence
  source 1..2475: mol_type = other DNA

SEQ ID NO: 173864 - DNA, 2295 bp, synthetic construct
  misc_feature 1..2295: note = Description of Artificial Sequence: Synthetic coding sequence
  source 1..2295: mol_type = other DNA
atggctgacagcagcgagggcccccgggccggccctggagaggtggccgagctgcctggagatgaaagtggcaccccaggaggagaggccttccccctgagcagcctggccaacctgtttgaaggagaagatggcagcctgagccccagccctgcagatgccagcaggcctgctggccctggagatggccggcccaacctgaggatgaagttccagggcgccttcagaaaaggagtgcccaaccccatcgacctgctggagagcaccctgtatgagagctctgtggtgcccggccccaagaaggcccccatggacagcctgtttgattatggcacctaccgccaccacagcagtgacaacaagcgctggaggaagaagatcatcgagaagcagccccagagccccaaggccccagccccccagcccccacccatcctgaaggtgttcaaccggcccatcctgtttgatattgtgtcccggggcagcacagctgacctggatggcctgctgcccttcctgctgacccacaagaagaggctgacagatgaggagttccgggagcccagcacaggcaagacctgcctgcccaaggccctgctgaacctgagcaatggaagaaatgacaccatccctgtgctgctggacattgctgagaggacaggcaacatgagggagttcatcaacagccccttccgggacatctactacagaggagagctgcccctgagcctggccgcctgcaccaaccagccccacatcgtgaactacctgacagagaacccccacaagaaggctgacatgaggcggcaggacagccggggcaacacagtgctgcacgccctggtggccatcgctgacaacacccgggagaacaccaagtttgtgaccaagatgtatgacctgctgctgctgaagtgtgcccggctcttcccagacagcaacctggaggccgtgctgaacaatgatggcctgagccccctgatgatggccgccaagacaggcaagattggcaacagacatgagatgctggccgtggagcccatcaatgagctgctgcgggacaagtggaggaagtttggagctgtgtccttctacatcaacgtggtgtcctacctgtgtgccatggtgatcttcaccctgacagcctactaccagcccctggagggcaccccaccctacccctaccgcaccaccgtggactacctgcggctggccggggaggtgatcaccctcttcaccggggtgctcttcttcttcaccaacatcaaggacctcttcatgaagaagtgccctggggtgaacagcctcttcattgatggcagcttccagctgctgtacttcatctacagcgtgctggtgattgtgtctgctgccctgtacctggccggcatcgaggcctacctggccgtgatggtgtttgccctggtgctgggctggatgaatgccctgtacttcacccggggcctgaagctgaccggcacctacagcatcatgatccagaagatcctcttcaaggacctcttccgcttcctgctggtgtacctgctcttcatgattggctacgccagcgccctggtgtccctgctgaacccctgtgccaacatgaaggtgtgcaatgaagaccagaccaactgcaccgtgcccacctaccccagctgccgggacagcgagaccttcagcaccttcctgctggacctcttcaagctgaccatcggcatgggagacctggagatgctgagcagcaccaagtaccctgtggtgttcatcatcctgctggtgacctacatcatcctgacctttgtgctgctgctgaacatgctgattgccctgatgggagagaccgtgggccaggtgtccaaggagagcaagcacatctggaagctgcagtgggccaccaccatcctggacatcgagaggagcttccctgtgttcctgaggaaggccttccgctctggagagatggtgacagtgggcaagagcagtgatggcaccccagaccggcgctggtgcttccgggtggatgaggtgaactggagccactggaaccagaacctgggcatcatcaatgaagaccccgggaagaatgagacctaccagtactacggcttcagccacacagtgggccgcctgcggcgggaccgctggagctctgtggtgccccgggtggtggagctgaacaagaacagcaacccagatgaggtggtggtgcccctggacagcatgggcaacccccgctgtgatggccaccagcagggctaccccaggaagtggaggacagatgatgcccccctgtag

SEQ ID NO: 173865 - DNA, 2190 bp, synthetic construct
  misc_feature 1..2190: note = Description of Artificial Sequence: Synthetic coding sequence
  source 1..2190: mol_type = other DNA
atgggcggcttcctgcccaaggccgagggccctggcagccagctgcagaagctgctgcccagcttcctggtgcgggagcaggactgggaccagcacctggacaagctgcacatgctgcagcagaagaggatcctggagagccccctgctgcgggccagcaaagaaaatgacctgtctgtgctgcggcagctgctgctggactgcacctgtgatgtgcggcagagaggagccctgggggagacagccctgcacatcgccgccctgtatgacaacctggaggccgccctggtgctgatggaggccgcccctgagctggtgtttgagcccaccacctgtgaggcctttgctggccagacagccctgcacatcgctgtggtgaaccagaatgtgaacctggtgcgggccctgctgacccggcgggcctctgtgtctgcccgggccaccggcacagccttcagaagaagccccaggaacctgatctactttggagagcaccccctgagctttgctgcctgtgtgaacagcgaggagatcgtgcggctgctgattgaacatggagctgacatccgggcccaggacagcctgggcaacacagtgctgcacatcctgatcctgcagcccaacaagacctttgcctgccagatgtacaacctgctgctgtcctatgatggccatggagaccacctgcagcccctggacctggtgcccaaccaccagggcctgacccccttcaagctggccggcgtggagggcaacacagtgatgttccagcacctgatgcagaagagaagacacatccagtggacctacggccccctgaccagcatcctgtatgacctgacagaaattgacagctggggcgaggagctgtccttcctggagctggtggtgtccagtgacaagcgggaggcccggcagatcctggagcagacccctgtgaaggagctggtgtccttcaagtggaacaagtatggccggccctacttctgcatcctggccgccctgtacctgctgtacatgatctgcttcaccacctgctgcgtgtaccggcccctgaagttccggggcggcaacagaacccacagccgggacatcaccatcctgcagcagaagctgctgcaggaggcctatgagacccgggaggacatcatccggctggtgggggagctggtgtccatcgtgggcgccgtcatcatcctgctgctggagatcccagacatcttccgggtgggcgccagccgctactttgggaagaccatcctgggcggccccttccacgtgatcatcatcacctacgccagcctggtgctggtgaccatggtgatgaggctgaccaacaccaacggggaggtggtgcccatgagctttgccctggtgctgggctggtgcagcgtgatgtacttcacccggggcttccagatgctgggccccttcaccatcatgatccagaagatgatctttggagacctgatgaggttctgctggctgatggctgtggtgatcctgggctttgccagcgccttctacatcatcttccagacagaggaccccaccagcctgggccagttctatgactaccccatggccctcttcaccacctttgagctgttcctgactgtgattgatgccccagccaactatgatgtggacctgcccttcatgttcagcatcgtgaactttgcctttgccatcatcgccaccctgctgatgctgaacctcttcatcgccatgatgggagacacccactggagggtggcccaggagagagatgagctgtggagggcccaggtggtggccaccaccgtgatgctggagaggaagctgccccgctgcctgtggcccaggagcggcatctgtggctgtgaatttggcctgggggaccgctggttcctgcgggtggagaaccacaatgaccagaaccccctgcgggtgctgcgctacgtggaggtgttcaagaacagcgacaaggaggatgaccaggagcaccccagcgagaagcagcccagcggggctgagagcggcaccctggcccgggccagcctggccctgcccaccagcagcctgagcaggacagccagccagagcagcagccaccggggctgggagatcctgcggcagaacaccctgggccacctgaacctgggcctgaacctgtctgaaggagatggagaggaggtgtaccacttctag

SEQ ID NO: 173866 - DNA, 1146 bp, synthetic construct
  misc_feature 1..1146: note = Description of Artificial Sequence: Synthetic coding sequence
  source 1..1146: mol_type = other DNA
atgggcggcttcctgcccaaggccgagggccctggcagccagctgcagaagctgctgcccagcttcctggtgcgggagcaggactgggaccagcacctggacaagctgcacatgctgcagcagaagaggatcctggagagccccctgctgcgggccagcaaagaaaatgacctgtctgtgctgcggcagctgctgctggactgcacctgtgatgtgcggcagagaggagccctgggggagacagccctgcacatcgccgccctgtatgacaacctggaggccgccctggtgctgatggaggccgcccctgagctggtgtttgagcccaccacctgtgaggcctttgctggccagacagccctgcacatcgctgtggtgaaccagaatgtgaacctggtgcgggccctgctgacccggcgggcctctgtgtctgcccgggccaccggcacagccttcagaagaagccccaggaacctgatctactttggagagcaccccctgagctttgctgcctgtgtgaacagcgaggagatcgtgcggctgctgattgaacatggagctgacatccgggcccaggacagcctgggcaacacagtgctgcacatcctgatcctgcagcccaacaagacctttgcctgccagatgtacaacctgctgctgtcctatgatggccatggagaccacctgcagcccctggacctggtgcccaaccaccagggcctgacccccttcaagctggccggcgtggagggcaacacagtgatgttccagcacctgatgcagaagagaagacacatccagtggacctacggccccctgaccagcatcctgtatgacctgacagaaattgacagctggggcgaggagctgtccttcctggagctggtggtgtccagtgacaagcgggaggcccggcagatcctggagcagacccctgtgaaggagctggtgtccttcaagtggaacaagtatggccggccctacttctgcatcctggccgccctgtacctgctgtacatgatctgcttcaccacctgctgcgtgtaccggcccctgaagttccggggcggcaacagaacccacagccgggacatcaccatcctgcagcagaagctgctgcaggtgatcctgctgcggcggggctag

SEQ ID NO: 173867 - DNA, 1674 bp, synthetic construct
  misc_feature 1..1674: note = Description of Artificial Sequence: Synthetic coding sequence
  source 1..1674: mol_type = other DNA
atgggcctgagcctgcccaaggagaagggcctcatcctgtgcctgtggagcaagttctgccgctggttccaggacagcctgggcaacacagtgctgcacatcctgatcctgcagcccaacaagacctttgcctgccagatgtacaacctgctgctgtcctatgacagacatggagaccacctgcagcccctggacctggtgcccaaccaccagggcctgacccccttcaagctggccggcgtggagggcaacacagtgatgttccagcacctgatgcagaagaggaagcacacccagtggacctacggccccctgaccagcaccctgtatgacctgacagaaattgacagcagtggagatgagcagagcctgctggagctgatcatcaccaccaagaagcgggaggcccggcagatcctggaccagacccctgtgaaggagctggtgtccctgaagtggaagagatatggccggccctacttctgcatgctgggcgccatctacctgctgtacatcatctgcttcaccatgtgctgcatctaccggcccctgaagcccaggaccaacaacagaaccagcccccgggacaacaccctgctgcagcagaagctgctgcaggaggcctacatgacccccaaggatgacatccggctggtgggggagctggtgaccgtcatcggggccatcatcatcctgctggtggaggtgcctgacatcttcaggatgggcgtgacccgcttcttcggccagaccatcctgggcggccccttccacgtgctgatcatcacctacgccttcatggtgctggtgaccatggtgatgaggctcatcagcgccagcggggaggtggtgcccatgagctttgccctggtgctgggctggtgcaatgtgatgtactttgcccggggcttccagatgctgggccccttcaccatcatgatccagaagatgatctttggagacctgatgaggttctgctggctgatggctgtggtgatcctgggctttgccagcgccttctacatcatcttccagacagaagatcctgaggagctgggccacttctatgactaccccatggccctcttcagcacctttgagctgttcctgaccatcattgatggccctgccaactacaacgtggacctgcccttcatgtacagcatcacctacgccgcctttgccatcatcgccaccctgctgatgctgaacctgctgattgccatgatgggagacacccactggagggtggcccacgagagagatgagctgtggagggcccagatcgtggccaccaccgtgatgctggagaggaagctgccccgctgcctgtggcccaggagcggcatctgtggccgggagtatggcctgggggaccgctggttcctgcgggtggaggaccggcaggacctgaaccggcagaggatccagagatatgcccaggccttccacacccggggcagcgaggacctggacaaggacagcgtggagaagctggagctgggctgccccttcagcccccacctgagcctgcccatgcccagcgtgagccgcagcaccagccgcagcagcgccaactgggagcggctgcggcagggcaccctgcggcgggacctgcggggcatcatcaacagaggcctggaggatggagagagctgggagtaccagatctag

SEQ ID NO: 173868 - DNA, 2178 bp, synthetic construct
  misc_feature 1..2178: note = Description of Artificial Sequence: Synthetic coding sequence
  source 1..2178: mol_type = other DNA
atgggcctgagcctgcccaaggagaagggcctcatcctgtgcctgtggagcaagttctgccgctggttccagaggcgggagagctgggcccagagcagagatgagcagaacctgctgcagcagaagaggatctgggagagccccctgctgctggccgccaaggacaatgatgtgcaggccctgaacaagctgctgaagtatgaggactgcaaggtgcaccagagaggagccatgggagaaacagccctgcacatcgccgccctgtatgacaacctggaggccgccatggtgctgatggaggccgcccctgagctggtgtttgagcccatgaccagcgagctgtatgagggccagacagccctgcacatcgctgtggtgaaccagaacatgaacctggtgcgggccctgctggcccggcgggcctctgtgtctgcccgggccaccggcacagccttcagaagaagcccctgcaacctgatctactttggagagcaccccctgagctttgctgcctgtgtgaacagcgaggagatcgtgcggctgctgattgaacatggagctgacatccgggcccaggacagcctgggcaacacagtgctgcacatcctgatcctgcagcccaacaagacctttgcctgccagatgtacaacctgctgctgtcctatgacagacatggagaccacctgcagcccctggacctggtgcccaaccaccagggcctgacccccttcaagctggccggcgtggagggcaacacagtgatgttccagcacctgatgcagaagaggaagcacacccagtggacctacggccccctgaccagcaccctgtatgacctgacagaaattgacagcagtggagatgagcagagcctgctggagctgatcatcaccaccaagaagcgggaggcccggcagatcctggaccagacccctgtgaaggagctggtgtccctgaagtggaagagatatggccggccctacttctgcatgctgggcgccatctacctgctgtacatcatctgcttcaccatgtgctgcatctaccggcccctgaagcccaggaccaacaacagaaccagcccccgggacaacaccctgctgcagcagaagctgctgcaggaggcctacatgacccccaaggatgacatccggctggtgggggagctggtgaccgtcatcggggccatcatcatcctgctggtggaggtgcctgacatcttcaggatgggcgtgacccgcttcttcggccagaccatcctgggcggccccttccacgtgctgatcatcacctacgccttcatggtgctggtgaccatggtgatgaggctcatcagcgccagcggggaggtggtgcccatgagctttgccctggtgctgggctggtgcaatgtgatgtactttgcccggggcttccagatgctgggccccttcaccatcatgatccagaagatgatctttggagacctgatgaggttctgctggctgatggctgtggtgatcctgggctttgccagcgccttctacatcatcttccagacagaagatcctgaggagctgggccacttctatgactaccccatggccctcttcagcacctttgagctgttcctgaccatcattgatggccctgccaactacaacgtggacctgcccttcatgtacagcatcacctacgccgcctttgccatcatcgccaccctgctgatgctgaacctgctgattgccatgatgggagacacccactggagggtggcccacgagagagatgagctgtggagggcccagatcgtggccaccaccgtgatgctggagaggaagctgccccgctgcctgtggcccaggagcggcatctgtggccgggagtatggcctgggggaccgctggttcctgcgggtggaggaccggcaggacctgaaccggcagaggatccagagatatgcccaggccttccacacccggggcagcgaggacctggacaaggacagcgtggagaagctggagctgggctgccccttcagcccccacctgagcctgcccatgcccagcgtgagccgcagcaccagccgcagcagcgccaactgggagcggctgcggcagggcaccctgcggcgggacctgcggggcatcatcaacagaggcctggaggatggagagagctgggagtaccagatctag

SEQ ID NO: 173869 - DNA, 168 bp, synthetic construct
  misc_feature 1..168: note = Description of Artificial Sequence: Synthetic coding sequence
  source 1..168: mol_type = other DNA
atgagcaccagcaggaagctgaagagccacggcatgagaagaagcaagagccgcagcccccacaagggcgtgaagagaggaggcagcaagaggaagtacagaaaaggaaacctgaagagcaggaagagaggagatgatgccaacagaaactaccgcagccacctgtag

SEQ ID NO: 173870 - DNA, 417 bp, synthetic construct
  misc_feature 1..417: note = Description of Artificial Sequence: Synthetic coding sequence
  source 1..417: mol_type = other DNA
atggacacccagacccacagcctgcccatcacccacacccagctgcacagcaacagccagccccagagcaggacctgcaccaggcactgccagaccttcagccagagctgccggcagagccaccggggcagccgcagccagagcagcagccagagccctgccagccacaggaaccccaccggggcccacagcagcagcggccaccagagccagagccccaacaccagccccccacccaagaggcacaagaagaccatgaacagccaccacagccccatgaggcccaccatcctgcactgccgctgccccaagaacaggaagaacctggagggcaagctgaagaagaagaagatggccaagaggatccagcaggtgtacaagaccaagaccaggagcagcggctggaagagcaactag

SEQ ID NO: 173871 - DNA, 1731 bp, synthetic construct
  misc_feature 1..1731: note = Description of Artificial Sequence: Synthetic coding sequence
  source 1..1731: mol_type = other DNA
atggctgtgctcttcttccacaccatgagatacaagagccaggaccccaggaacccccacaatgacagatttgtgctgagcaagggccatgctgcccccatcctgtatgctgtgtgggccgaggccggcttcctggccgaggccgagctgctgaacctgaggaagatcagcagtgacctggatggccaccctgtgcccaagcaggccttcacagatgtggccaccggcagcctgggccagggcctgggcgccgcctgtggcatggcctacacaggcaagtactttgacaaggccagctacagagtgtactgcctgctgggagatggagagctgtctgagggctctgtgtgggaggccatggcctttgccagcatctacaagctggacaacctggtggccatcctggacatcaaccggctgggccagagcgaccctgcccccctgcagcaccagatggacatctaccagaagagatgtgaggccttcggctggcacgccatcatcgtggatggccacagcgtggaggagctgtgcaaggccttcggccaggccaagcaccagcccacagccatcatcgccaagaccttcaagggccggggcatcaccggggtggaggacaaggagagctggcacggcaagcccctgcccaagaacatggccgagcagatcatccaggagatctacagccagatccagagcaagaagaagatcctggccaccccaccccaggaggatgcccccagcgtggacatcgccaacatccgcatgcccagcctgcccagctacaaggtgggggacaagatcgccaccaggaaggcctacggccaggccctggccaagctgggccacgccagtgaccgcatcatcgccctggatggagacaccaagaacagcaccttcagcgagatcttcaagaaggagcacccagaccgcttcatcgagtgctacatcgccgagcagaacatggtgtccattgctgtgggctgtgccaccaggaacagaacagtgcccttctgcagcacctttgctgccttcttcacccgggcctttgaccagatccgcatggccgccatcagcgagagcaacatcaacctgtgtggcagccactgcggcgtgtccatcggggaggatggccccagccagatggccctggaggacctggccatgttccgctctgtgcccaccagcacagtgttctaccccagtgatggagtggccacagagaaggctgtggagctggccgccaacaccaagggcatctgcttcatccgcaccagcaggccagaaaatgccatcatctacaacaacaatgaagacttccaggtgggccaggccaaggtggtgctgaagagcaaggatgaccaggtgacagtgattggagctggggtgaccctgcacgaggccctggccgctgctgagctgctgaagaaggagaagatcaacatccgggtgctggaccccttcaccatcaagcccctggacaggaagctgatcctggacagcgcccgggccaccaagggccgcatcctgactgtggaggaccactactatgaaggaggcattggagaggccgtgtcctctgctgtggtgggggagcccggcatcaccgtgacccacctggccgtgaacagagtgcccaggtctgggaagccagctgagctgctgaagatgtttggcatcgacagagatgccatcgcccaggccgtgcggggcctcatcaccaaggcctag

SEQ ID NO: 173872 - DNA, 1374 bp, synthetic construct
  misc_feature 1..1374: note = Description of Artificial Sequence: Synthetic coding sequence
  source 1..1374: mol_type = other DNA
atggcctttgccagcatctacaagctggacaacctggtggccatcctggacatcaaccggctgggccagagcgaccctgcccccctgcagcaccagatggacatctaccagaagagatgtgaggccttcggctggcacgccatcatcgtggatggccacagcgtggaggagctgtgcaaggccttcggccaggccaagcaccagcccacagccatcatcgccaagaccttcaagggccggggcatcactggagtggaggacaaggagagctggcacggcaagcccctgcccaagaacatggccgagcagatcatccaggagatctacagccagatccagagcaagaagaagatcctggccaccccaccccaggaggatgcccccagcgtggacatcgccaacatccgcatgcccagcctgcccagctacaaggtgggggacaagatcgccaccaggaaggcctacggccaggccctggccaagctgggccacgccagtgaccgcatcatcgccctggatggagacaccaagaacagcaccttcagcgagatcttcaagaaggagcacccagaccgcttcatcgagtgctacatcgccgagcagaacatggtgtccattgctgtgggctgtgccaccaggaacagaacagtgcccttctgcagcacctttgctgccttcttcacccgggcctttgaccagatccgcatggccgccatcagcgagagcaacatcaacctgtgtggcagccactgcggcgtgtccattggagaagatggccccagccagatggccctggaggacctggccatgttccgctctgtgcccaccagcaccgtcttctaccccagtgatggagtggccacagagaaggctgtggagctggccgccaacaccaagggcatctgcttcatccgcaccagcaggccagaaaatgccatcatctacaacaacaatgaagacttccaggtgggccaggccaaggtggtgctgaagagcaaggatgaccaggtgaccgtcatcggggccggcgtgaccctgcacgaggccctggccgctgctgagctgctgaagaaggagaagatcaacatccgggtgctggaccccttcaccatcaagcccctggacaggaagctgatcctggacagcgcccgggccaccaagggccgcatcctgactgtggaggaccactactatgagggcggcatcggggaggccgtgagcagcgctgtggtgggggagcccggcatcaccgtgacccacctggccgtgaacagagtgcccaggtctgggaagccagctgagctgctgaagatgtttggaattgacagagatgccatcgcccaggccgtgcggggcctcatcaccaaggcctag

SEQ ID NO: 173873 - DNA, 1872 bp, synthetic construct
  misc_feature 1..1872: note = Description of Artificial Sequence: Synthetic coding sequence
  source 1..1872: mol_type = other DNA
atggagagctaccacaagccagaccagcagaagctgcaggccctgaaggacacagccaaccggctgcgcatcagcagcatccaggccaccacagctgctggcagcggccaccccaccagctgctgcagcgctgctgagatcatggctgtgctcttcttccacaccatgagatacaagagccaggaccccaggaacccccacaatgacagatttgtgctgagcaaaggacatgctgcccccatcctgtatgctgtgtgggccgaggccggcttcctggccgaggccgagctgctgaacctgaggaagatcagcagtgacctggatggccaccctgtgcccaagcaggccttcacagatgtggccaccggcagcctgggccagggcctgggcgccgcctgtggcatggcctacaccgggaagtactttgacaaggccagctacagagtgtactgcctgctgggagatggagagctgtctgagggctctgtgtgggaggccatggcctttgccagcatctacaagctggacaacctggtggccatcctggacatcaaccggctgggccagagcgaccctgcccccctgcagcaccagatggacatctaccagaagagatgtgaggccttcggctggcacgccatcatcgtggatggccacagcgtggaggagctgtgcaaggccttcggccaggccaagcaccagcccacagccatcatcgccaagaccttcaagggccggggcatcactggagtggaggacaaggagagctggcacggcaagcccctgcccaagaacatggccgagcagatcatccaggagatctacagccagatccagagcaagaagaagatcctggccaccccaccccaggaggatgcccccagcgtggacatcgccaacatccgcatgcccagcctgcccagctacaaggtgggggacaagatcgccaccaggaaggcctacggccaggccctggccaagctgggccacgccagtgaccgcatcatcgccctggatggagacaccaagaacagcaccttcagcgagatcttcaagaaggagcacccagaccgcttcatcgagtgctacatcgccgagcagaacatggtgtccattgctgtgggctgtgccaccaggaacagaacagtgcccttctgcagcacctttgctgccttcttcacccgggcctttgaccagatccgcatggccgccatcagcgagagcaacatcaacctgtgtggcagccactgcggcgtgtccattggagaagatggccccagccagatggccctggaggacctggccatgttccgctctgtgcccaccagcaccgtcttctaccccagtgatggagtggccacagagaaggctgtggagctggccgccaacaccaagggcatctgcttcatccgcaccagcaggccagaaaatgccatcatctacaacaacaatgaagacttccaggtgggccaggccaaggtggtgctgaagagcaaggatgaccaggtgaccgtcatcggggccggcgtgaccctgcacgaggccctggccgctgctgagctgctgaagaaggagaagatcaacatccgggtgctggaccccttcaccatcaagcccctggacaggaagctgatcctggacagcgcccgggccaccaagggccgcatcctgactgtggaggaccactactatgagggcggcatcggggaggccgtgagcagcgctgtggtgggggagcccggcatcaccgtgacccacctggccgtgaacagagtgcccaggtctgggaagccagctgagctgctgaagatgtttggaattgacagagatgccatcgcccaggccgtgcggggcctcatcaccaaggcctag

SEQ ID NO: 173874 - DNA, 1872 bp, synthetic construct; identical to SEQ ID NO: 173873
  misc_feature 1..1872: note = Description of Artificial Sequence: Synthetic coding sequence
  source 1..1872: mol_type = other DNA

SEQ ID NO: 173875 - DNA, 1896 bp, synthetic construct
  misc_feature 1..1896: note = Description of Artificial Sequence: Synthetic coding sequence
  source 1..1896: mol_type = other DNA
atggagagctaccacaagccagaccagcagaagctgcaggccctgaaggacacagccaaccggctgcgcatcagcagcatccaggccaccacagctgctggcagcggccaccccaccagctgctgcagcgctgctgagatcatggctgtgctcttcttccacaccatgagatacaagagccaggaccccaggaacccccacaatgacagatttgtgctgagcaaaggacatgctgcccccatcctgtatgctgtgtgggccgaggccggcttcctggccgaggccgagctgctgaacctgaggaagatcagcagtgacctggatggccaccctgtgcccaagcaggccttcacagatgtggccaccggcagcctgggccagggcctgggcgccgcctgtggcatggcctacaccgggaagtactttgacaaggccagcctgcccagctcctgggactacagctacagagtgtactgcctgctgggagatggagagctgtctgagggctctgtgtgggaggccatggcctttgccagcatctacaagctggacaacctggtggccatcctggacatcaaccggctgggccagagcgaccctgcccccctgcagcaccagatggacatctaccagaagagatgtgaggccttcggctggcacgccatcatcgtggatggccacagcgtggaggagctgtgcaaggccttcggccaggccaagcaccagcccacagccatcatcgccaagaccttcaagggccggggcatcactggagtggaggacaaggagagctggcacggcaagcccctgcccaagaacatggccgagcagatcatccaggagatctacagccagatccagagcaagaagaagatcctggccaccccaccccaggaggatgcccccagcgtggacatcgccaacatccgcatgcccagcctgcccagctacaaggtgggggacaagatcgccaccaggaaggcctacggccaggccctggccaagctgggccacgccagtgaccgcatcatcgccctggatggagacaccaagaacagcaccttcagcgagatcttcaagaaggagcacccagaccgcttcatcgagtgctacatcgccgagcagaacatggtgtccattgctgtgggctgtgccaccaggaacagaacagtgcccttctgcagcacctttgctgccttcttcacccgggcctttgaccagatccgcatggccgccatcagcgagagcaacatcaacctgtgtggcagccactgcggcgtgtccattggagaagatggccccagccagatggccctggaggacctggccatgttccgctctgtgcccaccagcaccgtcttctaccccagtgatggagtggccacagagaaggctgtggagctggccgccaacaccaagggcatctgcttcatccgcaccagcaggccagaaaatgccatcatctacaacaacaatgaagacttccaggtgggccaggccaaggtggtgctgaagagcaaggatgaccaggtgaccgtcatcggggccggcgtgaccctgcacgaggccctggccgctgctgagctgctgaagaaggagaagatcaacatccgggtgctggaccccttcaccatcaagcccctggacaggaagctgatcctggacagcgcccgggccaccaagggccgcatcctgactgtggaggaccactactatgagggcggcatcggggaggccgtgagcagcgctgtggtgggggagcccggcatcaccgtgacccacctggccgtgaacagagtgcccaggtctgggaagccagctgagctgctgaagatgtttggaattgacagagatgccatcgcccaggccgtgcggggcctcatcaccaaggcctag

SEQ ID NO: 173876 - DNA, 1182 bp, synthetic construct
  misc_feature 1..1182: note = Description of Artificial Sequence: Synthetic coding sequence
  source 1..1182: mol_type = other DNA
atggccctgaaggtggccaccgtggccggcagcgctgccaaggctgtgctgggccctgccctgctgtgccggccctgggaggtgctgggcgcccacgaggtgcccagcaggaacatcttcagcgagcagaccatcccccccagcgccaagtatggaggccgccacacagtgaccatgatccctggagatggcatcggccctgagctgatgctgcacgtgaagtctgtgttcagacatgcctgtgtgcctgtggactttgaggaggtgcacgtgagcagcaatgctgatgaggaggacatcagaaatgccatcatggccatcagaagaaacagagtggccctgaagggcaacatcgagaccaaccacaacctgccccccagccacaagagcaggaacaacatcctgcggaccagcctggacctgtatgccaacgtcatccactgcaagagcctgcccggggtggtgaccaggcacaaggacatcgacatcctgattgtgcgggagaacacagaaggagagtacagcagcctggagcatgaatctgtggccggcgtggtggagagcctgaagatcatcaccaaggccaagagcctgagaattgctgaatatgccttcaagctggcccaggagagcggcaggaagaaggtgacagctgtgcacaaggccaacatcatgaagctgggagatggcctcttcctgcagtgctgccgggaggtggccgcccgctacccccagatcacctttgagaacatgattgtggacaacaccaccatgcagctggtgtcccggccccagcagtttgatgtgatggtgatgcccaacctgtatggcaacatcgtgaacaacgtgtgtgccggcctggtgggcggccctggcctggtggccggggccaactacggccacgtgtatgctgtgtttgaaacagccaccaggaacacaggcaagagcatcgccaacaagaacatcgccaaccccacagccaccctgctggccagctgcatgatgctggaccacctgaagctgcacagctatgccaccagcatcaggaaggctgtgctggcctccatggacaatgaaaacatgcacaccccagacatcggcggccagggcaccaccagcgaggccatccaggacgtcatccgccacatccgggtcatcaatggccgggctgtggaggcctag

SEQ ID NO: 173877 - DNA, 1791 bp, synthetic construct
  misc_feature 1..1791: note = Description of Artificial Sequence: Synthetic coding sequence
  source 1..1791: mol_type = other DNA
atggctgatgctgaggcccgggcagagttccctgaggaggcccggccagaccggggcaccctgcaggtgctgcaggacatggccagccggctgcgcatccacagcatccgggccacctgcagcaccagcagcggccaccccaccagctgcagcagcagcagcgagatcatgtctgtgctcttcttctacatcatgagatacaagcagagcgaccctgaaaatccagacaatgacagatttgtgctggccaagaggctgagctttgtggatgtggccaccggctggctgggccagggcctgggcgtggcctgtggcatggcctacacaggcaagtactttgaccgggccagctacagagtcttctgcctgatgtctgatggagagagcagcgagggctctgtgtgggaggccatggcctttgccagctactacagcctggacaacctggtggccatctttgatgtgaaccggctgggccacagcggggccctgcctgctgagcactgcatcaacatctaccagaggcgctgtgaggccttcggctggaacacctacgtggtggatggaagagatgtggaggccctgtgccaggtgttctggcaggccagccaggtgaagcacaagcccacagctgtggtggccaagaccttcaagggccggggcacccccagcattgaagatgctgagagctggcacgccaagcccatgccccgggagcgggcagatgccatcatcaagctgattgagagccagatccagaccagcaggaacctggacccccagccccccatcgaggacagccctgaggtgaacatcacagatgtgaggatgaccagccccccagactacagagtgggggacaagatcgccaccaggaaggcctgtggcctggccctggccaagctgggctacgccaacaacagagtggtggtgctggatggagacacccgctacagcaccttcagcgagatcttcaacaaggagtacccagagcgcttcatcgagtgcttcatggccgagcagaacatggtgtctgtggccctgggctgtgccagccggggccgcaccatcgcctttgccagcacctttgctgccttcctgacccgggcctttgaccacatccgcatcggcggcctggccgagagcaacatcaacatcatcggcagccactgcggcgtgtctgtgggagatgatggagccagccagatggccctggaggacatcgccatgttccgcaccatccccaagtgcaccatcttctaccccacagatgctgtgtccacagagcacgctgtggccctggccgccaatgccaagggcatgtgcttcatccgcaccaccaggcctgagaccatggtgatctacaccccccaggagagatttgaaattggccaggccaaggtgctgcggcactgtgtgtctgacaaggtgaccgtcatcggggccggcatcaccgtgtatgaggccctggccgctgctgatgagctgagcaagcaggacatcttcatccgggtcatcgacctcttcaccatcaagcccctggatgtggccaccatcgtgagcagcgccaaggccacagagggccgcatcatcaccgtggaggaccactacccccagggcggcatcggggaggccgtgtgtgccgctgtgtccatggaccctgacatccaggtgcacagcctggccgtgtctggagtgccccagagcggcaagtctgaggagctgctggacatgtatggcatcagcgcccggcacatcatcgtggccgtgaagtgcatgctgctgaactag

SEQ ID NO: 173878 - DNA, 1674 bp, synthetic construct
  misc_feature 1..1674: note = Description of Artificial Sequence: Synthetic coding sequence
  source 1..1674: mol_type = other DNA
atgtctgtgctcttcttctacatcatgagatacaagcagagcgaccctgaaaatccagacaatgacagatttgtgctggccaagaggctgagctttgtggatgtggccaccggctggctgggccagggcctgggcgtggcctgtggcatggcctacacaggcaagtactttgaccgggccagctacagagtcttctgcctgatgtctgatggagagagcagcgagggctctgtgtgggaggccatggcctttgccagctactacagcctggacaacctggtggccatctttgatgtgaaccggctgggccacagcggggccctgcctgctgagcactgcatcaacatctaccagaggcgctgtgaggccttcggctggaacacctacgtggtggatggaagagatgtggaggccctgtgccaggtgttctggcaggccagccaggtgaagcacaagcccacagctgtggtggccaagaccttcaagggccggggcacccccagcattgaagatgctgagagctggcacgccaagcccatgccccgggagcgggcagatgccatcatcaagctgattgagagccagatccagaccagcaggaacctggacccccagccccccatcgaggacagccctgaggtgaacatcacagatgtgaggatgaccagccccccagactacagagtgggggacaagatcgccaccaggaaggcctgtggcctggccctggccaagctgggctacgccaacaacagagtggtggtgctggatggagacacccgctacagcaccttcagcgagatcttcaacaaggagtacccagagcgcttcatcgagtgcttcatggccgagcagaacatggtgtctgtggccctgggctgtgccagccggggccgcaccatcgcctttgccagcacctttgctgccttcctgacccgggcctttgaccacatccgcatcggcggcctggccgagagcaacatcaacatcatcggcagccactgcggcgtgtctgtgggagatgatggagccagccagatggccctggaggacatcgccatgttccgcaccatccccaagtgcaccatcttctaccccacagatgctgtgtccacagagcacgctgtggccctggccgccaatgccaagggcatgtgcttcatccgcaccaccaggcctgagaccatggtgatctacaccccccaggagagatttgaaattggccaggccaagggcgtgtccatgctgcaggacagctggagcagcgtcatctcctaccagaaggtgctgcggcactgtgtgtctgacaaggtgacagtgattggagctggcatcaccgtgtatgaggccctggccgctgctgatgagctgagcaagcaggacatcttcatccgggtgattgacctcttcaccatcaagcccctggatgtggccaccatcgtgtcctctgccaaggccacagagggccgcatcatcaccgtggaggaccactacccccagggcggcattggagaggccgtgtgtgccgctgtgtccatggaccctgacatccaggtgcacagcctggccgtgtctggagtgccccagagcggcaagtctgaggagctgctggacatgtatggcatcagcgcccggcacatcatcgtggccgtgaagtgcatgctgctgaactag

SEQ ID NO: 173879 - DNA, 1623 bp, synthetic construct
  misc_feature 1..1623: note = Description of Artificial Sequence: Synthetic coding sequence
  source 1..1623: mol_type = other DNA
atgtctgtgctcttcttctacatcatgagatacaagcagagcgaccctgaaaatccagacaatgacagatttgtgctggccaagaggctgagctttgtggatgtggccaccggctggctgggccagggcctgggcgtggcctgtggcatggcctacacaggcaagtactttgaccgggccagctacagagtcttctgcctgatgtctgatggagagagcagcgagggctctgtgtgggaggccatggcctttgccagctactacagcctggacaacctggtggccatctttgatgtgaaccggctgggccacagcggggccctgcctgctgagcactgcatcaacatctaccagaggcgctgtgaggccttcggctggaacacctacgtggtggatggaagagatgtggaggccctgtgccaggtgttctggcaggccagccaggtgaagcacaagcccacagctgtggtggccaagaccttcaagggccggggcacccccagcattgaagatgctgagagctggcacgccaagcccatgccccgggagcgggcagatgccatcatcaagctgattgagagccagatccagaccagcaggaacctggacccccagccccccatcgaggacagccctgaggtgaacatcacagatgtgaggatgaccagccccccagactacagagtgggggacaagatcgccaccaggaaggcctgtggcctggccctggccaagctgggctacgccaacaacagagtggtggtgctggatggagacacccgctacagcaccttcagcgagatcttcaacaaggagtacccagagcgcttcatcgagtgcttcatggccgagcagaacatggtgtctgtggccctgggctgtgccagccggggccgcaccatcgcctttgccagcacctttgctgccttcctgacccgggcctttgaccacatccgcatcggcggcctggccgagagcaacatcaacatcatcggcagccactgcggcgtgtctgtgggagatgatggagccagccagatggccctggaggacatcgccatgttccgcaccatccccaagtgcaccatcttctaccccacagatgctgtgtccacagagcacgctgtggccctggccgccaatgccaagggcatgtgcttcatccgcaccaccaggcctgagaccatggtgatctacaccccccaggagagatttgaaattggccaggccaaggtgctgcggcactgtgtgtctgacaaggtgaccgtcatcggggccggcatcaccgtgtatgaggccctggccgctgctgatgagctgagcaagcaggacatcttcatccgggtcatcgacctcttcaccatcaagcccctggatgtggccaccatcgtgagcagcgccaaggccacagagggccgcatcatcaccgtggaggaccactacccccagggcggcatcggggaggccgtgtgtgccgctgtgtccatggaccctgacatccaggtgcacagcctggccgtgtctggagtgccccagagcggcaagtctgaggagctgctggacatgtatggcatcagcgcccggcacatcatcgtggccgtgaagtgcatgctgctgaactag

SEQ ID NO: 173880 - DNA, 894 bp, synthetic construct
  misc_feature 1..894: note = Description of Artificial Sequence: Synthetic coding sequence
  source 1..894: mol_type = other DNA
atgtctgcctgggccgccgccagcctgagcagagctgctgcccgctgcctgctggcccggggccctggggtgcgggccgccccaccccgggacccccggcccagccaccctgagccccggggctgtggggccgcccctggccgcaccctgcacttcaccgctgctgtgcctgctggccacaacaagtggagcaaggtgcgccacatcaagggccccaaggatgtggagaggagccgcatcttcagcaagctgtgcctgaacatccggctggccgtgaaggagggcggccccaaccctgagcacaacagcaacctggccaacatcctggaggtgtgccgcagcaagcacatgcccaagagcaccatcgagacagccctgaagatggagaagagcaaggacacctacctgctgtatgagggccggggccctgggggcagcagcctgctgattgaggccctgagcaacagcagccacaagtgccaggccgacatccgccacatcctgaacaagaatggaggagtgatggctgtgggcgcccggcacagctttgacaagaagggcgtgattgtggtggaggtggaggaccgggagaagaaggctgtgaacctggagcgggccctggagatggccattgaagctggagcagaagatgtgaaggagacagaagatgaggaggagagaaatgtgttcaagttcatctgtgatgccagcagcctgcaccaggtgaggaagaagctggacagcctgggcctgtgcagcgtgtcctgtgccctggagttcatccccaacagcaaggtgcagctggccgagccagacctggagcaggccgcccacctgatccaggccctgagcaaccatgaagatgtgattcatgtgtatgacaacatcgagtag

SEQ ID NO: 173881 - DNA, 687 bp, synthetic construct
  misc_feature 1..687: note = Description of Artificial Sequence: Synthetic coding sequence
  source 1..687: mol_type = other DNA
atgtctgtgtctgagatctttgtggagctgcagggcttcctggccgctgagcaggacatccgggaggagatcaggaaggtggtgcagagcctggagcagacagcccgggagatcctgaccctgctgcagggcgtgcaccagggcgccggcttccaggacatccccaagcgctgcctgaaggcccgggagcactttggaacagtgaagacccacctgaccagcctgaagaccaagtttcctgctgagcagtactaccgcttccacgagcactggaggtttgtgctgcagaggctggtgttcctggccgcctttgtggtgtacctggagacagagaccctggtgacccgggaggccgtgacagagatcctgggcattgaaccagaccgggagaagggcttccacctggatgtggaggactacctgagcggcgtgctgatcctggccagcgagctgagccggctgtctgtgaacagcgtgacagctggggactacagccggcccctgcacatcagcaccttcatcaatgagctggacagcggcttccggctgctgaacctgaagaatgacagcctgaggaagagatatgatggcctgaagtatgatgtgaagaaggtggaggaggtggtgtatgacctgagcatccggggcttcaacaaggagacagctgctgcctgtgtggagaagtag

SEQ ID NO: 173882 - DNA, 585 bp, synthetic construct
  misc_feature 1..585: note = Description of Artificial Sequence: Synthetic coding sequence
  source 1..585: mol_type = other DNA
atgtctgtgtctgagatctttgtggagctgcagggcttcctggccgctgagcaggacatccccaagcgctgcctgaaggcccgggagcactttggaacagtgaagacccacctgaccagcctgaagaccaagtttcctgctgagcagtactaccgcttccacgagcactggaggtttgtgctgcagaggctggtgttcctggccgcctttgtggtgtacctggagacagagaccctggtgacccgggaggccgtgacagagatcctgggcattgaaccagaccgggagaagggcttccacctggatgtggaggactacctgagcggcgtgctgatcctggccagcgagctgagccggctgtctgtgaacagcgtgacagctggggactacagccggcccctgcacatcagcaccttcatcaatgagctggacagcggcttccggctgctgaacctgaagaatgacagcctgaggaagagatatgatggcctgaagtatgatgtgaagaaggtggaggaggtggtgtatgacctgagcatccggggcttcaacaaggagacagctgctgcctgtgtggagaagtag

SEQ ID NO: 173883 - DNA, 447 bp, synthetic construct
  misc_feature 1..447: note = Description of Artificial Sequence: Synthetic coding sequence
  source 1..447: mol_type = other DNA
atgtctgtgtctgagatctttgtggagctgcagggcttcctggccgctgagcaggacatccgggaggagatcaggaaggtggtgcagagcctggagcagacagcccgggagatcctgaccctgctgcagggcgtgcaccagggcgccggcttccaggacatccccaagcgctgcctgaaggcccgggagcactttggaacagtgaagacccacctgaccagcctgaagaccaagtttcctgctgagcagtactaccgcttccacgagcactggaggtttgtgctgcagaggctggtgttcctggccgcctttgtggtgtacctggagacagagaccctggtgacccgggaggccgtgacagagatcctgggcattgaagctgtgtgccagcagagggactgctggaggctgctgcccaccccaccccacctgcacctgcaccagtag

SEQ ID NO: 173884 - DNA, 873 bp, synthetic construct
  misc_feature 1..873: note = Description of Artificial Sequence: Synthetic coding sequence
  source 1..873: mol_type = other DNA
atgagcaacaaggagggcagcggcggcttcaggaagaggaagcatgacaacttcccccacaaccagaggcgggagggcaaggatgtgaacagcagcagccctgtgatgctggccttcaagagcttccagcaggagctggatgcccggcatgacaagtatgagcggctggtgaagctgagccgggacatcaccgtggagagcaagaggaccatcttcctgctgcaccgcatcaccagcgccccagacatggaggacatcctgacagagagcgagatcaagctggatggagtgcggcagaagatcttccaggtggcccaggagctgtctggagaggacatgcaccagttccaccgggccatcaccaccggcctgcaggagtatgtggaggccgtgtccttccagcacttcatcaagaccaggagcctcatctccatggatgagatcaacaagcagctgatcttcaccacagaagataatggcaaggagaacaagacccccagcagtgatgcccaggacaagcagtttggcacctggaggctgcgggtgacccctgtggactacctgctgggcgtggccgacctgactggagagctgatgaggatgtgcatcaacagcgtgggcaatggagacatcgacaccccatttgaggtgtcccagttcctgcggcaggtgtatgatggcttctccttcatcggcaacacaggcccctatgaggtgtccaagaagctgtacaccctgaagcagagcctggccaaggtggagaatgcctgctacgccctgaaggtgcggggcagcgagatccccaagcacatgctggctgatgtgttttctgtgaagacagagatgattgaccaggaggagggcatctcctag

SEQ ID NO: 173885 - DNA, 492 bp, synthetic construct
  misc_feature 1..492: note = Description of Artificial Sequence: Synthetic coding sequence
  source 1..492: mol_type = other DNA
atgagcaacaaggagggcagcggcggcttcaggaagaggaagcatgacaacttcccccacaaccagaggcgggagggcaaggatgtgaacagcagcagccctgtgatgctggccttcaagagcttccagcaggagctggatgcccggcatgacaagtatgagcggctggtgaagctgagccgggacatcaccgtggagagcaagaggaccatcttcctgctgcaccgcatcaccagcagccagtacctggaccacagcgccccagacatggaggacatcctgacagaaagtgagatcaagctggatggagtgcggcagaagatcttccaggtggcccaggagctgagcggggaggacatgcaccagttccaccgggccatcaccaccggcctgcaggagtatgtggaggccgtgtccttccagcacttcatcaagaccaggagcctcatctccatggatgagatcaacaagcagctgatcttcaccacctag

SEQ ID NO: 173886 - DNA, 273 bp, synthetic construct
  misc_feature 1..273: note = Description of Artificial Sequence: Synthetic coding sequence
  source 1..273: mol_type = other DNA
atggaccccctgcgggcccagcagctggccgctgagctggaggtggagatgatggctgacatgtacaacaggatgaccagcgcctgccacaggaaatgtgtgcccccccactacaaggaggccgagctgagcaaaggagagagcgtgtgcctggacagatgtgtgtccaagtacctggacatccacgagaggatgggcaagaagctgacagagctgtccatgcaggatgaggagctgatgaagagggtgcagcagagcagcggccctgcctag

SEQ ID NO: 173887 - DNA, 273 bp, synthetic construct; identical to SEQ ID NO: 173886
  misc_feature 1..273: note = Description of Artificial Sequence: Synthetic coding sequence
  source 1..273: mol_type = other DNA

SEQ ID NO: 173888 - DNA, 273 bp, synthetic construct; identical to SEQ ID NO: 173886
  misc_feature 1..273: note = Description of Artificial Sequence: Synthetic coding sequence
  source 1..273: mol_type = other DNA

SEQ ID NO: 173889 - DNA, 927 bp, synthetic construct
  misc_feature 1..927: note = Description of Artificial Sequence: Synthetic coding sequence
  source 1..927: mol_type = other DNA
atgaagcactatgaggtggagatcctggatgccaagacccgggagaagctgtgcttcctggacaaggtggagccccacgccaccatcgccgagatcaagaacctcttcaccaagacccacccccagtggtacccagcccggcagagcctgcggctggaccccaagggcaagagcctgaaggatgaagatgtgctgcagaagctgcctgtgggcaccacagccaccctgtacttccgggacctgggcgcccagatctcctgggtgacagtgttcctgacagaatatgccggccccctcttcatctacctgctcttctacttccgggtgcccttcatctacggccacaagtatgacttcaccagcagccgccacacagtggtgcacctggcctgcatctgccacagcttccactacatcaagaggctgctggagaccctgtttgtgcaccgcttcagccacggcaccatgcccctgaggaacatcttcaagaactgcacctactactggggctttgctgcctggatggcctactacatcaaccaccccctgtacaccccacccacctatggagcccagcaggtgaagctggccctggccatctttgtgatctgccagctgggcaacttcagcatccacatggccctgcgggacctgcggcctgctggcagcaagaccaggaagatcccctaccccaccaagaaccccttcacctggctgttcctgctggtgtcctgccccaactacacctatgaggtgggctcctggattggatttgccatcatgacccagtgcctgcctgtggccctcttcagcctggtgggcttcacccagatgaccatctgggccaagggcaagcacaggagctacctgaaggagttccgggactacccacccctgaggatgcccatcatccccttcctgctgtag

SEQ ID NO: 173890 - DNA, 516 bp, synthetic construct
  misc_feature 1..516: note = Description of Artificial Sequence: Synthetic coding sequence
  source 1..516: mol_type = other DNA
atggaggagtatgcccgggagccctgcccctggagaattgtggatgactgtggcggggccttcaccatgggcaccatcggcggcggcatcttccaggccatcaagggcttcaggaacagccctgtgggcgtgaaccaccggctgcggggcagcctgacagccatcaagacccgggccccccagctgggcggcagctttgctgtgtggggcggcctcttctccatgattgactgcagcatggtgcaggtgcggggcaaggaggacccctggaacagcatcaccagcggggccctgactggagccatcctggccgccagaaatggacctgtggccatggtgggcagcgctgccatgggcggcatcctgctggccctgattgagggcgccggcatcctgctgaccaggtttgccagcgcccagttccccaacggcccccagtttgctgaggaccccagccagctgcccagcacccagctgcccagcagcccctttggagactaccggcagtaccagtag

SEQ ID NO: 173891 - DNA, 519 bp, synthetic construct
  misc_feature 1..519: note = Description of Artificial Sequence: Synthetic coding sequence
  source 1..519: mol_type = other DNA
atggaggagtatgcccgggagccctgcccctggagaattgtggatgactgtggcggggccttcaccatgggcgtcatcggcggcggcgtcttccaggccatcaagggcttcagaaatgcccctgtgggcatccgccaccggctgcggggcagcgccaatgctgtgcgcatccgggccccccagatcggcggcagctttgctgtgtggggcggcctcttcagcaccatcgactgtggcctggtgcggctgcggggcaaggaggacccctggaacagcatcaccagcggggccctgactggagctgtgctggccgcccggagcggccccctggccatggtgggcagcgccatgatgggcggcatcctgctggccctgattgagggcgtgggcatcctgctgacccgctacacagcccagcagttcagaaatgccccacccttcctggaggaccccagccagctgccccccaaggatggcaccccagcccctggctaccccagctaccagcagtaccactag

SEQ ID NO: 173892 - DNA, 669 bp, synthetic construct
  misc_feature 1..669: note = Description of Artificial Sequence: Synthetic coding sequence
  source 1..669: mol_type = other DNA
atggaggagtatgcccgggagccctgcccctggagaattgtggatgactgtggcggggccttcaccatgggcgtcatcggcggcggcgtcttccaggccatcaagggcttcagaaatgcccctgtgtgccgcctgctgtctgaggcccccctcttcatctacagctgcagccgctctgtgagccccaccgtgaatgtgagcagcgagagagctgagagccggcccaccctcttcatggctgtgtccctgcacatggcctggtgcctggcccacatcggcatccgccaccggctgcggggcagcgccaatgctgtgcgcatccgggccccccagatcggcggcagctttgctgtgtggggcggcctcttcagcaccatcgactgtggcctggtgcggctgcggggcaaggaggacccctggaacagcatcaccagcggggccctgactggagctgtgctggccgcccggagcggccccctggccatggtgggcagcgccatgatgggcggcatcctgctggccctgattgagggcgtgggcatcctgctgacccgctacacagcccagcagttcagaaatgccccacccttcctggaggaccccagccagctgccccccaaggatggcaccccagcccctggctaccccagctaccagcagtaccactag

SEQ ID NO: 173893 - DNA, 585 bp, synthetic construct
  misc_feature 1..585: note = Description of Artificial Sequence: Synthetic coding sequence
  source 1..585: mol_type = other DNA
atggctgctgctgccccaaatgctgggggcagcgcccctgagacagctggcagcgctgaggcccccctgcagtacagcctgctgctgcagtacctggtgggggacaagaggcagccccggctgctggagcccggcagcctgggcggcatccccagccctgccaagtctgaggagcagaagatgattgagaaggccatggagagctgtgccttcaaggccgccctggcctgtgtgggcggctttgtgctgggcggggcctttggagtcttcaccgctggcatcgacaccaacgtgggctttgaccccaaggacccctaccgcacccccacagccaaggaggtgctgaaggacatgggccagaggggcatgtcctatgccaagaactttgccatcgtgggcgccatgttcagctgcacagagtgcctgattgagagctaccggggcaccagtgactggaagaacagcgtcatcagcggctgcatcaccggcggggccatcggcttccgggccggcctgaaggccggggccatcggctgcggcggctttgctgccttctctgctgccatcgactactacctgaggtag

SEQ ID NO: 173894 - DNA, 630 bp, synthetic construct
  misc_feature 1..630: note = Description of Artificial Sequence: Synthetic coding sequence
  source 1..630: mol_type = other DNA
atggagggcggcggcggcagcggcaacaagaccaccggcggcctggccggcttctttggagctggaggagctggctacagccatgctgacctggccggcgtgcccctgaccggcatgaaccccctgagcccctacctgaatgtggacccccgctacctggtgcaggacacagatgagttcatcctgcccaccggggccaacaagacccggggccgctttgagctggccttcttcaccatcggcggctgctgcatgaccggggccgccttcggggccatgaatggcctgcggctgggcctgaaggagacccagaacatggcctggagcaagcccagaaatgtgcagatcctgaacatggtgacccggcagggcgccctgtgggccaacaccctgggcagcctggccctgctgtacagcgcctttggagtcatcatcgagaagaccagaggagcagaagatgacctgaacacagtggccgccggcaccatgacaggcatgctgtacaagtgcacaggaggcctgcggggcatcgcccggggcggcctgaccggcctgaccctgaccagcctgtatgccctgtacaacaactgggagcacatgaagggcagcctgctgcagcagagcctgtag

SEQ ID NO: 173895 - DNA, 486 bp, synthetic construct
  misc_feature 1..486: note = Description of Artificial Sequence: Synthetic coding sequence
  source 1..486: mol_type = other DNA
atggagggcggcggcggcagcggcaacaagaccaccggcggcctggccggcttctttggagctggaggagctggctacagccatgctgacctggccggcgtgcccctgaccggcatgaaccccctgagcccctacctgaatgtggacccccgctacctggtgcaggacacagatgagttcatcctgcccaccggggccaacaagacccggggccgctttgagctggccttcttcaccatcggcggctgctgcatgacagccctgctgtacagcgcctttggagtcatcatcgagaagaccagaggagcagaagatgacctgaacacagtggccgccggcaccatgacaggcatgctgtacaagtgcacaggaggcctgcggggcatcgcccggggcggcctgaccggcctgaccctgaccagcctgtatgccctgtacaacaactgggagcacatgaagggcagcctgctgcagcagagcctgtag

SEQ ID NO: 173896 - DNA, 519 bp, synthetic construct
  misc_feature 1..519: note = Description of Artificial Sequence: Synthetic coding sequence
  source 1..519: mol_type = other DNA
atggagggcggcggcggcagcggcaacaagaccaccggcggcctggccggcttctttggagctggaggagctggctacagccatgctgacctggccggcgtgcccctgaccggcatgaaccccctgagcccctacctgaatgtggacccccgctacctggtgcaggacacagatgagttcatcctgcccaccggggccaacaagacccggggccgctttgagctggccttcttcaccatcggcggctgctgcatgaccggggccctgtgggccaacaccctgggcagcctggccctgctgtacagcgccttcggggtcatcatcgagaagaccagaggagcagaagatgacctgaacacagtggccgccggcaccatgacaggcatgctgtacaagtgcaccggcggcctgcggggcatcgcccggggcggcctgaccggcctgaccctgaccagcctgtatgccctgtacaacaactgggagcacatgaagggcagcctgctgcagcagagcctgtag

SEQ ID NO: 173897 - DNA, 381 bp, synthetic construct
  misc_feature 1..381: note = Description of Artificial Sequence: Synthetic coding sequence
  source 1..381: mol_type = other DNA
atgaccggggccgccttcggggccatgaatggcctgcggctgggcctgaaggagacccagaacatggcctggagcaagcccagaaatgtgcagatcctgaacatggtgacccggcagggcgccctgtgggccaacaccctgggcagcctggccctgctgtacagcgcctttggagtcatcatcgagaagaccagaggagcagaagatgacctgaacacagtggccgccggcaccatgacaggcatgctgtacaagtgcacagccagcgccagccagagcgccagaattgctgatggcctcatcttcacagagttctgcagcgtggcccggctgcagggcagcggcaccatcctggcccactacaacctgcacctgccctag

SEQ ID NO: 173898 - DNA, 324 bp, synthetic construct
  misc_feature 1..324: note = Description of Artificial Sequence: Synthetic coding sequence
  source 1..324: mol_type = other DNA
tgaggaggcagcggcaacaagaccactggaggcctggccggcttcttcggggccggcggggccggctacagccacgccgacctggccggcgtgccccccctgctgtacagcgcctttggagtcatcatcgagaagaccagaggagcagaagatgacctgaacacagtggccgccggcaccatgacaggcatgctgtacaagtgcacaggaggcctgcggggcatcgcccggggcggcctgaccggcctgaccctgaccagcctgtatgccctgtacaacaactgggagcacatgaagggcagcctgctgcagcagagcctgtag

SEQ ID NO: 173899 - DNA, 1359 bp, synthetic construct
  misc_feature 1..1359: note = Description of Artificial Sequence: Synthetic coding sequence
  source 1..1359: mol_type = other DNA
atggctgctgctgccctgcggagcggctggtgccgctgcccccggcgctgcctgggcagcggcatccagttcctgagcagccacaacctgccccacggcagcacctaccagatgagaagacctggaggagagctgcccctgagcaagagctacagcagcggcaacaggaagggcttcctgagcggcctgctggacaacgtgaagcaggagctggccaagaacaaggagatgaaggagagcatcaagaagttcagagatgaggcccggcggctggaggagagtgatgtgctgcaggaggcccggaggaagtacaagaccattgaaagtgaaacagtgaggaccagcgaggtgctgaggaagaagctgggggagctgaccggcaccgtgaaggagagcctgcacgaggtgtccaagagtgacctgggcaggaagatcaaggagggcgtggaggaggccgccaagacagccaagcagagcgctgagagcgtgtccaaaggaggagagaagctgggccgcacagctgccttccgggccctgagccagggcgtggagagcgtgaagaaggagattgatgattctgtgctgggccagacaggcccctaccgccggccccagaggctgaggaagaggacagaatttgctggggacaagttcaaggaggagaaggtgtttgagcccaatgaggaggccctgggcgtggtgctgcacaaggacagcaagtggtaccagcagtggaaggacttcaaggagaacaacgtggtgttcaaccgcttctttgagatgaagatgaagtatgatgaaagtgacaatgccttcatccgggccagccgggccctgacagacaaggtgacagacctgctgggcggcctcttcagcaagacagagatgtctgaggtgctgacagagatcctgcgggtggaccctgcctttgacaaggaccgcttcctgaagcagtgtgaaaatgacatcatccccaacgtgctggaggccatgatctctggagagctggacatcctgaaggactggtgctatgaggccacctacagccagctggcccaccccatccagcaggccaaggccctgggcctgcagttccacagccgcatcctggacatcgacaacgtggacctggccatgggcaagatgatggagcagggccctgtgctgatcatcaccttccaggcccagctggtgatggtggtgaggaaccccaagggggaggtggtggagggggaccctgacaaggtgctgaggatgctgtatgtgtgggccctgtgccgggaccaggatgagctgaacccctatgctgcctggaggctgctggacatcagcgccagcagcacagagcagatcctgtag

SEQ ID NO: 173900 - DNA, 294 bp, synthetic construct
  misc_feature 1..294: note = Description of Artificial Sequence: Synthetic coding sequence
  source 1..294: mol_type = other DNA
atggacagcagcagcagcagcagcgctgctggcctgggcgctgtggacccccagctgcagcacttcatcgaggtggagacccagaagcagcgcttccagcagctggtgcaccagatgacagagctgtgctgggagaagtgcatggacaagccaggccccaagctggacagcagagctgaggcctgctttgtgaactgtgtggagcgcttcatcgacaccagccagttcatcctgaaccggctggagcagacccagaagagcaagcctgtgttcagcgagagcctgagtgactag

SEQ ID NO: 173901 - DNA, 270 bp, synthetic construct
  misc_feature 1..270: note = Description of Artificial Sequence: Synthetic coding sequence
  source 1..270: mol_type = other DNA
atggccgcccagatccctgagagtgaccagatcaagcagttcaaggagttcctgggcacctacaacaagctgacagagacctgcttcctggactgtgtgaaggacttcaccacccgggaggtgaagccagaggagaccacctgcagcgagcactgcctgcagaagtacctgaagatgacccagaggatctccatgaggttccaggagtaccacatccagcagaatgaggccctggccgccaaggccggcctgctgggccagcccaggtag

SEQ ID NO: 173902 - DNA, 270 bp, synthetic construct; identical to SEQ ID NO: 173901
  misc_feature 1..270: note = Description of Artificial Sequence: Synthetic coding sequence
  source 1..270: mol_type = other DNA

SEQ ID NO: 173903 - DNA, 135 bp, synthetic construct
  misc_feature 1..135: note = Description of Artificial Sequence: Synthetic coding sequence
  source 1..135: mol_type = other DNA
atggccgcccagatccctgagagtgaccagatcaagcagttcaaggagttcctgggcacctacaacaagctgacagagacctgcttcctggactgtgtgaaggacttcaccacccgggaggtgaagccagagtag

SEQ ID NO: 173904 - DNA, 270 bp, synthetic construct; identical to SEQ ID NO: 173901
  misc_feature 1..270: note = Description of Artificial Sequence: Synthetic coding sequence
  source 1..270: mol_type = other DNA

SEQ ID NO: 173905 - DNA, 270 bp, synthetic construct; identical to SEQ ID NO: 173901
  misc_feature 1..270: note = Description of Artificial Sequence: Synthetic coding sequence
  source 1..270: mol_type = other DNA

SEQ ID NO: 173906 - DNA, 381 bp, synthetic construct
  misc_feature 1..381: note = Description of Artificial Sequence: Synthetic coding sequence
  source 1..381: mol_type = other DNA
atgcccttcttcggcaacaccttcagccccaagaagaccccacccaggaagagcgccagcctgagcaacctgcacagcctggacaggagcacccgggaggtggagctgggcctggagtatggcagccccaccatgaacctggccggccagagcctgaagtttgaaaatggccagtggattgctgagactggagtgtctgggggcgtggacagaagagaggtgcagaggctgcggcggaggaaccagcagctggaggaggagaacaacctgctgcggctgaaggtggacatcctgctggacatgctgtctgagagcacagctgagagccacctgatggagaaggagctggatgagctgcgcatcagcaggaagaggaagtag

SEQ ID NO: 173907 - DNA, 1086 bp, synthetic construct
  misc_feature 1..1086: note = Description of Artificial Sequence: Synthetic coding sequence
  source 1..1086: mol_type = other DNA
atgggaaatgtgctggccgccagcagccccccagctggccccccacctcctccagccccagccctggtgggcctgcccccacctccacccagccccccaggcttcaccctgccccccctgggcggcagcctgggcgccggcaccagcaccagccgcagcagcgagaggacccctggggccgccacagccagcgccagcggggctgctgaagatggagcctgtggctgcctgcccaaccctggcacctttgaggagtgccacaggaagtgcaaggagctgttccccatccagatggagggcgtgaagctgactgtgaacaagggcctgagcaaccacttccaggtgaaccacacagtggccctgagcaccatcggggagagcaactaccactttggagtgacctacgtgggcaccaagcagctgagccccacagaggccttccctgtgctggtgggggacatggacaacagcggcagcctgaatgcccaggtgatccaccagctgggccctggcctgcggagcaagatggccatccagacccagcagagcaagtttgtgaactggcaggtggatggagagtaccggggcagtgacttcaccgctgctgtgaccctgggcaacccagatgtgctggtgggcagcggcatcctggtggcccactacctgcagagcatcaccccctgcctggccctgggcggggagctggtgtaccacagaagacctggagaggagggcaccgtgatgagcctggccggcaagtacaccctgaacaactggctggccaccgtgaccctgggccaggccggcatgcacgccacctactaccacaaggccagtgaccagctgcaggtgggcgtggagtttgaggccagcaccaggatgcaggacacctctgtgtcctttggctaccagctggacctgcccaaggccaacctgctcttcaagggctctgtggacagcaactggatcgtgggcgccaccctggagaagaagctgccccccctgcccctgaccctggccctgggcgccttcctgaaccacaggaagaacaagttccagtgtggcttcggcctgaccatcggctag

SEQ ID NO: 173908 - DNA, 1086 bp, synthetic construct; identical to SEQ ID NO: 173907
  misc_feature 1..1086: note = Description of Artificial Sequence: Synthetic coding sequence
  source 1..1086: mol_type = other DNA

SEQ ID NO: 173909 - DNA, 1086 bp, synthetic construct; identical to SEQ ID NO: 173907
  misc_feature 1..1086: note = Description of Artificial Sequence: Synthetic coding sequence
  source 1..1086: mol_type = other DNA

SEQ ID NO: 173910 - DNA, 453 bp, synthetic construct
  misc_feature 1..453: note = Description of Artificial Sequence: Synthetic coding sequence
  source 1..453: mol_type = other DNA
atgcccagcagcggctctgtgagccgcagccggcagaggggccgctccatggccagccggggctttgatggcagccggcggggcagcctgcggcgggccggggcccgggagccccccagcgaggtgattgaagctgctgcccaggccagcggcagctgctggagcagccccttcttcagcgccagcaccccatctgctgctgccactggagtgcccggccccacagacatggctgctgtgctgcagcaggtgctggagaggacagagctgaacaagctgcccaagtctgtgcagaacaagctggagaagttcctggccgaccagcagagcgagattgatggcctgaagggcagacatgagaagttcaaggtggagagcgagcagcagtactttgaaattgagaagaggctgagccacagccaggagcggctggtgaatgagacccgggagtag

SEQ ID NO: 173911 - DNA, 7092 bp, synthetic construct
  misc_feature 1..7092: note = Description of Artificial Sequence: Synthetic coding sequence
  source 1..7092: mol_type = other DNA
atggctgctgtgctgcagcaggtgctggagaggacagagctgaacaagctgcccaagtctgtgcagaacaagctggagaagttcctggccgaccagcagagcgagattgatggcctgaagggcagacatgagaagttcaaggtggagagcgagcagcagtactttgaaattgagaagaggctgagccacagccaggagcggctggtgaatgagacccgggagtgccagagcctgcggctggagctggagaagctgaacaaccagctgaaggccctgacagagaagaacaaggagctggagatcgcccaggacagaaatattgccatccagagccagttcaccaggaccaaggaggagctggaggccgagaagagggacctgatccgcaccaatgaaaggctgagccaggagctggagtacctgacagaagatgtgaagaggctgaatgagaagctgaaggagagcaacaccaccaagggggagctgcagctgaagctggatgagctgcaggccagtgatgtgtctgtgaagtaccgggagaagaggctggagcaggagaaggagctgctgcacagccagaacacctggctgaacacagagctgaagaccaagacagatgagctgctggccctgggccgggagaagggaaatgagatcctggagctgaagtgcaacctggagaacaagaaggaggaggtgtcccggctggaggagcagatgaatggcctgaagaccagcaatgagcacctgcagaagcacgtggaggacctgctgaccaagctgaaggaggccaaggagcagcaggcctccatggaggagaagttccacaatgagctgaatgcccacatcaagctgagcaacctgtacaagtctgctgctgatgacagcgaggccaagagcaatgagctgaccagggctgtggaggagctgcacaagctgctgaaggaggccggggaggccaacaaggccatccaggaccacctgctggaggtggagcagagcaaggaccagatggagaaggagatgctggagaagattggccgcctggagaaggagctggagaatgccaatgacctgctgagcgccaccaagaggaagggggccatcctgtctgaggaggagctggccgccatgagccccacagctgctgctgtggccaagatcgtgaagccaggcatgaagctgacagagctgtacaatgcctacgtggagacccaggaccagctgctgctggagaagctggagaacaagaggatcaacaagtacctggatgagatcgtgaaggaggtggaggccaaggcccccatcctgaagaggcagcgggaggagtatgaaagagcccagaaggctgtggccagcctgtctgtgaagctggagcaggccatgaaggagatccagaggctgcaggaggacacagacaaggccaacaagcagagctctgtgctggagcgggacaacagaaggatggagatccaggtgaaggacctgagccagcagatccgggtgctgctgatggagctggaggaggcccggggcaaccacgtgatcagagatgaggaggtgtcctctgctgacatcagcagcagcagcgaggtgatcagccagcacctggtgtcctacagaaatattgaggagctgcagcagcagaaccagaggctgctggtggccctgcgggagctgggggagacccgggagcgggaggagcaggagaccaccagcagcaagatcacagagctgcagctgaagctggagagcgccctgacagagctggagcagctgaggaagagccggcagcaccagatgcagctggtggacagcatcgtgcggcagagggacatgtaccgcatcctgctgagccagaccaccggggtggccatccccctgcacgccagcagcctggatgatgtgtccctggccagcacccccaagaggcccagcaccagccagacagtgtccaccccagcccctgtgcctgtgattgagagcacagaggccatcgaggccaaggccgccctgaagcagctgcaggagatctttgagaactacaagaaggagaaggccgagaatgagaagatccagaatgagcagctggagaagctgcaggagcaggtgacagacctgcggagccagaacaccaagatcagcacccagctggactttgccagcaagagatatgagatgctgcaggacaacgtggagggctaccgccgggagatcaccagcctgcatgaaagaaaccagaagctgacagccaccacccagaagcaggagcagatcatcaacaccatgacccaggacctgcggggggccaatgagaagctggccgtggccgaggtgcgggcagagaacctgaagaaggagaaggagatgctgaagctgtctgaggtgcggctgagccagcagcgggagagcctgctggccgagcagaggggccagaacctgctgctgaccaacctgcagaccatccagggcatcctggagaggagtgaaacagagaccaagcagaggctgagcagccagatcgagaagctggagcacgagatcagccacctgaagaagaagctggagaatgaggtggagcagaggcacaccctgaccaggaacctggatgtgcagctgctggacaccaagaggcagctggacacagagaccaacctgcacctgaacaccaaggagctgctgaagaatgcccagaaggagatcgccaccctgaagcagcacctgagcaacatggaggtgcaggtggccagccagagcagccagaggacaggcaagggccagcccagcaacaaggaggatgtggatgacctggtgtcccagctgcggcagacagaggagcaggtgaatgacctgaaggagcggctgaagaccagcaccagcaatgtggagcagtaccaggccatggtgaccagcctggaggagagcctgaacaaggagaagcaggtgacagaggaggtgaggaagaacatcgaggtgcggctgaaggagagcgctgagttccagacccagctggagaagaagctgatggaggtggagaaggagaagcaggagctgcaggatgacaagagaagagccatcgagagcatggagcagcagctgtctgagctgaagaagaccctgagctctgtgcagaatgaggtgcaggaggccctgcagagggccagcacagccctgagcaatgagcagcaggcccggcgggactgccaggagcaggccaagattgctgtggaggcccagaacaagtatgaaagagagctgatgctgcacgccgcagatgtggaggccctgcaggccgccaaggagcaggtgtccaagatggcctctgtgcggcagcacctggaggagaccacccagaaggccgagagccagctgctggagtgcaaggcctcctgggaggagcgggagaggatgctgaaggatgaggtgtccaaatgtgtgtgccgctgtgaggacctggagaagcagaaccggctgctgcatgaccagatcgagaagctgagtgacaaggtggtggcctctgtgaaggagggcgtgcagggccccctgaatgtgtccctgtctgaggagggcaagagccaggagcagatcctggagatcctgcgcttcatccggcgggagaaggagattgctgagaccaggtttgaggtggcccaggtggagagcctgcgctaccggcagagggtggagctgctggagcgggagctgcaggagctgcaggacagcctgaatgctgagcgggagaaggtgcaggtgacagccaagaccatggcccagcacgaggagctgatgaagaagacagagaccatgaatgtggtgatggagaccaacaagatgctgcgggaggagaaggagcggctggagcaggacctgcagcagatgcaggccaaggtgaggaagctggagctggacatcctgcccctgcaggaggccaatgctgagctgtctgagaagagcggcatgctgcaggccgagaagaagctgctggaggaggatgtgaagcgctggaaggccaggaaccagcacctggtgtcccagcagaaggaccctgacacagaggagtacaggaagctgctgtctgagaaggaggtgcacaccaagaggatccagcagctgacagaggagatcggccgcctgaaggccgagatcgcccggagcaatgccagcctgaccaacaaccagaacctgatccagagcctgaaggaggacctgaacaaggtgaggacagagaaggagaccatccagaaggacctggatgccaagatcatcgacatccaggagaaggtgaagaccatcacccaggtgaagaagattggaagacgctacaagacccagtatgaggagctgaaggcccagcaggacaaggtgatggagaccagcgcccagagcagcggggaccaccaggagcagcacgtgtctgtgcaggagatgcaggagctgaaggagaccctgaaccaggccgagaccaagagcaagagcctggagagccaggtggagaacctgcagaagaccctgtctgagaaggagacagaggccaggaacctgcaggagcagacagtgcagctgcagagcgagctgagccggctgcggcaggacctgcaggacaggaccacccaggaggagcagctgcggcagcagatcacagagaaggaggagaagaccaggaaggccatcgtggccgccaagagcaagatcgcccacctggccggcgtgaaggaccagctgaccaaggaaaatgaggagctgaagcagagaaatggagccctggaccagcagaaggatgagctggatgtgcgcatcacagccctgaagagccagtatgagggccgcatcagccggctggagcgggagctgcgggagcaccaggagcggcacctggagcagagagatgagccccaggagcccagcaacaaggtgcctgagcagcagaggcagatcaccctgaagaccaccccagccagcggggagcggggcatcgccagcaccagtgaccccccaacagccaacatcaagcccacccctgtggtgtccacccccagcaaggtgacagctgctgccatggccggcaacaagagcaccccccgggccagcatccggcccatggtgaccccagccaccgtgaccaaccccaccaccacccccacagccaccgtgatgcccaccacccaggtggagagccaggaggccatgcagagcgagggccctgtggagcacgtgcctgtgtttggcagcaccagcggctctgtgcgcagcaccagccccaacgtgcagcccagcatcagccagcccatcctgactgtgcagcagcagacccaggccacagcctttgtgcagcccacccagcagagccacccccagatcgagcccgccaaccaggagctgagcagcaacatcgtggaggtggtgcagagcagccctgtggagcggcccagcaccagcacagctgtgtttggcaccgtgtctgccacccccagcagcagcctgcccaagaggacccgggaggaggaggaggacagcaccatcgaggccagtgaccaggtgtctgatgacacagtggagatgcccctgcccaagaagctgaagtctgtgacccctgtgggcacagaggaggaggtgatggccgaggagagcacagatggagaggtggagacccaggtgtacaaccaggacagccaggacagcatcggggagggcgtgacccagggcgactacacccccatggaggacagcgaggagaccagccagagcctgcagattgacctgggccccctgcagagcgaccagcagaccaccaccagcagccaggacggccagggcaaaggagatgatgtgattgtcatcgacagtgatgatgaggaggaggatgatgatgaaaatgatggagaacatgaagattatgaagaagatgaggaggatgatgatgatgatgaagatgacaccggcatgggagatgaaggagaggacagcaatgaaggcaccggcagcgcagatggaaatgatggctatgaagcagatgatgctgagggcggagatggaacagaccccggcacagaaacagaggagagcatgggcggcggggagggcaaccacagagctgctgacagccagaacagcggggagggcaacacaggagctgctgagagcagcttcagccaggaggtgtcccgggagcagcagcccagcagcgccagcgagcggcaggccccccgggccccccagagccccaggaggcctccccaccccctgcccccccggctgaccatccacgccccaccccaggagctgggcccccctgtgcagaggatccagatgacccggcggcagagcgtgggccggggcctgcagctgaccccaggcattggaggcatgcagcagcacttctttgatgatgaggacagaacagtgcccagcacccccaccctggtggtgccccacaggacagatggctttgctgaggccatccacagcccccaggtggccggcgtgccccgcttccgcttcggccccccagaggacatgccccagaccagcagcagccacagcgacctgggccagctggccagccagggcggcctgggcatgtatgagacccccctcttcctggcccacgaggaggagagcggcggccgctctgtgcccaccacccccctgcaggtggccgcccctgtgacagtgttcacagagagcaccaccagtgatgccagcgagcacgccagccagagcgtgcccatggtgaccaccagcacaggcaccctgagcaccaccaatgaaacagccactggagatgatggagatgaggtgtttgtggaggccgagagcgagggcatcagcagcgaggccggcctggagattgacagccagcaggaggaggagcctgtgcaggccagtgatgaaagtgacctgcccagcaccagccaggacccccccagcagcagctctgtggacaccagcagcagccagcccaagcccttccggcgggtgcggctgcagaccaccctgcggcagggcgtgcggggccggcagttcaaccggcagaggggcgtgtcccatgccatgggcggccggggcggcatcaacagaggcaacatcaactag

SEQ ID NO: 173912 - DNA, 453 bp, synthetic construct; identical to SEQ ID NO: 173910
  misc_feature 1..453: note = Description of Artificial Sequence: Synthetic coding sequence
  source 1..453: mol_type = other DNA

SEQ ID NO: 173913 - DNA, 510 bp, synthetic construct
  misc_feature 1..510: note = Description of Artificial Sequence: Synthetic coding sequence
  source 1..510: mol_type = other DNA
atggccccaccctgggtgcctgccatgggcttcaccctggcccccagcctgggctgctttgtgggcagcagatttgtgcatggagagggcctgcgctggtacgccggcctgcagaagcccagctggcaccccccccactgggtgctgggccctgtgtggggcaccctgtacagcgccatgggctacggcagctacctggtgtggaaggagctgggcggcttcacagagaaggctgtggtgcccctgggcctgtacacaggccagctggccctgaactgggcctggccacccatcttcttcggggcccggcagatgggctgggccctggtggacctgctgctggtgtctggagctgctgctgccaccaccgtggcctggtaccaggtgagccccctggccgcccggctgctgtacccctacctggcctggctggccttcaccaccaccctgaactactgtgtgtggagggacaaccacggctggaggggcggccgccgcctgcctgagtag

SEQ ID NO: 173914 - DNA, 510 bp, synthetic construct; identical to SEQ ID NO: 173913
  misc_feature 1..510: note = Description of Artificial Sequence: Synthetic coding sequence
  source 1..510: mol_type = other DNA

SEQ ID NO: 173915 - DNA, 309 bp, synthetic construct
  misc_feature 1..309: note = Description of Artificial Sequence: Synthetic coding sequence
  source 1..309: mol_type = other DNA
atggccccccacctgctgtggtgccccaccaacggcctgggcctgggcggcagccctgctggccagtggggcggcggcagccactaccggggcctggtgcctggagagcccgccggccggcccccagccctgcccctgcccggcctggccggcctgcatgaccacacccagctgctgaggatggccggccagccctggctggcctggggcacagctgctgcccgggtgtctgcccggcccacccgggactgcagctgcaccagccgctgccaccacgcctgtgatgtggtggccgtgaccctgtcctag

SEQ ID NO: 173916 - DNA, 324 bp, synthetic construct
  misc_feature 1..324: note = Description of Artificial Sequence: Synthetic coding sequence
  source 1..324: mol_type = other DNA
atggccccaccctgggtgcctgccatgggcttcaccctggcccccagcctgggctgctttgtgggcagcagatttgtgcatggagagggcctgcgctggtacgccggcctgcagaagcccagctggcaccccccccactgggtgctgggccctgtgtggggcaccctgtacagcgccatgggctacggcagctacctggtgtggaaggagctgggcggcttcacagagaaggctgtggtgcccctgggcctgtacacaggccagctggccctgaactgggcctggccacccatcttcttcggggcccggcagatgggctggtag

SEQ ID NO: 173917 - DNA, 609 bp, synthetic construct
  misc_feature 1..609: note = Description of Artificial Sequence: Synthetic coding sequence
  source 1..609: mol_type = other DNA
atgtgctatggaaaatgtgcccgctgcatcggccacagcctggtgggcctggccctgctgtgcatcgccgccaacatcctgctgtacttccccaacggggagaccaagtatgccagcgagaaccacctgagcagatttgtgtggttcttctctggaattgtgggcggcggcctgctgatgctgctgcctgcctttgtgttcatcggcctggagcaggatgactgctgcggctgctgcggccacgagaactgtgggaagagatgtgccatgctgagctctgtgctggccgccctgattggaattgctggcagcggctactgtgtgattgtggccgccctgggcctggccgagggccccctgtgcctggacagcctgggccagtggaactacacctttgccagcacagagggccagtacctgctggacaccagcacctggagcgagtgcacagagcccaagcacatcgtggagtggaatgtgtccctcttcagcatcctgctggccctgggcggcatcgagttcatcctgtgcctgatccaggtgatcaatggagtgctgggcggcatctgtggcttctgctgcagccaccagcagcagtatgactgctag

SEQ ID NO: 173918 - DNA, 699 bp, synthetic construct
  misc_feature 1..699: note = Description of Artificial Sequence: Synthetic coding sequence
  source 1..699: mol_type = other DNA
atgtgctatggaaaatgtgcccgctgcatcggccacagcctggtgggcctggccctgctgtgcatcgccgccaacatcctgctgtacttccccaacggggagaccaagtatgccagcgagaaccacctgagcagatttgtgtggttcttctctggaattgtgggcggcggcctgctgatgctgctgcctgcctttgtgttcatcggcctggagcaggatgactgctgcggctgctgcggccacgagaactgtgggaagagatgtgccatgctgagctctgtgctggccgccctgattggaattgctggcagcggctactgtgtgattgtggccgccctgggcctggccgagggccccctgtgcctggacagcctgggccagtggaactacacctttgccagcacagagggccagtacctgctggacaccagcacctggagcgagtgcacagagcccaagcacatcgtggagtggaatgtgtccctcttcagcatcctgctggccctgggcggcatcgagttcatcctgtgcctgatccaggtgatcaatggagtgctgggcggcatctgtggcttctgctgcagccaccagcagcagatgacagccaagaggaccaaccctggccagagccacaacctgcccctcttccactgcaacctgtacatcagcctggtgttcatctgcaagaccctgtactag

SEQ ID NO: 173919 - DNA, 609 bp, synthetic construct
  misc_feature 1..609: note = Description of Artificial Sequence: Synthetic coding sequence
  source 1..609: mol_type = other DNA
atgtgcacaggaggctgtgcccgctgcctgggcggcaccctcatccccctggccttcttcggcttcctggccaacatcctgctcttcttccctgggggcaaggtgattgatgacaatgaccacctgagccaggagatctggttctttggaggcatcctgggcagcggcgtgctgatgatcttccctgccctggtgttcctgggcctgaagaacaatgactgctgcggctgctgcggaaatgaaggctgcggcaagagatttgccatgttcaccagcaccatctttgctgtggtgggcttcctgggcgccggctacagcttcatcatcagcgccatcagcatcaacaagggccccaagtgcctgatggccaacagcacctggggctaccccttccatgatggagactacctgaatgatgaggccctgtggaacaagtgccgggagcccctgaatgtggtgccctggaacctgaccctcttcagcatcctgctggtggtgggcggcatccagatggtgctgtgtgccatccaggtggtgaatggcctgctgggcaccctgtgtggggactgccagtgctgcggctgctgcggaggagatggccctgtgtag

SEQ ID NO: 173920 - DNA, 594 bp, synthetic construct
  misc_feature 1..594: note = Description of Artificial Sequence: Synthetic coding sequence
  source 1..594: mol_type = other DNA
atgtgcacaggaaaatgtgcccgctgtgtgggcctgagcctcatcaccctgtgcctggtgtgcatcgtggccaatgccctgctgctggtgcccaacggggagacctcctggaccaacaccaaccacctgagcctgcaggtgtggctgatgggcggcttcatcggcggcggcctgatggtgctgtgccccggcattgctgctgtgcgggccggcggcaagggctgctgcggggccggctgctgcggcaaccgctgcaggatgctgcggagcgtcttcagcagcgccttcggcgtgctgggcgccatctactgcctgtctgtgtctggggccggcctgagaaatggcccccgctgcctgatgaatggagagtggggctaccactttgaggacacagctggggcctacctgctgaacagaaccctgtgggacagatgtgaggccccaccccgggtggtgccctggaatgtgaccctcttcagcctgctggtggccgccagctgcctggagatcgtgctgtgtggcatccagctggtgaatgccaccatcggggtcttctgtggggactgcaggaagaagcaggacaccccccactag

SEQ ID NO: 173921 - DNA, 438 bp, synthetic construct
  misc_feature 1..438: note = Description of Artificial Sequence: Synthetic coding sequence
  source 1..438: mol_type = other DNA
atgtctgccagcgctgccactggagtgtttgtgctgagcctgagcgccatccctgtgacctacgtgttcaaccacctggccgcccagcacgacagctggaccatcgtgggcgtggccgccctgatcctcttcctggtggccctgctggcccgggtgctggtgaagaggaagccaccccgggaccccctcttctacgtgtatgctgtgtttggcttcacctctgtggtgaacctgatcatcggcctggagcaggacggcatcattgatggcttcatgacccactacctgcgggagggggagccctacctgaacacagcctacggccacatgatctgctactgggatggcagcgcccactacctgatgtacctggtgatggtggccgccatcgcctgggagtgctggcacatctgcagcatcctcttcctgaccctgtag

SEQ ID NO: 173922 - DNA, 1113 bp, synthetic construct
  misc_feature 1..1113: note = Description of Artificial Sequence: Synthetic coding sequence
  source 1..1113: mol_type = other DNA
atgtctgccagcgctgccactggagtgtttgtgctgagcctgagcgccatccctgtgacctacgtgttcaaccacctggccgcccagcacgacagctggaccatcgtgggcgtggccgccctgatcctcttcctggtggccctgctggcccgggtgctggtgaagaggaagccaccccgggaccccctcttctacgtgtatgctgtgtttggcttcacctctgtggtgaacctgatcatcggcctggagcaggacggcatcattgatggcttcatgacccactacctgcgggagggggagccctacctgaacacagcctacggccacatgatctgctactgggatggcagcgcccactacctgatgtacctggtgatggtggccgccatcgcctgggaggagacctaccgcaccatcggcctgtactgggtgggcagcatcatcatgtctgtggtggtgtttgtgcccggcaacatcgtgggcaagtatggcacccgcatctgcccagccttcttcctgagcatcccctacacctgcctgcctgtgtgggccggcttccgcatctacaaccagcccagcgagaactacaactaccccagcaaggtgatccaggaggcccaggccaaggacctgctgcggcggccctttgacctgatgctggtggtgtgcctgctgctggccaccggcttctgcctcttccggggcctgattgccctggactgccccagcgagctgtgccgcctgtacacccagttccaggagccctacctgaaggaccctgctgcctaccccaagatccagatgctggcctacatgttctacagcgtgccctactttgtgacagccctgtatggcctggtggtgcccggctgctcctggatgccagacatcaccctcatccacgccggcggcctggcccaggcccagttcagccacatcggggccagcctgcacgccaggacagcctacgtgtacagagtgcctgaggaggccaagatcctcttcctggccctgaacatcgcctacggcgtgctgccccagctgctggcctaccgctgcatctacaagccagagttcttcatcaagaccaaggccgaggagaaggtggagtag

SEQ ID NO: 173923 - DNA, 1020 bp, synthetic construct
  misc_feature 1..1020: note = Description of Artificial Sequence: Synthetic coding sequence
  source 1..1020: mol_type = other DNA
atgtctgccagcgctgccactggagtgtttgtgctgagcctgagcgccatccctgtgacctacgtgttcaaccacctggccgcccagcacgacagctggaccatcgtgggcgtggccgccctgatcctcttcctggtggccctgctggcccgggtgctggtgaagaggaagccaccccgggaccccctcttctacgtgtatgctgtgtttggcttcacctctgtggtgaacctgatcatcggcctggagcaggacggcatcattgatggcttcatgacccactacctgcgggagggggagccctacctgaacacagcctacggccacatgatctgctactgggatggcagcgcccactacctgatgtacctggtgatggtggccgccatcgcctgggaggagacctaccgcaccatcggcctgtactgggtgggcagcatcatcatgtctgtggtggtgtttgtgcccggcaacatcgtgggcaagtatggcacccgcatctgcccagccttcttcctgagcatcccctacacctgcctgcctgtgtgggccggcttccgcatctacaaccagcccagcgagaactacaactaccccagcaaggtgatccaggaggcccaggccaaggacctgctgcggcggccctttgacctgatgctggtggtgtgcctgctgctggccaccggcttctgcctcttccggggcctgatgctggcctacatgttctacagcgtgccctactttgtgacagccctgtatggcctggtggtgcccggctgctcctggatgccagacatcaccctcatccatgctgggggcctggcccaggcccagttcagccacatcggggccagcctgcacgccaggacagcctacgtgtacagagtgcctgaggaggccaagatcctcttcctggccctgaacatcgcctatggagtgctgccccagctgctggcctaccgctgcatctacaagccagagttcttcatcaagaccaaggccgaggagaaggtggagtag

SEQ ID NO: 173924 - DNA, 1122 bp, synthetic construct
  misc_feature 1..1122: note = Description of Artificial Sequence: Synthetic coding sequence
  source 1..1122: mol_type = other DNA
atgtctgccagcgctgccactggagtgtttgtgctgagcctgagcgccatccctgtgacctacgtgttcaaccacctggccgcccagcacgacagctggaccatcgtgggcgtggccgccctgatcctcttcctggtggccctgctggcccgggtgctggtgaagaggaagccaccccgggaccccctcttctacgtgtatgctgtgtttggcttcacctctgtggtgaacctgatcatcggcctggagcaggacggcatcattgatggcttcatgacccactacctgcgggagggggagccctacctgaacacagcctacggccacatgatctgctactgggatggcagcgcccactacctgatgtacctggtgatggtggccgccatcgcctgggactgctaccgggagacctaccgcaccatcggcctgtactgggtgggcagcatcatcatgtctgtggtggtgtttgtgcccggcaacatcatcggcaagtatggcacccgcatctgcccagccttcttcctgagcatcccctacacctgcctgcctgtgtgggccggcttccgcatctacaaccagcccagcgagaactacaactaccccagcaaggtgatccaggaggcccaggccaaggacctgctgcggcggccctttgacctgatgctggtggtgtgcctgctgctggccaccggcttctgcctcttccggggcctcatcgccctggactgccccagcgagctgtgccgcctgtacacccagttccaggagccctacctgaaggaccctgctgcctaccccaagatccagatgctggcctacatgttctacagcgtgccctactttgtgacagccctgtatggcctggtggtgcccggctgctcctggatgccagacatcaccctcatccatgctgggggcctggcccaggcccagttcagccacatcggggccagcctgcacgccaggacagcctacgtgtacagagtgcctgaggaggccaagatcctcttcctggccctgaacatcgcctatggagtgctgccccagctgctggcctaccgctgcatctacaagccagagttcttcatcaagaccaaggccgaggagaaggtggagtag

SEQ ID NO: 173925 - DNA, 567 bp, synthetic construct
  misc_feature 1..567: note = Description of Artificial Sequence: Synthetic coding sequence
  source 1..567: mol_type = other DNA
atgtctgccagcgctgccactggagtgtttgtgctgagcctgagcgccatccctgtgacctacgtgttcaaccacctggccgcccagcacgacagctggaccatcgtgggcgtggccgccctgatcctcttcctggtggccctgctggcccgggtgctggtgaagaggaagccaccccgggaccccctcttctacgtgtatgctgtgtttggcttcacctctgtggtgaacctgatcatcggcctggagcaggacggcatcattgatggcttcatgacccactacctgcgggagggggagccctacctgaacacagcctacggccacatgatctgctactgggatggcagcgcccactacctgatgtacctggtgatggtggccgccatcgcctgggaggagacctaccgcaccatcggcctgtactgggtgggcagcatcatcatgtctgtggtggtgtttgtgcccggcaacatcgtggatgctggcatctacgtgctcttctgcagcctgctgtgtgactgcaccgtgtggctgagcggctcctggatgttcctggatgcctag

SEQ ID NO: 173926 - DNA, 1020 bp, synthetic construct; identical to SEQ ID NO: 173923
  misc_feature 1..1020: note = Description of Artificial Sequence: Synthetic coding sequence
  source 1..1020: mol_type = other DNA

SEQ ID NO: 173927 - DNA, 1056 bp, synthetic construct
  misc_feature 1..1056: note = Description of Artificial Sequence: Synthetic coding sequence
  source 1..1056: mol_type = other DNA
atggacatcccccccctggccggcaagattgctgccctgagcctgagcgccctgcctgtgtcctatgccctgaaccacgtgtctgccctgagccaccccctgtgggtggccctgatgtctgccctgatcctgggcctgctgtttgtggccgtgtacagcctgagccacggggaggtgtcctatgaccccctgtatgctgtgtttgctgtgtttgccttcacctctgtggtggacctgatcatcgccctgcaggaggacagctatgtggtgggcttcatggagttctacaccaaggagggggagccctacctgaggacagcccacggcgtcttcatctgctactgggatggcaccgtgcactacctgctgtacctggccatggccggggccatctgcaggaggaagcgctacagaaactttggcctgtactggctgggcagctttgccatgagcatcctggtgttcctgactggaaacatcctgggcaagtacagcagcgagatccggcctgccttcttcctgaccatcccctacctgctggtgccctgctgggccggcatgaaggtgttcagccagccccgggccctgacccgctgcacagccaacatggtgcaggaggagcagaggaagggcctgctgcagaggcctgctgacctggccctggtgatctacctgatcctggccggcttcttcaccctcttccggggcctggtggtgctggactgccccacagatgcctgctttgtgtacatctaccagtatgagccctacctgcgggaccctgtggcctaccccaaggtgcagatgctgatgtacatgttttatgtgctgcccttctgtggcctggccgcctatgccctgaccttccctggctgctcctggctgcctgactgggccctggtgtttgctgggggcatcggccaggcccagttcagccacatgggcgcctccatgcacctgcggacccccttcacctaccgctgcctgcagtggccagccttcttccaccagcccccacccagcgaccccctggccctgcacaagaagcagcactag

SEQ ID NO: 173928 - DNA, 1134 bp, synthetic construct
  misc_feature 1..1134: note = Description of Artificial Sequence: Synthetic coding sequence
  source 1..1134: mol_type = other DNA
atggacatcccccccctggccggcaagattgctgccctgagcctgagcgccctgcctgtgtcctatgccctgaaccacgtgtctgccctgagccaccccctgtgggtggccctgatgtctgccctgatcctgggcctgctgtttgtggccgtgtacagcctgagccacggggaggtgtcctatgaccccctgtatgctgtgtttgctgtgtttgccttcacctctgtggtggacctgatcatcgccctgcaggaggacagctatgtggtgggcttcatggagttctacaccaaggagggggagccctacctgaggacagcccacggcgtcttcatctgctactgggatggcaccgtgcactacctgctgtacctggccatggccggggccatctgcaggaggaagcgctacagaaactttggcctgtactggctgggcagctttgccatgagcatcctggtgttcctgactggaaacatcctgggcaagtacagcagcgagatccggcctgccttcttcctgaccatcccctacctgctggtgccctgctgggccggcatgaaggtgttcagccagccccgggccctgacccgctgcacagccaacatggtgcaggaggagcagaggaagggcctgctgcagaggcctgctgacctggccctggtgatctacctgatcctggccggcttcttcaccctcttccggggcctggtggtgctggactgccccacagatgcctgctttgtgtacatctaccagtatgagccctacctgcgggaccctgtggcctaccccaaggtgcagatgctgatgtacatgttttatgtgctgcccttctgtggcctggccgcctatgccctgaccttccctggctgctcctggctgcctgactgggccctggtgtttgctgggggcatcggccaggcccagttcagccacatgggcgcctccatgcacctgcggacccccttcacctacagagtgcctgaggacacctggggctgcttctttgtgtgcaacctgctgtatgccctgggcccccacctgctggcctaccgctgcctgcagtggccagccttcttccaccagcccccacccagcgaccccctggccctgcacaagaagcagcactag

SEQ ID NO: 173929 - DNA, 642 bp, synthetic construct
  misc_feature 1..642: note = Description of Artificial Sequence: Synthetic coding sequence
  source 1..642: mol_type = other DNA
atggacatcccccccctggccggcaagattgctgccctgagcctgagcgccctgcctgtgtcctatgccctgaaccacgtgtctgccctgagccaccccctgtgggtggccctgatgtctgccctgatcctgggcctgctgtttgtggccgtgtacagcctgagccacggggaggtgtcctatgaccccctgtatgctgtgtttgctgtgtttgccttcacctctgtggtggacctgatcatcgccctgcaggaggacagctatgtggtgggcttcatggagttctacaccaaggaggtgctgggcggccggcccggcagccccctgccccactgccccagcgagagccccacctgcccccaccgggagagccacacctgtgcccagaggacagagagcagcagcgccaccggcatggccctcttcaccaccagcagcacctggccctggccagcccccagcgctgagggcgctgggggccgggagcgggtggccccagaccccggccgggaggtggccagcagtgatggagtgcccggccagggcggggcccggtctgtgtgcagaagaaaccaggatgccagcctgggcctgcagcccggggtggcccggcggcgcttccagggcaccagccaggtgtag

SEQ ID NO: 173930 - DNA, 1257 bp, synthetic construct
  misc_feature 1..1257: note = Description of Artificial Sequence: Synthetic coding sequence
  source 1..1257: mol_type = other DNA
atggcccccacccagggcccccgggcccccctggagtttggaggccccctgggcgccgccgccctgctgctgctgctgcctgccaccatgttccacctgctgctggccgcccggagcggccctgcccggctgctgggccccccagccagcctgcccggcctggaggtgctgtggagcccccgggccctgctgctgtggctggcctggctgggcctgcaggccgccctgtacctgctgcctgccaggaaggtggccgagggccaggagctgaaggacaagagccggctgcgctaccccatcaatggcttccaggccctggtgctgacagccctgctggtgggcctgggcatgtctgctggcctgcccctgggcgccctgcctgagatgctgctgcccctggcctttgtggccaccctgacagccttcatcttcagcctcttcctgtacatgaaggcccaggtggcccctgtgtctgccctggcccctgggggcaacagcggcaaccccatctatgacttcttcctgggccgggagctgaacccccgcatctgcttctttgacttcaagtacttctgtgagctgcggcccggcctgattggctgggtgctgatcaacctggccctgctgatgaaggaggccgagctgcggggcagccccagcctggccatgtggctggtgaatggcttccagctgctgtatgtgggagatgccctgtggcatgaggaggccgtgctgaccaccatggacatcacccatgatggcttcggcttcatgctggcctttggagacatggcctgggtgcccttcacctacagcctgcaggcccagttcctgctgcaccacccccagcccctgggcctgcccatggccagcgtcatctgcctgatcaatgccaccggctactacatcttccggggggccaacagccagaagaacaccttcaggaagaaccccagcgacccccgggtggccggcctggagaccatcagcacagccactggaaggaagctgctggtgtctggctggtggggcatggtgcgccaccccaactacctgggggacctgatcatggccctggcctggagcctgccctgtggggtgagccacctgctgccctacttctacctgctgtacttcaccgccctgctggtgcaccgggaggccagagatgagcggcagtgcctgcagaagtatggcctggcctggcaggagtactgcagaagagtgccctaccgcatcatgccctacatctactag

SEQ ID NO: 173931 - DNA, 1176 bp, synthetic construct
  misc_feature 1..1176: note = Description of Artificial Sequence: Synthetic coding sequence
  source 1..1176: mol_type = other DNA
atggcccccacccagggcccccgggcccccctggagtttggaggccccctgggcgccgccgccctgctgctgctgctgcctgccaccatgttccacctgctgctggccgcccggagcggccctgcccggctgctgggccccccagccagcctgcccggcctggaggtgctgtggagcccccgggccctgctgctgtggctggcctggctgggcctgcaggccgccctgtacctgctgcctgccaggaaggtggccgagggccaggagctgaaggacaagagccggctgcgctaccccatcaatggcttccaggccctggtgctgacagccctgctggtgggcctgggcatgtctgctggcctgcccctgggcgccctgcctgagatgctgctgcccctggcctttgtggccaccctgacagccttcatcttcagcctcttcctgtacatgaaggcccaggtggcccctgtgtctgccctggcccctgggggcaacagcggcaaccccatctatgacttcttcctgggccgggagctgaacccccgcatctgcttctttgacttcaagtacttctgtgagctgcggcccggcctgattggctgggtgctgatcaacctggccctgctgatgaaggaggccgagctgcggggcagccccagcctggccatgtggctggtgaatggcttccagctgctgtatgtgggagatgccctgtggcatgaggaggccgtgctgaccaccatggacatcacccatgatggcttcggcttcatgctggcctttggagacatggcctgggtgcccttcacctacagcctgcaggcccagttcctgctgcaccacccccagcccctgggcctgcccatggccagcgtcatctgcctgatcaatggcctggagaccatcagcacagccaccggcaggaagctgctggtgtctggctggtggggcatggtgcgccaccccaactacctgggggacctgatcatggccctggcctggagcctgccctgtggggtgagccacctgctgccctacttctacctgctgtacttcaccgccctgctggtgcaccgggaggccagagatgagcggcagtgcctgcagaagtatggcctggcctggcaggagtactgccggcgggtgccctaccgcatcatgccctacatctactag

SEQ ID NO: 173932 - DNA, 909 bp, synthetic construct
  misc_feature 1..909: note = Description of Artificial Sequence: Synthetic coding sequence
  source 1..909: mol_type = other DNA
atgtctgctggcctgcccctgggcgccctgcctgagatgctgctgcccctggcctttgtggccaccctgacagccttcatcttcagcctcttcctgtacatgaaggcccaggtggcccctgtgtctgccctggcccctgggggcaacagcggcaaccccatctatgacttcttcctgggccgggagctgaacccccgcatctgcttctttgacttcaagtacttctgtgagctgcggcccggcctgattggctgggtgctgatcaacctggccctgctgatgaaggaggccgagctgcggggcagccccagcctggccatgtggctggtgaatggcttccagctgctgtatgtgggagatgccctgtggcatgaggaggccgtgctgaccaccatggacatcacccatgatggcttcggcttcatgctggcctttggagacatggcctgggtgcccttcacctacagcctgcaggcccagttcctgctgcaccacccccagcccctgggcctgcccatggccagcgtcatctgcctgatcaatgccaccggctactacatcttccggggggccaacagccagaagaacaccttcaggaagaaccccagcgacccccgggtggccggcctggagaccatcagcacagccactggaaggaagctgctggtgtctggctggtggggcatggtgcgccaccccaactacctgggggacctgatcatggccctggcctggagcctgccctgtggggtgagccacctgctgccctacttctacctgctgtacttcaccgccctgctggtgcaccgggaggccagagatgagcggcagtgcctgcagaagtatggcctggcctggcaggagtactgcagaagagtgccctaccgcatcatgccctacatctactag

SEQ ID NO: 173933 - DNA, 1713 bp, synthetic construct
  misc_feature 1..1713: note = Description of Artificial Sequence: Synthetic coding sequence
  source 1..1713: mol_type = other DNA
atgggcttcctgcagctgctggtggtggccgtgctggccagcgagcaccgggtggccggggctgctgaggtgtttggaaacagcagcgagggcctgattgagttctctgtgggcaagttccgctactttgagctgaaccggcccttccctgaggaggccatcctgcatgacatcagcagcaatgtgaccttcctgatcttccagatccacagccagtaccagaacaccaccgtgtccttcagccccaccctgctgagcaacagcagcgagactggaacagccagcggcctggtgttcatcctgcggcctgagcagagcacctgcacctggtacctgggcaccagcggcatccagcctgtgcagaacatggccatcctgctgagctacagcgagcgggaccctgtgcctgggggctgcaacctggagtttgacctggacatcgaccccaacatctacctggagtacaacttctttgagaccaccatcaagtttgccccagccaacctgggctacgcccggggcgtggaccccccaccctgtgatgctggaacagaccaggacagccgctggaggctgcagtatgatgtgtaccagtacttcctgcctgaaaatgacctgacagaggagatgctgctgaagcacctgcagaggatggtgtctgtgccccaggtgaaggccagcgccctgaaggtggtgaccctgacagccaatgacaagacctctgtgtccttcagcagcctgcccggccagggcgtcatctacaacgtgattgtgtgggaccccttcctgaacaccagcgctgcctacatcccagcccacacctacgcctgcagctttgaagctggggagggcagctgtgccagcctgggccgggtgagcagcaaggtgttcttcaccctgtttgccctgctgggcttcttcatctgcttcttcggccaccgcttctggaagacagagctgttcttcatcggcttcatcatcatgggcttcttcttctacatcctgatcacccggctgacccccatcaagtatgatgtgaacctgatcctgacagctgtgacaggctctgtgggcggcatgttcctggtggccgtgtggtggaggtttggcatcctgagcatctgcatgctgtgtgtgggcctggtgctgggcttcctgatcagctctgtgaccttcttcacccccctgggcaacctgaagatcttccatgatgatggagtcttctgggtgaccttcagctgcatcgccatcctgatccctgtggtgttcatgggctgcctgcgcatcctgaacatcctgacctgtggggtcatcggcagctacagcgtggtgctggccatcgacagctactggagcaccagcctgagctacatcaccctgaatgtgctgaagagggccctgaacaaggacttccaccgggccttcaccaacgtgcccttccagaccaatgacttcatcatcctggccgtgtggggcatgctggccgtgtctggcatcaccctgcagatccggcgggagcggggccggcccttcttccccccccacccctacaagctgtggaagcaggagcgggagcggcgggtgaccaacatcctggaccccagctaccacatcccccccctgcgggagcggctgtatggccgcctgacccagatcaagggcctcttccagaaggagcagcctgctggggagaggacccccctgctgctgtag

SEQ ID NO: 173934 - DNA, 351 bp, synthetic construct
  misc_feature 1..351: note = Description of Artificial Sequence: Synthetic coding sequence
  source 1..351: mol_type = other DNA
atgggcttcctgcagctgctggtggtggccgtgctggccagcgagcaccgggtggccggggctgctgaggtgtttggaaacagcagcgaggtgtacctggtggtgggcctcatcgagttctctgtgggcaagttccgctactttgagctgaaccggcccttccctgaggaggccatcctgcatgacatcagcagcaatgtgaccttcctgatcttccagatccacagccagtaccagaacaccaccgtgtccttcagccccaccctgctgagcaacagcagcgagaccggcacagccagcggcctggtgttcatcctgcggcctgagcagagcacctgcacctggtactag

SEQ ID NO: 173935 - DNA, 1413 bp, synthetic construct
  misc_feature 1..1413: note = Description of Artificial Sequence: Synthetic coding sequence
  source 1..1413: mol_type = other DNA
atgggcatctggaccagcggcacagacatcttcctgagcctgtgggagatctacgtgagccccaggagccctggctggatggacttcatccagcacctgggcgtgtgctgcctggtggccctgatctctgtgggcctgctgtctgtggccgcctgctggttcctgcccagcatcatcgctgctgctgcctcctggatcatcacctgtgtgctgctgtgctgcagcaagcacgcccgctgcttcatcctgctggtgttcctgagctgtggcctgcgggagggcagaaatgccctgattgctgctggcactggaattgtcatcctgggccacgtggagaacatcttccacaacttcaagggcctgctggatggcatgacctgcaacctgcgggccaagagcttcagcatccacttccccctgctgaagaagtacatcgaggccatccagtggatctacggcctggccacccccctgtctgtgtttgatgacctggtgtcctggaaccagaccctggccgtgtccctcttcagccccagccacgtgctggaggcccagctgaatgacagcaagggggaggtgctgtctgtgctgtaccagatggccaccaccacagaggtgctgagcagcctgggccagaagctgctggcctttgctggcctgagcctggtgctgctgggcaccggcctcttcatgaagcgcttcctgggcccctgtggctggaagtatgagaacatctacatcacccggcagtttgtgcagtttgatgagcgggagcggcaccagcagaggccctgtgtgctgcccctgaacaaggaggagaggaggaaatatgtgatcatccccaccttctggcccacccccaaggagaggaagaacctgggcctcttcttcctgcccatcctgatccacctgtgcatctgggtgctgtttgctgctgtggactacctgctgtaccgcctcatcttctctgtgtccaagcagttccagagcctgcccggctttgaggtgcacctgaagctgcatggagagaagcagggcacccaggacatcatccatgacagcagcttcaacatctctgtgtttgagcccaactgcatccccaagcccaagttcctgctgtctgagacctgggtgcccctgagcgtcatcctgctgatcctggtgatgctgggcctgctgagcagcatcctgatgcagctgaagatcctggtgtctgccagcttctaccccagcgtggagaggaagaggatccagtacctgcacgccaagctgctgaagaagaggagcaagcagcccctgggggaggtgaagaggcggctgagcctgtacctgaccaagatccacttctggctgcctgtgctgaagatgatcaggaagaagcagatggacatggccagcgctgacaagagctag

SEQ ID NO: 173936 - DNA, 567 bp, synthetic construct
  misc_feature 1..567: note = Description of Artificial Sequence: Synthetic coding sequence
  source 1..567: mol_type = other DNA
atgagcaccatgtttgctgacaccctgctgattgtgttcatctctgtgtgcacagccctgctggccgagggcatcacctgggtgctggtgtacagaacagacaagtacaagaggctgaaggccgaggtggagaagcagagcaagaagctggagaagaagaaggagaccatcacagagagcgctggccggcagcagaagaagaagattgagcggcaggaggagaagctgaagaacaacaacagagacctgtccatggtgaggatgaagtccatgtttgccatcggcttctgcttcaccgccctgatgggcatgttcaacagcatctttgatggccgggtggtggccaagctgcccttcacccccctgagctacatccagggcctgagccacaggaacctgctgggagatgacaccacagactgcagcttcatcttcctgtacatcctgtgcaccatgagcatccggcagaacatccagaagatcctgggcctggcccccagcagagctgccaccaagcaggccggcggcttcctgggccccccaccacccagcggcaagttctcctag

SEQ ID NO: 173937 - DNA, 510 bp, synthetic construct
  misc_feature 1..510: note = Description of Artificial Sequence: Synthetic coding sequence
  source 1..510: mol_type = other DNA
atgagcaccatgtttgctgacaccctgctgattgtgttcatctctgtgtgcacagccctgctggccgagggcatcacctgggtgctggtgtacagaacagacaagtacaagaggctgaaggccgaggtggagaagcagagcaagaagctggagaagaagaaggagaccatcacagagagcgctggccggcagcagaaggtgaggatgaagtccatgtttgccatcggcttctgcttcaccgccctgatgggcatgttcaacagcatctttgatggccgggtggtggccaagctgcccttcacccccctgagctacatccagggcctgagccacaggaacctgctgggagatgacaccacagactgcagcttcatcttcctgtacatcctgtgcaccatgagcatccggcagaacatccagaagatcctgggcctggcccccagccgggccgccaccaagcaggccggcggcttcctgggccccccacctccttctgggaagttctcctag

SEQ ID NO: 173938 - DNA, 603 bp, synthetic construct
  misc_feature 1..603: note = Description of Artificial Sequence: Synthetic coding sequence
  source 1..603: mol_type = other DNA
atgatgcactacgtggactacagcatgatgtaccacctgatccggggccagagcgtcatcaagctgtacatcatctacaacatgctggaggtggccgacaggctcttcagcagctttggccaggacatcctggatgccctgtactggacagccacagagcccaaggagaggaagagggcccacatcggctttgtggagatcaagggcagcgtcttcaagaagtttgagaagaacaacctcttccagatgagcaacagcgacatcaaggagcgcttcaccaactacgtgctgctgctgattgtgtgcctgaggaacatggagcagttctcctggaacccagaccacctgtgggtgctcttcccagatgtgtgcatggtgattgccagcgagattgctgtggacatcgtgaagcacgccttcatcaccaagttcaatgacatcacagcagatgtgtacagcgagtaccgggccagcctggcctttgacctggtgagcagccggcagaagaatgcctacacagactacagcgacagcgtggcccggaggatgggcttcatccccctgcccctggccgtgctggtggacatccctgagagcacctag

SEQ ID NO: 173939 - DNA, 1371 bp, synthetic construct
  misc_feature 1..1371: note = Description of Artificial Sequence: Synthetic coding sequence
  source 1..1371: mol_type = other DNA
atggtgtttggcatcttcctgtgcctggatgccttcctgtatgtgttcaccctgctgcccctgcgggtcttcctggccctcttccggctgctgaccctgccctgctacggcctgcgggaccggcggctgctgcagcctgcccaggtgtgtgacatcctgaagggcgtcatcctggtgatctgctacttcatgatgcactacgtggactacagcatgatgtaccacctgatccggggccagagcgtcatcaagctgtacatcatctacaacatgctggaggtggccgacaggctcttcagcagctttggccaggacatcctggatgccctgtactggacagccacagagcccaaggagaggaagagggcccacatcggggtcatcccccacttcttcatggctgtgctgtatgtgttcctgcacgccatcctgatcatggtgcaggccaccaccctgaatgtggccttcaacagccacaacaagagcctgctgaccatcatgatgagcaacaactttgtggagatcaagggcagcgtcttcaagaagtttgagaagaacaacctcttccagatgagcaacagcgacatcaaggagcgcttcaccaactacgtgctgctgctgattgtgtgcctgaggaacatggagcagttctcctggaacccagaccacctgtgggtgctcttcccagatgtgtgcatggtgattgccagcgagattgctgtggacatcgtgaagcacgccttcatcaccaagttcaatgacatcacagcagatgtgtacagcgagtaccgggccagcctggcctttgacctggtgagcagccggcagaagaatgcctacacagactacagcgacagcgtggcccggaggatgggcttcatccccctgcccctggccgtgctgctgatccgggtggtgaccagcagcatcaaggtgcagggcatcctgtcctatgcctgcgtcatcctcttctacttcggcctcatcagcctgaaggtgctgaacagcatcgtgctgctgggcaagagctgccagtatgtgaaggaggccaagatggaggagaagctgagcaaccccccagccacctgcaccccaggcaagcccagcagcaagagccagaacaagtgcaagcccagccagggcctgagcacagaggagaacctgagcgccagcatcaccaagcagcccatccaccagaaggagaacatcatccccctgctggtgaccagcaacagcgaccagttcctgaccaccccagatggagatgagaaggacatcacccaggacaacagcgagctgaagcacaggagcagcaagaaggacctgctggagattgaccgcttcaccatctgtggcaacagaattgattag

SEQ ID NO: 173940 - DNA, 1704 bp, synthetic construct
  misc_feature 1..1704: note = Description of Artificial Sequence: Synthetic coding sequence
  source 1..1704: mol_type = other DNA
atggccggcgtgggagatgctgctgcccctggagagggcggcggcggcggcgtggatggcccccagagagatggccgcggggaggccgagcagcccggcggcagcggcggccagggccccccaccagccccccagctgacagagaccctgggcttctatgaaagtgacagaagaagagaaagaagaagaggaagaacagagctgagcctgctgcgcttcctgtctgctgagctgacccggggctacttcctggagcacaatgaggccaagtacacagagcggcgggagcgggtgtacacctgcctgcgcatcccccgggagctggagaagctgatggtgtttggcatcttcctgtgcctggatgccttcctgtatgtgttcaccctgctgcccctgcgggtcttcctggccctcttccggctgctgaccctgccctgctacggcctgcgggaccggcggctgctgcagcctgcccaggtgtgtgacatcctgaagggcgtcatcctggtgatctgctacttcatgatgcactacgtggactacagcatgatgtaccacctgatccggggccagagcgtcatcaagctgtacatcatctacaacatgctggaggtggccgacaggctcttcagcagctttggccaggacatcctggatgccctgtactggacagccacagagcccaaggagaggaagagggcccacatcggggtcatcccccacttcttcatggctgtgctgtatgtgttcctgcacgccatcctgatcatggtgcaggccaccaccctgaatgtggccttcaacagccacaacaagagcctgctgaccatcatgatgagcaacaactttgtggagatcaagggctctgtgttcaagaagtttgagaagaacaacctcttccagatgagcaacagcgacatcaaggagcgcttcaccaactacgtgctgctgctgattgtgtgcctgaggaacatggagcagttctcctggaacccagaccacctgtgggtgctcttcccagatgtgtgcatggtgattgccagcgagattgctgtggacatcgtgaagcacgccttcatcaccaagttcaatgacatcacagcagatgtgtacagcgagtaccgggccagcctggcctttgacctggtgagcagccggcagaagaatgcctacacagactacagcgacagcgtggcccggaggatgggcttcatccccctgcccctggccgtgctgctgatccgggtggtgaccagcagcatcaaggtgcagggcatcctgtcctatgcctgtgtgatcctcttctacttcggcctcatcagcctgaaggtgctgaacagcatcgtgctgctgggcaagagctgccagtatgtgaaggaggccaagatggaggagaagctgagcaaccccccagccacctgcacccctgggaagcccagcagcaagagccagaacaagtgcaagcccagccagggcctgagcacagaggagaacctgagcgccagcatcaccaagcagcccatccaccagaaggagaacatcatccccctgctggtgaccagcaacagcgaccagttcctgaccaccccagatggagatgagaaggacatcacccaggacaacagcgagctgaagcacaggagcagcaagaaggacctgctggagattgaccgcttcaccatctgtggcaacagaattgattag

SEQ ID NO: 173941 - DNA, 1689 bp, synthetic construct
  misc_feature 1..1689: note = Description of Artificial Sequence: Synthetic coding sequence
  source 1..1689: mol_type = other DNA
atggccggcgtgggagatgctgctgcccctggagagggcggcggcggcggcgtggatggcccccagagagatggccgcggggaggccgagcagcccggcggcagcggcggccagggccccccaccagccccccagctgacagagaccctgggcttctatgaaagtgacagaagaagagaaagaagaagaggaagaacagagctgagcctgctgcgcttcctgtctgctgagctgacccggggctacttcctggagcacaatgaggccaagtacacagagcggcgggagcgggtgtacacctgcctgcgcatcccccgggagctggagaagctgatggtgtttggcatcttcctgtgcctggatgccttcctgtatgtgttcaccctgctgcccctgcgggtcttcctggccctcttccggctgctgaccctgccctgctacggcctgcgggaccggcggctgctgcagcctgcccaggtgtgtgacatcctgaagggcgtcatcctggtgatctgctacttcatgatgcactacgtggactacagcatgatgtaccacctgatccggggccagagcgtcatcaagctgtacatcatctacaacatgctggaggtggccgacaggctcttcagcagctttggccaggacatcctggatgccctgtactggacagccacagagcccaaggagaggaagagggcccacatcggggtcatcccccacttcttcatggctgtgctgtatgtgttcctgcacgccatcctgatcatggtgcaggccaccaccctgaatgtggccttcaacagccacaacaagagcctgctgaccatcatgatgagcaacaactttgtggagatcaagggctctgtgttcaagaagtttgagaagaacaacctcttccagatgagcaacagcgacatcaaggagcgcttcaccaactacgtgctgctgctgattgtgtgcctgaggaacatggagcagttctcctggaacccagaccacctgtgggtgctcttcccagatgtgtgcatggtgattgccagcgagattgctgtggacatcgtgaagcacgccttcatcaccaagttcaatgacatcacagcagatgtgtacagcgagtaccgggccagcctggcctttgacctggtgagcagccggcagaagaatgcctacacagactacagcgacagcgtggcccggaggatgggcttcatccccctgcccctggccgtgctgctgatccgggtggtgaccagcagcatcaaggtgcagggcatcctgtcctatgcctgtgtgatcctcttctacttcggcctcatcagcctgaaggtgctgaacagcatcgtgctgctgggcaagagctgccagtatgtgaaggaggccaagatggaggagaagctgagcaaccccccagccacctgcacccctgggaagcccagcagcaagagccagaacaagtgcaagcccagccagggcctgagcacagaggagaacctgagcgccagcatcaccaagcagcccatccaccagaaggagaacatcatccccctgctggtgaccagcaacagcgaccagttcctgaccaccccagatggagatgagaaggacatcacccaggacaacagcgagctgaagcacaggagcagcaagtctgtgctgctgtgccagagcggcctgcctgaatgttag

SEQ ID NO: 173942 - DNA, 2283 bp, synthetic construct
  misc_feature 1..2283: note = Description of Artificial Sequence: Synthetic coding sequence
  source 1..2283: mol_type = other DNA
atgagccccaagaaggtgcagatcaaggtggaggagaaggaggatgaaacagaggagagcagcagcgaggaggaggaggaggtggaggacaagctgccccggcgggagagcctgcggcccaagaggaagaggaccagagatgtgatcaatgaagatgatcctgagcctgagccagaagatgaggagaccaggaaggcccgggagaaggagaggagaagaaggctgaagagaggagctgaggaggaggagattgatgaggaggagctggagcggctgaaggccgagctggatgagaagaggcagatcatcgccaccgtgaagtgcaagccctggaagatggagaagaagattgaggtgctgaaggaggccaagaagtttgtgtctgaaaatgaaggagccctgggcaagggcaagggcaagcgctggtttgccttcaagatgatgatggccaagaagtgggccaagttcctgcgggactttgagaacttcaaggccgcctgtgtgccctgggagaacaagatcaaggccatcgagagccagtttggcagctctgtggccagctacttcctgttcctgcgctggatgtatggagtgaacatggtgctcttcatcctgaccttcagcctcatcatgctgcctgagtacctgtggggcctgccctacggcagcctgcccaggaagacagtgcccagggctgaggaggccagcgctgccaactttggagtgctgtatgacttcaacggcctggcccagtacagcgtgctcttctacggctactatgacaacaagaggaccatcggctggatgaacttccggctgcccctgagctacttcctggtgggcatcatgtgcatcggctacagcttcctggtggtgctgaaggccatgaccaagaacattggagatgatggcggcggagatgacaacaccttcaacttctcctggaaggtgttcacctcctgggactacctgattggcaaccctgagacagctgacaacaagttcaacagcatcaccatgaacttcaaggaggccatcacagaggagaaggccgcccaggtggaggagaatgtgcacctgatccgcttcctgcgcttcctggccaacttctttgtgttcctgaccctgggcggcagcggctacctgatcttctgggccgtgaagaggagccaggagtttgcccagcaggaccctgacaccctgggctggtgggagaagaatgagatgaacatggtgatgagcctgctgggcatgttctgccccaccctgtttgacctgtttgctgagctggaggactaccaccccctgattgccctgaagtggctgctgggccgcatctttgccctgctgctgggcaacctgtatgtgttcatcctggccctgatggatgagatcaacaacaagattgaggaggagaagctggtgaaggccaacatcaccctgtgggaggccaacatgatcaaggcctacaatgccagcttcagcgagaacagcactggaccacccttctttgtgcacccagcagatgtgccccggggcccctgctgggagaccatggtgggccaggagtttgtgcggctgactgtgtctgatgtgctgaccacctacgtgaccatcctgattggagacttcctgcgggcctgctttgtgcgcttctgcaactactgctggtgctgggacctggagtatggctaccccagctacacagaatttgacatctctggaaatgtgctggccctgatcttcaaccagggcatgatctggatgggcagcttctttgcccccagcctgcccggcatcaacatcctgcggctgcacacctccatgtacttccagtgctgggccgtgatgtgctgcaatgtgcctgaggcccgggtcttcaaggccagccgcagcaacaacttctacctgggcatgctgctgctgatcctcttcctgagcaccatgcctgtgctgtacatgattgtgtccctgcccccatcctttgactgtggccccttcagcggcaagaacaggatgtttgaggtgattggagagaccctggagcatgacttccccagctggatggccaagatcctgcggcagctgagcaaccctggcctggtgattgctgtgatcctggtgatggtgctggccatctactacctgaatgccacagccaagggccagaaggccgccaacctggacctgaagaagaagatgaagatgcaggccctggagaacaagatgaggaacaagaagatggccgccgcccgggctgctgctgctgctggccggcagtag

SEQ ID NO: 173943 - DNA, 2283 bp, synthetic construct; identical to SEQ ID NO: 173942
  misc_feature 1..2283: note = Description of Artificial Sequence: Synthetic coding sequence
  source 1..2283: mol_type = other DNA

SEQ ID NO: 173944 - DNA, 2223 bp, synthetic construct
  misc_feature 1..2223: note = Description of Artificial Sequence: Synthetic coding sequence
  source 1..2223: mol_type = other DNA
gtggagtggagcggggagtgcctgcggagctgccggcgggaggtgcagatcaaggtggaggagaaggaggatgaaacagaggagagcagcagcgaggaggaggaggaggtggaggacaagctgccccggcgggagagcctgcggcccaagaggaagaggaccagagatgtgatcaatgaagatgatcctgagcctgagccagaagatgaggagaccaggaaggcccgggagaaggagaggagaagaaggctgaagagaggagctgaggccaagaagtttgtgtctgaaaatgaaggagccctgggcaagggcaagggcaagcgctggtttgccttcaagatgatgatggccaagaagtgggccaagttcctgcgggactttgagaacttcaaggccgcctgtgtgccctgggagaacaagatcaaggccatcgagagccagtttggcagctctgtggccagctacttcctgttcctgcgctggatgtatggagtgaacatggtgctcttcatcctgaccttcagcctcatcatgctgcctgagtacctgtggggcctgccctacggcagcctgcccaggaagacagtgcccagggctgaggaggccagcgctgccaactttggagtgctgtatgacttcaacggcctggcccagtacagcgtgctcttctacggctactatgacaacaagaggaccatcggctggatgaacttccggctgcccctgagctacttcctggtgggcatcatgtgcatcggctacagcttcctggtggtgctgaaggccatgaccaagaacattggagatgatggcggcggagatgacaacaccttcaacttctcctggaaggtgttcacctcctgggactacctgattggcaaccctgagacagctgacaacaagttcaacagcatcaccatgaacttcaaggaggccatcacagaggagaaggccgcccaggtggaggagaatgtgcacctgatccgcttcctgcgcttcctggccaacttctttgtgttcctgaccctgggcggcagcggctacctgatcttctgggccgtgaagaggagccaggagtttgcccagcaggaccctgacaccctgggctggtgggagaagaatgagatgaacatggtgatgagcctgctgggcatgttctgccccaccctgtttgacctgtttgctgagctggaggactaccaccccctcatcgccctgaagtggctgctgggccgcatctttgccctgctgctgggcaacctgtatgtgttcatcctggccctgatggatgagatcaacaacaagattgaggaggagaagctggtgaaggccaacatcaccctgtgggaggccaacatgatcaaggcctacaatgccagcttcagcgagaacagcacaggcccccccttctttgtgcacccagcagatgtgccccggggcccctgctgggagaccatggtgggccaggagtttgtgcggctgactgtgtctgatgtgctgaccacctacgtgaccatcctgattggagacttcctgcgggcctgctttgtgcgcttctgcaactactgctggtgctgggacctggagtatggctaccccagctacacagaatttgacatctctggaaatgtgctggccctgatcttcaaccagggcatgatctggatgggcagcttctttgcccccagcctgcccggcatcaacatcctgcggctgcacacctccatgtacttccagtgctgggccgtgatgtgctgcaatgtgcctgaggcccgggtcttcaaggccagccgcagcaacaacttctacctgggcatgctgctgctgatcctcttcctgagcaccatgcctgtgctgtacatgattgtgtccctgccccccagctttgactgtggccccttcagcggcaagaacaggatgtttgaagtcatcggggagaccctggagcatgacttccccagctggatggccaagatcctgcggcagctgagcaaccctggcctggtgattgctgtgatcctggtgatggtgctggccatctactacctgaatgccacagccaagggccagaaggccgccaacctggacctgaagaagaagatgaagatgctgcagctgctggtggccagcaacaagtacccagagagccctgagaaggtgcactttgccctgctcttcaagagcaatgccatctgtgagaggcctgagaacaagcactgctag

SEQ ID NO: 173945 - DNA, 2283 bp, synthetic construct; identical to SEQ ID NO: 173942
  misc_feature 1..2283: note = Description of Artificial Sequence: Synthetic coding sequence
  source 1..2283: mol_type = other DNA

SEQ ID NO: 173946 - DNA, 2184 bp, synthetic construct
  misc_feature 1..2184: note = Description of Artificial Sequence: Synthetic coding sequence
  source 1..2184: mol_type = other DNA
gtggagtggagcggggagtgcctgcggagctgccggcgggaggtgcagatcaaggtggaggagaaggaggatgaaacagaggagagcagcagcgaggaggaggaggaggtggaggacaagctgccccggcgggagagcctgcggcccaagaggaagaggaccagagatgtgatcaatgaagatgatcctgagcctgagccagaagatgaggagaccaggaaggcccgggagaaggagaggagaagaaggctgaagagaggagctgaggccaagaagtttgtgtctgaaaatgaaggagccctgggcaagggcaagggcaagcgctggtttgccttcaagatgatgatggccaagaagtgggccaagttcctgcgggactttgagaacttcaaggccgcctgtgtgccctgggagaacaagatcaaggccatcgagagccagtttggcagctctgtggccagctacttcctgttcctgcgctggatgtatggagtgaacatggtgctcttcatcctgaccttcagcctcatcatgctgcctgagtacctgtggggcctgccctacggcagcctgcccaggaagacagtgcccagggctgaggaggccagcgctgccaactttggagtgctgtatgacttcaacggcctggcccagtacagcgtgctcttctacggctactatgacaacaagaggaccatcggctggatgaacttccggctgcccctgagctacttcctggtgggcatcatgtgcatcggctacagcttcctggtggtgctgaaggccatgaccaagaacattggagatgatggcggcggagatgacaacaccttcaacttctcctggaaggtgttcacctcctgggactacctgattggcaaccctgagacagctgacaacaagttcaacagcatcaccatgaacttcaaggaggccatcacagaggagaaggccgcccaggtggaggagaatgtgcacctgatccgcttcctgcgcttcctggccaacttctttgtgttcctgaccctgggcggcagcggctacctgatcttctgggccgtgaagaggagccaggagtttgcccagcaggaccctgacaccctgggctggtgggagaagaatgagatgaacatggtgatgagcctgctgggcatgttctgccccaccctgtttgacctgtttgctgagctggaggactaccaccccctcatcgccctgaagtggctgctgggccgcatctttgccctgctgctgggcaacctgtatgtgttcatcctggccctgatggatgagatcaacaacaagattgaggaggagaagctggtgaaggccaacatcaccctgtgggaggccaacatgatcaaggcctacaatgccagcttcagcgagaacagcacaggcccccccttctttgtgcacccagcagatgtgccccggggcccctgctgggagaccatggtgggccaggagtttgtgcggctgactgtgtctgatgtgctgaccacctacgtgaccatcctgattggagacttcctgcgggcctgctttgtgcgcttctgcaactactgctggtgctgggacctggagtatggctaccccagctacacagaatttgacatctctggaaatgtgctggccctgatcttcaaccagggcatgatctggatgggcagcttctttgcccccagcctgcccggcatcaacatcctgcggctgcacacctccatgtacttccagtgctgggccgtgatgtgctgcaatgtgcctgaggcccgggtcttcaaggccagccgcagcaacaacttctacctgggcatgctgctgctgatcctcttcctgagcaccatgcctgtgctgtacatgattgtgtccctgccccccagctttgactgtggccccttcagcggcaagaacaggatgtttgaagtcatcggggagaccctggagcatgacttccccagctggatggccaagatcctgcggcagctgagcaaccctggcctggtgattgctgtgatcctggtgatggtgctggccatctactacctgaatgccacagccaagggccagaaggccgccaacctggacctgaagaagaagatgaagatgcaggccctggagaacaagatgaggaacaagaagatggctgctgcccgggctgctgctgctgctggccggcagtag

SEQ ID NO: 173947 - DNA, 1665 bp, synthetic construct
  misc_feature 1..1665: note = Description of Artificial Sequence: Synthetic coding sequence
  source 1..1665: mol_type = other DNA
gtggagtggagcggggagtgcctgcggagctgccggcgggaggtgcagatcaaggtggaggagaaggaggatgaaacagaggagagcagcagcgaggaggaggaggaggtggaggacaagctgccccggcgggagagcctgcggcccaagaggaagaggaccagagatgtgatcaatgaagatgatcctgagcctgagccagaagatgaggagaccaggaaggcccgggagaaggagaggagaagaaggctgaagagaggagctgaggccaagaagtttgtgtctgaaaatgaaggagccctgggcaagggcaagggcaagcgctggtttgccttcaagatgatgatggccaagaagtgggccaagttcctgcgggactttgagaacttcaaggccgcctgtgtgccctgggagaacaagatcaaggccatcgagagccagtttggcagctctgtggccagctacttcctgttcctgcgctggatgtatggagtgaacatggtgctcttcatcctgaccttcagcctcatcatgctgcctgagtacctgtggggcctgccctacggcagcctgcccaggaagacagtgcccagggctgaggaggccagcgctgccaactttggagtgctgtatgacttcaacggcctggcccagtacagcgtgctcttctacggctactatgacaacaagaggaccatcggctggatgaacttccggctgcccctgagctacttcctggtgggcatcatgtgcatcggctacagcttcctggtggtgctgaaggccatgaccaagaacattggagatgatggcggcggagatgacaacaccttcaacttctcctggaaggtgttcacctcctgggactacctgattggcaaccctgagacagctgacaacaagttcaacagcatcaccatgaacttcaaggaggccatcacagaggagaaggccgcccaggtggaggagaatgtgcacctgatccgcttcctgcgcttcctggccaacttctttgtgttcctgaccctgggcggcagcggctacctgatcttctgggccgtgaagaggagccaggagtttgcccagcaggaccctgacaccctgggctggtgggagaagaatgagatgaacatggtgatgagcctgctgggcatgttctgccccaccctgtttgacctgtttgctgagctggaggactaccaccccctcatcgccctgaagtggctgctgggccgcatctttgccctgctgctgggcaacctgtatgtgttcatcctggccctgatggatgagatcaacaacaagattgaggaggagaagctggtgaaggccaacatcaccctgtgggaggccaacatgatcaaggcctacaatgccagcttcagcgagaacagcacaggcccccccttctttgtgcacccagcagatgtgccccggggcccctgctgggagaccatggtgggccaggagtttgtgcggctgactgtgtctgatgtgctgaccacctacgtgaccatcctgattggagacttcctgcgggcctgctttgtgcgcttctgcaactactgctggtgctgggacctggagtatggctaccccagctacacagaatttgacatctctggaaatgtgctggccctgatcttcaaccagggcatgatctag

SEQ ID NO: 173948 - DNA, 2265 bp, synthetic construct
  misc_feature 1..2265: note = Description of Artificial Sequence: Synthetic coding sequence
  source 1..2265: mol_type = other DNA
cagatcaaggtggaggagaaggaggatgaaacagaggagagcagcagcgaggaggaggaggaggtggaggacaagctgccccggcgggagagcctgcggcccaagaggaagaggaccagagatgtgatcaatgaagatgatcctgagcctgagccagaagatgaggagaccaggaaggcccgggagaaggagaggagaagaaggctgaagagaggagctgaggaggaggagattgatgaggaggagctggagcggctgaaggccgagctggatgagaagaggcagatcatcgccaccgtgaagtgcaagccctggaagatggagaagaagattgaggtgctgaaggaggccaagaagtttgtgtctgaaaatgaaggagccctgggcaagggcaagggcaagcgctggtttgccttcaagatgatgatggccaagaagtgggccaagttcctgcgggactttgagaacttcaaggccgcctgtgtgccctgggagaacaagatcaaggccatcgagagccagtttggcagctctgtggccagctacttcctgttcctgcgctggatgtatggagtgaacatggtgctcttcatcctgaccttcagcctcatcatgctgcctgagtacctgtggggcctgccctacggcagcctgcccaggaagacagtgcccagggctgaggaggccagcgctgccaactttggagtgctgtatgacttcaacggcctggcccagtacagcgtgctcttctacggctactatgacaacaagaggaccatcggctggatgaacttccggctgcccctgagctacttcctggtgggcatcatgtgcatcggctacagcttcctggtggtgctgaaggccatgaccaagaacattggagatgatggcggcggagatgacaacaccttcaacttctcctggaaggtgttcacctcctgggactacctgattggcaaccctgagacagctgacaacaagttcaacagcatcaccatgaacttcaaggaggccatcacagaggagaaggccgcccaggtggaggagaatgtgcacctgatccgcttcctgcgcttcctggccaacttctttgtgttcctgaccctgggcggcagcggctacctgatcttctgggccgtgaagaggagccaggagtttgcccagcaggaccctgacaccctgggctggtgggagaagaatgagatgaacatggtgatgagcctgctgggcatgttctgccccaccctgtttgacctgtttgctgagctggaggactaccaccccctgattgccctgaagtggctgctgggccgcatctttgccctgctgctgggcaacctgtatgtgttcatcctggccctgatggatgagatcaacaacaagattgaggaggagaagctggtgaaggccaacatcaccctgtgggaggccaacatgatcaaggcctacaatgccagcttcagcgagaacagcactggaccacccttctttgtgcacccagcagatgtgccccggggcccctgctgggagaccatggtgggccaggagtttgtgcggctgactgtgtctgatgtgctgaccacctacgtgaccatcctgattggagacttcctgcgggcctgctttgtgcgcttctgcaactactgctggtgctgggacctggagtatggctaccccagctacacagaatttgacatctctggaaatgtgctggccctgatcttcaaccagggcatgatctggatgggcagcttctttgcccccagcctgcccggcatcaacatcctgcggctgcacacctccatgtacttccagtgctgggccgtgatgtgctgcaatgtgcctgaggcccgggtcttcaaggccagccgcagcaacaacttctacctgggcatgctgctgctgatcctcttcctgagcaccatgcctgtgctgtacatgattgtgtccctgcccccatcctttgactgtggccccttcagcggcaagaacaggatgtttgaggtgattggagagaccctggagcatgacttccccagctggatggccaagatcctgcggcagctgagcaaccctggcctggtgattgctgtgatcctggtgatggtgctggccatctactacctgaatgccacagccaagggccagaaggccgccaacctggacctgaagaagaagatgaagatgcaggccctggagaacaagatgaggaacaagaagatggccgccgcccgggcagatggagctgctggccgggcctag

SEQ ID NO: 173949 - DNA, 2721 bp, synthetic construct
  misc_feature 1..2721: note = Description of Artificial Sequence: Synthetic coding sequence
  source 1..2721: mol_type = other DNA
atgagccaccaggtgaagggcctgaaggaggaggcccggggcggcgtgaagggccgggtgaagagcggcagcccccacactggagaccggctgggcagaagaagcagcagcaagagggccctgaaggccgagggcaccccaggaagaagaggagcccagaggagccagaaggagcgggccggcggcagccccagccctggcagccccaggaggaagcagacaggaagaagaagacaccgggaggagctgggggagcaggagcggggggaggccgagaggacctgtgagggccgcaggaagagagatgagcgggccagcttccaggagaggacagctgcccccaagcgggagaaggagatcccccggcgggaggagaagagcaagaggcagaagaagcccaggagcagcagcctggccagcagcgccagcggcggggagagcctgtctgaggaggagctggcccagatcctggagcaggtggaggagaagaagaagctgattgccaccatgaggagcaagccctggcccatggccaagaagctgacagagctgcgggaggcccaggagtttgtggagaagtatgagggcgccctgggcaagggcaagggcaagcagctgtatgcctacaagatgctgatggccaagaagtgggtgaagttcaagagggactttgacaacttcaagacccagtgcatcccctgggagatgaagatcaaggacatcgagagccacttcggcagctctgtggccagctacttcatcttcctgcgctggatgtatggagtgaacctggtgctgtttggcctcatcttcggcctggtgatcatccctgaggtgctgatgggcatgccctacggcagcatccccaggaagacagtgcccagggctgaggaggagaaggccatggacttctctgtgctgtgggactttgagggctacatcaagtacagcgccctcttctacggctactacaacaaccagaggaccatcggctggctgcgctaccgcctgcccatggcctacttcatggtgggcgtgtctgtgtttggctacagcctcatcatcgtcatccgctccatggccagcaacacccagggcagcactggagagggggagagtgacaacttcaccttctccttcaagatgttcacctcctgggactacctgattggcaacagcgagacagctgacaacaagtatgccagcatcaccaccagcttcaaggagagcatcgtggatgagcaggagagcaacaaggaggagaacatccacctgacccgcttcctgcgggtgctggccaacttcctgatcatctgctgcctgtgtggcagcggctacctgatctactttgtggtgaagaggagccagcagttcagcaagatgcagaatgtgtcctggtatgaaagaaatgaggtggagatcgtgatgagcctgctgggcatgttctgcccccccctgtttgagaccatcgccgccctggagaactaccaccccaggacaggcctgaagtggcagctgggccgcatctttgccctcttcctgggcaacctgtacaccttcctgctggccctgatggatgatgtgcacctgaagctggccaatgaggagaccatcaagaacatcacccactggaccctcttcaactactacaacagcagcggctggaatgaatctgtgccccggccccccctgcacccagcagatgtgccccggggcagctgctgggagacagctgtgggcatcgagttcatgaggctgactgtgtctgacatgctggtgacctacatcaccatcctgctgggggacttcctgcgggcctgctttgtgcgcttcatgaactactgctggtgctgggacctggaggccggcttccccagctatgcagagtttgacatctctggaaatgtgctgggcctcatcttcaaccagggcatgatctggatgggcagcttctacgcccctggcctggtgggcatcaacgtgctgcggctgctgacctccatgtacttccagtgctgggccgtgatgagcagcaatgtgccccatgagagggtcttcaaggccagccgcagcaacaacttctacatgggcctgctgctgctggtgctcttcctgagcctgctgcctgtggcctacaccatcatgagcctgccccccagctttgactgtggccccttcagcggcaagaacaggatgtatgatgtgctgcaggagaccattgaaaatgacttccccaccttcctgggcaagatctttgccttcctggccaaccctggcctcatcatcccagccatcctgctgatgttcctggccatctactacctgaacagcgtgtccaagagcctgagccgggccaatgcccagctgaggaagaagatccaggtgctgcgggaggtggagaagagccacaagtctgtgaagggcaaggccacagcccgggacagcgaggacacccccaagagcagcagcaagaatgccacccagctgcagctgaccaaggaggagaccaccccacccagcgccagccagagccaggccatggacaagaaggcccagggccctggcaccagcaacagcgccagcaggaccaccctgcctgccagcggccacctgcccatcagccggcccccaggcattggaccagattctggccacgcccccagccagacccacccctggaggtctgccagcggcaagagcgcccagaggcctccccactag

SEQ ID NO: 173950 - DNA, 1365 bp, synthetic construct
  misc_feature 1..1365: note = Description of Artificial Sequence: Synthetic coding sequence
  source 1..1365: mol_type = other DNA
atggcccagcccctggccttcatcctggatgtgcctgagacccctggggaccagggccagggccccagcccctatgatgagagcgaggtgcatgacagcttccagcagctgatccaggagcagagccagtgcacagcccaggagggcctggagctgcagcagcgggagcgggaggtgacaggcagcagccagcagaccctgtggaggcctgagggcacccagagcacagccaccctgcgcatcctggcctccatgcccagcaggaccatcggccgcagcagaggagccatcatcagccagtactacaacagaacagtgcagctgcgctgccgcagcagccggcccctgctgggcaactttgtgcgcagcgcctggcccagcctgcggctgtatgacctggagctggaccccacagccctggaggaggaggagaagcagagcctgctggtgaaggagctgcagagcctggccgtggcccagagggaccacatgctgcggggcatgcccctgagcctggccgagaagaggagcctgcgggagaagagcaggaccccccggggcaagtggaggggccagcccggcagcggaggagtgtgcagctgctgcggccgcctgcgctatgcctgtgtgctggccctgcacagcctgggcctggccctgctgagcgccctgcaggccctgatgccctggaggtatgccctgaagagaattggaggccagtttggcagctctgtgctgagctacttcctgttcctgaagaccctgctggccttcaatgccctgctgctgctgctgctggtggccttcatcatgggcccccaggtggccttccccccagccctgcccggccctgcccctgtgtgcaccggcctggagctgctgactggagctggctgcttcacccacacagtgatgtactacggccactacagcaatgccaccctgaaccagccctgtggcagccccctggatggcagccagtgcaccccccgggtgggcggcctgccctacaacatgcccctggcctacctgagcacagtgggcgtgtccttcttcatcacctgcatcaccctggtgtacagcatggcccacagctttggagagagctacagagtgggcagcaccagcggcatccacgccatcaccgtcttctgctcctgggactacaaggtgacccagaagagggccagccggctgcagcaggacaacatccgcacccggctgaagggggaggacaagatcttcctgatcaacaagctgcacagcatctatgaaaggaaggagcgggaggagaggagccgggtgggcaccacagaggaggccgccgcccccccagccctgctgacagatgagcaggatgcctag

SEQ ID NO: 173951 - DNA, 2418 bp, synthetic construct
  misc_feature 1..2418: note = Description of Artificial Sequence: Synthetic coding sequence
  source 1..2418: mol_type = other DNA
atggcccagcccctggccttcatcctggatgtgcctgagacccctggggaccagggccagggccccagcccctatgatgagagcgaggtgcatgacagcttccagcagctgatccaggagcagagccagtgcacagcccaggagggcctggagctgcagcagcgggagcgggaggtgacaggcagcagccagcagaccctgtggaggcctgagggcacccagagcacagccaccctgcgcatcctggcctccatgcccagcaggaccatcggccgcagcagaggagccatcatcagccagtactacaacagaacagtgcagctgcgctgccgcagcagccggcccctgctgggcaactttgtgcgcagcgcctggcccagcctgcggctgtatgacctggagctggaccccacagccctggaggaggaggagaagcagagcctgctggtgaaggagctgcagagcctggccgtggcccagagggaccacatgctgcggggcatgcccctgagcctggccgagaagaggagcctgcgggagaagagcaggaccccccggggcaagtggaggggccagcccggcagcggaggagtgtgcagctgctgcggccgcctgcgctatgcctgtgtgctggccctgcacagcctgggcctggccctgctgagcgccctgcaggccctgatgccctggaggtatgccctgaagagaattggaggccagtttggcagctctgtgctgagctacttcctgttcctgaagaccctgctggccttcaatgccctgctgctgctgctgctggtggccttcatcatgggcccccaggtggccttccccccagccctgcccggccctgcccctgtgtgcaccggcctggagctgctgactggagctggctgcttcacccacacagtgatgtactacggccactacagcaatgccaccctgaaccagccctgtggcagccccctggatggcagccagtgcaccccccgggtgggcggcctgccctacaacatgcccctggcctacctgagcacagtgggcgtgtccttcttcatcacctgcatcaccctggtgtacagcatggcccacagctttggagagagctacagagtgggcagcaccagcggcatccacgccatcaccgtcttctgctcctgggactacaaggtgacccagaagagggccagccggctgcagcaggacaacatccgcacccggctgaaggagctgctggccgagtggcagctgcggcacagccccaggtctgtgtgtggccgcctgcggcaggccgctgtgctgggcctggtgtggctgctgtgcctgggcacagccctgggctgtgctgtggccgtgcacgtgttcagcgagttcatgatccagagccctgaggccgccggccaggaggccgtgctgctggtgctgcccctggtggtgggcctgctgaacctgggcgccccctacctgtgccgggtgctggccgccctggagccccatgacagccctgtgctggaggtgtatgtggccatctgcaggaacctgatcctgaagctggccatcctgggcaccctgtgctaccactggctgggcagaagagtgggcgtgctgcagggccagtgctgggaggactttgtgggccaggagctgtaccgcttcctggtgatggactttgtgctgatgctgctggacaccctgtttggagagctggtgtggaggatcatcagcgagaagaagctgaagagaagaaggaagccagagtttgatattgccagaaatgtgctggagctgatctacggccagaccctgacctggctgggcgtgctcttcagccccctgctgcctgctgtgcagatcatcaagctgctgctggtgttctacgtgaagaagaccagcctgctggccaactgccaggccccccggcggccctggctggccagccacatgagcaccgtcttcctgaccctgctgtgcttccctgccttcctgggcgctgctgtgttcctgtgctatgctgtgtggcaggtgaagcccagcagcacctgtggccccttccgcaccctggacaccatgtatgaagctggccgggtgtgggtgcgccacctggaggccgccggcccccgggtgtcctggctgccctgggtgcaccgctacctgatggagaacaccttctttgtgttcctggtgtctgccctgctgctggccgtcatctacctgaacatccaggtggtgcggggccagaggaaggtgatctgcctgctgaaggagcagatcagcaatgaaggagaggacaagatcttcctgatcaacaagctgcacagcatctatgaaaggaaggagcgggaggagaggagccgggtgggcaccacagaggaggccgccgcccccccagccctgctgacagatgagcaggatgcctag

SEQ ID NO: 173952 - DNA, 1155 bp, synthetic construct
  misc_feature 1..1155: note = Description of Artificial Sequence: Synthetic coding sequence
  source 1..1155: mol_type = other DNA
atggcccacagctttggagagagctacagagtgggcagcaccagcggcatccacgccatcaccgtcttctgctcctgggactacaaggtgacccagaagagggccagccggctgcagcaggacaacatccgcacccggctgaaggagctgctggccgagtggcagctgcggcacagccccaggtctgtgtgtggccgcctgcggcaggccgctgtgctgggcctggtgtggctgctgtgcctgggcacagccctgggctgtgctgtggccgtgcacgtgttttctgagttcatgatccagagccctgaggccgccggccaggaggccgtgctgctggtgctgcccctggtggtgggcctgctgaacctgggcgccccctacctgtgccgggtgctggccgccctggagccccatgacagccctgtgctggaggtgtatgtggccatctgccgcatcatcagcgagaagaagctgaagagaagaaggaagccagagtttgacatcgccagaaatgtgctggagctgatctacggccagaccctgacctggctgggcgtgctcttcagccccctgctgcctgctgtgcagatcatcaagctgctgctggtgttctacgtgaagaagaccagcctgctggccaactgccaggccccccggcggccctggctggccagccacatgagcacagtgttcctgaccctgctgtgcttccctgccttcctgggcgctgctgtgttcctgtgctatgctgtgtggcaggtgaagcccagcagcacctgtggccccttccgcaccctggacaccatgtatgaggccggccgggtgtgggtgcgccacctggaggccgccggcccccgggtgtcctggctgccctgggtgcaccgctacctgatggagaacaccttctttgtgttcctggtgtctgccctgctgctggccgtcatctacctgaacatccaggtggtgcggggccagaggaaggtgatctgcctgctgaaggagcagatcagcaatgaaggagaggacaagatcttcctgatcaacaagctgcacagcatctatgaaaggaaggagcgggaggagaggagccgggtgggcaccacagaggaggccgccgcccccccagccctgctgacagatgagcaggatgcctag

SEQ ID NO: 173953 - DNA, 417 bp, synthetic construct
  misc_feature 1..417: note = Description of Artificial Sequence: Synthetic coding sequence
  source 1..417: mol_type = other DNA
cagtgctgggaggactttgtgggccaggagctgtaccgcttcctggtgatggactttgtgctgatgctgctggacaccctgtttggagagctggagaaccgcttccagagtgatgtgttcagcagccgcatctgggcctggtggaggaagccagagtttgatattgccagaaatgtgctggagctgatctacggccagaccctgacctggctgggcgtgctcttcagccccctgctgcctgctgtgcagatcatcaagctgctgctggtgttctacgtgaagaagaccagcctgctggccaactgccaggccccccggcggccctggctggccagccacatgagcaccgtcttcctgaccctgctgtgcttccctgccttcctgggcgctgctgtgttcctgtgctatgctgtgtag

SEQ ID NO: 173954 - DNA, 2418 bp, synthetic construct; identical to SEQ ID NO: 173951
  misc_feature 1..2418: note = Description of Artificial Sequence: Synthetic coding sequence
  source 1..2418: mol_type = other DNA

SEQ ID NO: 173955 - DNA, 1098 bp, synthetic construct
  misc_feature 1..1098: note = Description of Artificial Sequence: Synthetic coding sequence
  source 1..1098: mol_type = other DNA
atgaacatcatggacttcaacgtgaagaagctggccgcagatgctggcaccttcctgagcagagctgtgcagttcacagaggagaagctgggccaggccgagaagacagagctggatgcccacctggagaacctgctgagcaaggccgagtgcaccaagatctggacagagaagatcatgaagcagacagaggtgctgctgcagcccaaccccaatgccagaattgaggagtttgtgtatgagaagctggacaggaaggcccccagccgcatcaacaaccctgagctgctgggccagtacatgattgatgctggaacagaatttggacctggaacagcctatggaaatgccctgatcaagtgtggggagacccagaagagaattggaacagctgaccgggagctgatccagaccagcgccctgaacttcctgacccccctgaggaacttcattgaaggagactacaagaccatcgccaaggagaggaagctgctgcagaacaagaggctggacctggatgctgccaagacccggctgaagaaggccaaggctgctgagaccaggaacagcagcgagcaggagctgcgcatcacccagagcgagtttgaccggcaggccgagatcacccggctgctgctggagggcatcagcagcacccacgcccaccacctgcgctgcctgaatgactttgtggaggcccagatgacctactatgcccagtgctaccagtacatgctggacctgcagaagcagctgggcagcttccccagcaactacctgagcaacaacaaccagacctctgtgacccctgtgcccagcgtgctgcccaatgccatcggcagcagcgccatggccagcaccagcggcctggtgatcaccagccccagcaacctgagtgacctgaaggaatgttctggcagcaggaaggcccgggtgctgtatgactatgatgctgccaacagcacagagctgagcctgctggctgatgaagtcatcaccgtcttctctgtggtgggcatggacagcgactggctgatgggagagcggggcaaccagaagggcaaggtgcccatcacctacctggagctgctgaactag

SEQ ID NO: 173956 - DNA, 636 bp, synthetic construct
  misc_feature 1..636: note = Description of Artificial Sequence: Synthetic coding sequence
  source 1..636: mol_type = other DNA
atggccggcgtgggcgccggccccctgcgggccatgggccggcaggccctgctgctgctggccctgtgtgccactggagcccagggcctgtacttccacatcggggagacagagaagcgctgcttcatcgaggagatcccagatgagaccatggtgattggcaactaccgcacccagggcatgcacgtggaggtgaaggaccctgatggcaaggtggtgctgagccggcagtatggcagcgagggccgcttcaccttcaccagccacacccctggggaccaccagatctgcctgcacagcaacagcaccaggatggccctgtttgctgggggcaagctgcgggtgcacctggacatccaggtgggggagcacgccaacaactacccagaaattgctgccaaggacaagctgacagagctgcagctgcgggcccggcagctgctggaccaggtggagcagatccagaaggagcaggactaccagcgctaccgggaggagcgcttccggctgaccagcgagagcaccaaccagagggtgctgtggtggagcatcgcccagaccgtcatcctgatcctgaccggcatctggcagatgaggcacctgaagagcttctttgaggccaagaagctggtgtag

SEQ ID NO: 173957 - DNA, 684 bp, synthetic construct
  misc_feature 1..684: note = Description of Artificial Sequence: Synthetic coding sequence
  source 1..684: mol_type = other DNA
atggccggcgtgggcgccggccccctgcgggccatgggccggcaggccctgctgctgctggccctgtgtgccactggagcccagggcctgtacttccacatcggggagacagagaagcgctgcttcatcgaggagatcccagatgagaccatggtgattggcaactaccgcacccagatgtgggacaagcagaaggaggtgttcctgcccagcaccccaggcctgggcatgcacgtggaggtgaaggaccctgatggcaaggtggtgctgagccggcagtatggcagcgagggccgcttcaccttcaccagccacacccctggggaccaccagatctgcctgcacagcaacagcaccaggatggccctgtttgctgggggcaagctgcgggtgcacctggacatccaggtgggggagcacgccaacaactacccagaaattgctgccaaggacaagctgacagagctgcagctgcgggcccggcagctgctggaccaggtggagcagatccagaaggagcaggactaccagcgctaccgggaggagcgcttccggctgaccagcgagagcaccaaccagagggtgctgtggtggagcatcgcccagaccgtcatcctgatcctgaccggcatctggcagatgaggcacctgaagagcttctttgaggccaagaagctggtgtag

SEQ ID NO: 173958 - DNA, 660 bp, synthetic construct
  misc_feature 1..660: note = Description of Artificial Sequence: Synthetic coding sequence
  source 1..660: mol_type = other DNA
atgagcggcctgagcggccccccagcccggcggggccccttccccctggccctgctgctgctcttcctgctgggcccccggctggtgctggccatctccttccacctgcccatcaacagcaggaagtgcctgcgggaggagatccacaaggacctgctggtgactggagcctatgagatcagtgaccagagcggcggggccggcggcctgcggagccacctgaagatcacagattctgctggccacatcctgtacagcaaggaggatgccaccaagggcaagtttgccttcaccacagaggactatgacatgtttgaggtgtgctttgagagcaagggcaccggccgcatcccagaccagctggtgatcctggacatgaagcacggcgtggaggccaagaactatgaggagatcgccaaggtggagaagctgaagcccctggaggtggagctgcggcggctggaggacctgtctgagagcatcgtgaatgactttgcctacatgaagaagcgggaggaggagatgagggacaccaatgaaagcaccaacaccagggtgctgtacttcagcatcttctccatgttctgcctgattggcctggccacctggcaggtgttctacctgcggcgcttcttcaaggccaagaagctgattgaatag

SEQ ID NO: 173959 - DNA, 471 bp, synthetic construct
  misc_feature 1..471: note = Description of Artificial Sequence: Synthetic coding sequence
  source 1..471: mol_type = other DNA
atggccggctggccaggagctggccccctgtgtgtgctgggcggggccgccctgggcgtgtgcctggccggcgtggccggccagctggtggagcccagcacagccccacccaagcccaagcccccacccctgaccaaggagaccgtggtgttctgggacatgaggctgtggcacgtggtgggcatcttcagcctgtttgtgctgagcatcatcatcaccctgtgctgcgtgttcaactgccgggtgcccaggaccaggaaggagattgaggcccgctacctgcagaggaaggccgccaagatgtacacagacaagctggagaccgtgccccccctgaatgagctgacagaggtgcctggagaggacaagaagaagaagaagaagaagaagaaggacagcgtggacacagtggccatcaaggtggaggaggatgagaagaatgaggccaagaagaagaagggggagaagtag

SEQ ID NO: 173960 - DNA, 1602 bp, synthetic construct
  misc_feature 1..1602: note = Description of Artificial Sequence: Synthetic coding sequence
  source 1..1602: mol_type = other DNA
atgaatgaatctccagaccccacagacctggccggggtcatcatcgagctgggccccaatgacagcccccagaccagcgagttcaagggggccacagaggaggccccagccaaggagagcgtgctggcccggctgagcaagtttgaggtggaggatgctgaaaatgtggccagctatgacagcaagatcaagaagatcgtgcacagcatcgtgtcctcctttgccttcggcctgtttggagtcttcctggtgctgctggatgtgaccctcatcctggccgacctgatcttcacagacagcaagctgtacatccccctggagtaccgcagcatcagcctggccatcgccctcttcttcctgatggatgtgctgctgcgggtgtttgtggagcggcggcagcagtacttcagtgacctcttcaacatcctggacacagccatcatcgtcatcctgctgctggtggatgtggtgtacatcttctttgacatcaagctgctgaggaacatcccccgctggacccacctgctgcggctgctgcggctcatcatcctgctgcgcatcttccacctgttccaccagaagaggcagctggagaagctgatcagaagaagagtgtctgagaacaagaggcgctacaccagagatggctttgacctggacctgacctacgtgacagagcgcatcatcgccatgtccttccccagcagcggccggcagagcttctacagaaaccccatcaaggaggtggtgcgcttcctggacaagaagcacaggaaccactacagagtgtacaacctgtgcagcgagcgggcctatgaccccaagcacttccacaacagagtggtgcgcatcatgattgatgaccacaacgtgcccaccctgcaccagatggtggtgttcaccaaggaggtgaatgagtggatggcccaggacctggagaacatcgtggccatccactgcaagggcggcacagacagaacaggcaccatggtgtgtgccttcctgattgccagcgagatctgcagcacagccaaggagagcctgtactactttggagagaggagaacagacaagacccacagcgagaagttccagggcgtgaagacccccagccagaagagatatgtggcctactttgcccaggtgaagcacctgtacaactggaacctgcccccccggcgcatcctcttcatcaagcacttcatcatctacagcatccccaggtatgtgcgggacctgaagatccagatcgagatggagaagaaggtggtgttcagcaccatcagcctgggcaagtgcagcgtgctggacaacatcaccacagacaagatcctgattgatgtgtttgatggcctgcccctgtatgatgatgtgaaggtgcagttcttctacagcaacctgcccacctactatgacaactgcagcttctacttctggctgcacaccagcttcatcgagaacaaccggctgtacctgcccaagaatgagctggacaacctgcacaagcagaaggcccggcgcatctaccccagcgactttgctgtggagatcctgtttggagagaagatgaccagcagtgatgtggtggccggcagtgactag

SEQ ID NO: 173961 - DNA, 1542 bp, synthetic construct
  misc_feature 1..1542: note = Description of Artificial Sequence: Synthetic coding sequence
  source 1..1542: mol_type = other DNA
atgaatgaatctccagaccccacagacctggccggggtcatcatcgagctgggccccaatgacagcccccagaccagcgagttcaagggggccacagaggaggccccagccaaggagagcagcaagatcaagaagatcgtgcacagcatcgtgtcctcctttgccttcggcctgtttggagtcttcctggtgctgctggatgtgaccctcatcctggccgacctgatcttcacagacagcaagctgtacatccccctggagtaccgcagcatcagcctggccatcgccctcttcttcctgatggatgtgctgctgcgggtgtttgtggagcggcggcagcagtacttcagtgacctcttcaacatcctggacacagccatcatcgtcatcctgctgctggtggatgtggtgtacatcttctttgacatcaagctgctgaggaacatcccccgctggacccacctgctgcggctgctgcggctcatcatcctgctgcgcatcttccacctgttccaccagaagaggcagctggagaagctgatcagaagaagagtgtctgagaacaagaggcgctacaccagagatggctttgacctggacctgacctacgtgacagagcgcatcatcgccatgtccttccccagcagcggccggcagagcttctacagaaaccccatcaaggaggtggtgcgcttcctggacaagaagcacaggaaccactacagagtgtacaacctgtgcagcgagcgggcctatgaccccaagcacttccacaacagagtggtgcgcatcatgattgatgaccacaacgtgcccaccctgcaccagatggtggtgttcaccaaggaggtgaatgagtggatggcccaggacctggagaacatcgtggccatccactgcaagggcggcacagacagaacaggcaccatggtgtgtgccttcctgattgccagcgagatctgcagcacagccaaggagagcctgtactactttggagagaggagaacagacaagacccacagcgagaagttccagggcgtgaagacccccagccagaagagatatgtggcctactttgcccaggtgaagcacctgtacaactggaacctgcccccccggcgcatcctcttcatcaagcacttcatcatctacagcatccccaggtatgtgcgggacctgaagatccagatcgagatggagaagaaggtggtgttcagcaccatcagcctgggcaagtgcagcgtgctggacaacatcaccacagacaagatcctgattgatgtgtttgatggcctgcccctgtatgatgatgtgaaggtgcagttcttctacagcaacctgcccacctactatgacaactgcagcttctacttctggctgcacaccagcttcatcgagaacaaccggctgtacctgcccaagaatgagctggacaacctgcacaagcagaaggcccggcgcatctaccccagcgactttgctgtggagatcctgtttggagagaagatgaccagcagtgatgtggtggccggcagtgactag

SEQ ID NO: 173962 - DNA, 1656 bp, synthetic construct
  misc_feature 1..1656: note = Description of Artificial Sequence: Synthetic coding sequence
  source 1..1656: mol_type = other DNA
atgaatgaatctccagaccccacagacctggccggggtcatcatcgagctgggccccaatgacagcccccagaccagcgagttcaagggggccacagaggaggccccagccaaggagagcccccacaccagcgagttcaagggagctgcccgggtgagccccatcagcgagagcgtgctggcccggctgagcaagtttgaggtggaggatgctgaaaatgtggccagctatgacagcaagatcaagaagatcgtgcacagcatcgtgtcctcctttgccttcggcctgtttggagtcttcctggtgctgctggatgtgaccctcatcctggccgacctgatcttcacagacagcaagctgtacatccccctggagtaccgcagcatcagcctggccatcgccctcttcttcctgatggatgtgctgctgcgggtgtttgtggagcggcggcagcagtacttcagtgacctcttcaacatcctggacacagccatcatcgtcatcctgctgctggtggatgtggtgtacatcttctttgacatcaagctgctgaggaacatcccccgctggacccacctgctgcggctgctgcggctcatcatcctgctgcgcatcttccacctgttccaccagaagaggcagctggagaagctgatcagaagaagagtgtctgagaacaagaggcgctacaccagagatggctttgacctggacctgacctacgtgacagagcgcatcatcgccatgtccttccccagcagcggccggcagagcttctacagaaaccccatcaaggaggtggtgcgcttcctggacaagaagcacaggaaccactacagagtgtacaacctgtgcagcgagcgggcctatgaccccaagcacttccacaacagagtggtgcgcatcatgattgatgaccacaacgtgcccaccctgcaccagatggtggtgttcaccaaggaggtgaatgagtggatggcccaggacctggagaacatcgtggccatccactgcaagggcggcacagacagaacaggcaccatggtgtgtgccttcctgattgccagcgagatctgcagcacagccaaggagagcctgtactactttggagagaggagaacagacaagacccacagcgagaagttccagggcgtgaagacccccagccagaagagatatgtggcctactttgcccaggtgaagcacctgtacaactggaacctgcccccccggcgcatcctcttcatcaagcacttcatcatctacagcatccccaggtatgtgcgggacctgaagatccagatcgagatggagaagaaggtggtgttcagcaccatcagcctgggcaagtgcagcgtgctggacaacatcaccacagacaagatcctgattgatgtgtttgatggcctgcccctgtatgatgatgtgaaggtgcagttcttctacagcaacctgcccacctactatgacaactgcagcttctacttctggctgcacaccagcttcatcgagaacaaccggctgtacctgcccaagaatgagctggacaacctgcacaagcagaaggcccggcgcatctaccccagcgactttgctgtggagatcctgtttggagagaagatgaccagcagtgatgtggtggccggcagtgactag

SEQ ID NO: 173963 - DNA, 1692 bp, synthetic construct
  misc_feature 1..1692: note = Description of Artificial Sequence: Synthetic coding sequence
  source 1..1692: mol_type = other DNA
atggagcgggacagccacggcaatgccagccctgcccggacccccagcgctggggccagccctgcccaggccagccctgctggcaccccacctggccgggccagccctgcccaggccagccctgcccaggccagccctgctggcaccccacctggccgggccagccctgcccaggccagccctgctggcaccccacctggccgggccagccctggccgggccagccctgcccaggccagccctgcccaggccagccctgcccgggccagccctgccctggccagcctgagccgcagcagcagcggccgcagcagcagcgcccggagcgcctctgtgaccaccagccccaccagggtgtacctggtgcgggccacccctgtgggcgctgtgcccatccgcagcagccctgcccggagcgccccagccacccgggccacccgggagagccctggcaccagcctgcccaagttcacctggagggagggccagaagcagctgcccctgattggctgtgtgctgctgctgattgccctggtggtgtccctcatcatcctcttccagttctggcagggccacacaggcatccgctacaaggagcagcgggagagctgccccaagcatgctgtgcgctgtgatggagtggtggactgcaagctgaagagtgatgagctgggctgtgtgcgctttgactgggacaagagcctgctgaagatctacagcggcagcagccaccagtggctgcccatctgcagcagcaactggaatgacagctacagcgagaagacctgccagcagctgggctttgagagcgcccacaggaccacagaggtggcccaccgggactttgccaacagcttcagcatcctgcgctacaacagcaccatccaggagagcctgcacagaagtgaatgtcccagccagcgctacatcagcctgcagtgcagccactgcggcctgcgggccatgacaggccgcatcgtgggcggggccctggccagtgacagcaagtggccctggcaggtgtccctgcacttcggcaccacccacatctgtggcggcaccctgattgatgcccagtgggtgctgacagctgcccactgcttctttgtgacccgggagaaggtgctggagggctggaaggtgtatgccggcaccagcaacctgcaccagctgcctgaggccgccagcattgctgagatcatcatcaacagcaactacacagatgaggaggatgattatgacatcgccctgatgaggctgagcaagcccctgaccctgagcgcccacatccacccagcctgcctgcccatgcacggccagaccttcagcctgaatgagacctgctggatcactggatttgggaagacccgggagacagatgacaagaccagccccttcctgcgggaggtgcaggtgaacctgattgacttcaagaagtgcaatgactacctggtgtatgacagctacctgacccccaggatgatgtgtgccggggacctgcggggcggccgggacagctgccagggcgacagcggcggccccctggtgtgtgagcagaacaaccgctggtacctggccggcgtgacctcctggggcaccggctgcggccagaggaacaagccaggagtgtacaccaaggtgacagaggtgctgccctggatctacagcaagatggagagcagcgctggatag

SEQ ID NO: 173964 - DNA, 1194 bp, synthetic construct
  misc_feature 1..1194: note = Description of Artificial Sequence: Synthetic coding sequence
  source 1..1194: mol_type = other DNA
atggaccctgacagcgaccagcccctgaacagcctggtgaaggtgatcctggacaagtactacttcctgtgtggccagcccctgcacttcatccccaggaagcagctgtgtgatggagagctggactgccccctgggagaagatgaggagcactgtgtgaagagcttccctgagggccctgctgtggccgtgcggctgagcaaggacaggagcaccctgcaggtgctggacagcgccaccggcaactggttcagcgcctgctttgacaacttcacagaggccctggccgagacagcctgccggcagatgggctacagcagcaagcccaccttccgggctgtggagatcggccctgaccaggacctggatgtggtggagatcacagagaacagccaggagctgaggatgaggaacagcagcggcccctgcctgagcggcagcctggtgtccctgcactgcctggcctgtgggaagagcctgaagaccccccgggtggtgggcgtggaggaggcctctgtggacagctggccctggcaggtgtccatccagtatgacaagcagcacgtgtgtggcggcagcatcctggacccccactgggtgctgacagctgcccactgcttcaggaagcacacagatgtgttcaactggaaggtgcgggccggcagtgacaagctgggcagcttccccagcctggccgtggccaagatcatcatcatcgagttcaaccccatgtaccccaaggacaatgacatcgccctgatgaagctgcagttccccctgaccttctctggaacagtgcggcccatctgcctgcccttctttgatgaggagctgaccccagccacccccctgtggatcatcggctggggcttcaccaagcagaatggaggcaagatgtctgacatcctgctgcaggcctctgtgcaggtgattgacagcacccgctgcaatgctgatgatgcctaccagggcgaggtgacagagaagatgatgtgtgccggcatccctgagggcggcgtggacacctgccagggcgacagcggcggccccctgatgtaccagagcgaccagtggcacgtggtgggcatcgtgtcctggggctacggctgcggcggccccagcaccccaggagtgtacaccaaggtgtctgcctacctgaactggatctacaacgtgtggaaggccgagctgtag

SEQ ID NO: 173965 - DNA, 1266 bp, synthetic construct
  misc_feature 1..1266: note = Description of Artificial Sequence: Synthetic coding sequence
  source 1..1266: mol_type = other DNA
atgatgtacagaacagtgggcttcggcaccaggagcaggaacctgaagccctggatgattgctgtgctgattgtgctgagcctgactgtggtggccgtgaccatcggcctgctggtgcacttcctggtgtttgaccagaagaaggagtactaccacggcagcttcaagatcctggacccccagatcaacaacaactttggccagagcaacacctaccagctgaaggacctgcgggagaccacagagaacctggtgtcccaggtggatgagatcttcattgattctgcctggaagaagaactacatcaagaaccaggtggtgcggctgaccccagaagaagatggagtgaaggtggatgtgatcatggtgttccagttccccagcacagagcagagagctgtgcgggagaagaagatccagagcatcctgaaccagaagatccggaacctgcgggccctgcccatcaatgccagctctgtgcaggtgaatgccatgagcagcagcactggagagctgactgtgcaggccagctgtgggaagagggtggtgcccctgaatgtgaaccgcatcgccagcggcgtgattgcccccaaggccgcctggccctggcaggccagcctgcagtatgacaacatccaccagtgtggggccaccctcatcagcaacacctggctggtgacagctgcccactgcttccagaagtacaagaacccccaccagtggacagtgtcctttggcaccaagatcaacccccccctgatgaagagaaatgtgcggcgcttcatcatccacgagaagtacagatctgctgcccgggagtatgacattgctgtggtgcaggtgagcagccgggtgaccttcagtgatgacatccggcagatctgcctgcctgaggccagcgccagcttccagcccaacctgactgtgcacatcaccggctttggagccctgtactatggaggagagagccagaatgacctgcgggaggcccgggtgaagatcatcagtgatgatgtgtgcaagcagccccaggtgtatggaaatgacatcaagccaggcatgttctgtgccggctacatggagggcatctatgatgcctgccgcggggacagcggcggccccctggtgacccgggacctgaaggacacctggtacctgattggaattgtgtcctggggagacaactgtggccagaaggacaagccaggagtgtacacccaggtgacctactacagaaactggatcgccagcaagacaggcatctag

SEQ ID NO: 173966 - DNA, 1257 bp, synthetic construct
  misc_feature 1..1257: note = Description of Artificial Sequence: Synthetic coding sequence
  source 1..1257: mol_type = other DNA
atgatgtacagaacagtgggcttcggcaccaggagcaggaacctgaagccctggatgattgctgtgctgattgtgctgagcctgactgtggtggccgtgaccatcggcctgctggtgcacttcctggtgtttgaccagaagaaggagtactaccacggcagcttcaagatcctggacccccagatcaacaacaactttggccagagcaacacctaccagctgaaggacctgcgggagaccacagagaacctggtggatgagatcttcatcgacagcgcctggaagaagaactacatcaagaaccaggtggtgcggctgaccccagaggaggatggagtgaaggtggatgtgatcatggtgttccagttccccagcacagagcagagagctgtgcgggagaagaagatccagagcatcctgaaccagaagatccggaacctgcgggccctgcccatcaatgccagctctgtgcaggtgaatgccatgagcagcagcactggagagctgactgtgcaggccagctgtgggaagagggtggtgcccctgaatgtgaacagaattgccagcggggtcatcgcccccaaggccgcctggccctggcaggccagcctgcagtatgacaacatccaccagtgtggggccaccctcatcagcaacacctggctggtgacagctgcccactgcttccagaagtacaagaacccccaccagtggacagtgtcctttggcaccaagatcaacccccccctgatgaagagaaatgtgcggcgcttcatcatccacgagaagtacagatctgctgcccgggagtatgacattgctgtggtgcaggtgagcagccgggtgaccttcagtgatgacatccggcagatctgcctgcctgaggccagcgccagcttccagcccaacctgactgtgcacatcactggatttggagccctgtactacggcggggagagccagaatgacctgcgggaggcccgggtgaagatcatcagtgatgatgtgtgcaagcagccccaggtgtatggaaatgacatcaagccaggcatgttctgtgccggctacatggagggcatctatgatgcctgccgcggggacagcggcggccccctggtgacccgggacctgaaggacacctggtacctgattggcatcgtgtcctggggagacaactgtggccagaaggacaagccaggagtgtacacccaggtgacctactacagaaactggatcgccagcaagacaggcatctag

SEQ ID NO: 173967 - DNA, 1254 bp, synthetic construct
  misc_feature 1..1254: note = Description of Artificial Sequence: Synthetic coding sequence
  source 1..1254: mol_type = other DNA
atgtacagaacagtgggcttcggcaccaggagcaggaacctgaagccctggatgattgctgtgctgattgtgctgagcctgactgtggtggccgtgaccatcggcctgctggtgcacttcctggtgtttgaccagaagaaggagtactaccacggcagcttcaagatcctggacccccagatcaacaacaactttggccagagcaacacctaccagctgaaggacctgcgggagaccacagagaacctggtggatgagatcttcattgattctgcctggaagaagaactacatcaagaaccaggtggtgcggctgaccccagaagaagatggagtgaaggtggatgtgatcatggtgttccagttccccagcacagagcagagagctgtgcgggagaagaagatccagagcatcctgaaccagaagatccggaacctgcgggccctgcccatcaatgccagctctgtgcaggtgaatgccatgagcagcagcactggagagctgactgtgcaggccagctgtgggaagagggtggtgcccctgaatgtgaaccgcatcgccagcggcgtgattgcccccaaggccgcctggccctggcaggccagcctgcagtatgacaacatccaccagtgtggggccaccctcatcagcaacacctggctggtgacagctgcccactgcttccagaagtacaagaacccccaccagtggacagtgtcctttggcaccaagatcaacccccccctgatgaagagaaatgtgcggcgcttcatcatccacgagaagtacagatctgctgcccgggagtatgacattgctgtggtgcaggtgagcagccgggtgaccttcagtgatgacatccggcagatctgcctgcctgaggccagcgccagcttccagcccaacctgactgtgcacatcaccggctttggagccctgtactatggaggagagagccagaatgacctgcgggaggcccgggtgaagatcatcagtgatgatgtgtgcaagcagccccaggtgtatggaaatgacatcaagccaggcatgttctgtgccggctacatggagggcatctatgatgcctgccgcggggacagcggcggccccctggtgacccgggacctgaaggacacctggtacctgattggaattgtgtcctggggagacaactgtggccagaaggacaagccaggagtgtacacccaggtgacctactacagaaactggatcgccagcaagacaggcatctag

SEQ ID NO: 173968 - DNA, 1689 bp, synthetic construct
  misc_feature 1..1689: note = Description of Artificial Sequence: Synthetic coding sequence
  source 1..1689: mol_type = other DNA
atggagcgggacagccacggcaatgccagccctgcccggacccccagcgctggggccagccctgcccaggccagccctgctggcaccccacctggccgggccagccctgcccaggccagccctgcccaggccagccctgctggcaccccacctggccgggccagccctgcccaggccagccctgctggcaccccacctggccgggccagccctggccgggccagccccctgcaggccagccctgcccgggccagccctgccctggccagcctgagccgcagcagcagcggccgcagcagcagcgcccggagcgcctctgtgaccaccagccccaccagggtgtacctggtgcgggccacccctgtgggcgctgtgcccatccgcagcagccctgcccggagcgccccagccacccgggccacccgggagagccctggcaccagcctgcccaagttcacctggagggagggccagaagcagctgcccctcatcggctgtgtgctgctgctgattgccctggtggtgtccctcatcatcctcttccagttctggcagggccacacaggcatccgctacaaggagcagcgggagagctgccccaagcatgctgtgcgctgtgatggagtggtggactgcaagctgaagagtgatgagctgggctgtgtgcgctttgactgggacaagagcctgctgaagatctacagcggcagcagccaccagtggctgcccatctgcagcagcaactggaatgacagctacagcgagaagacctgccagcagctgggctttgaaagtgcccacaggaccacagaggtggcccaccgggactttgccaacagcttcagcatcctgcgctacaacagcaccatccaggagagcctgcacaggtctgagtgccccagccagcgctacatcagcctgcagtgcagccactgcggcctgcgggccatgactggaagaattgtgggcggggccctggccagtgacagcaagtggccctggcaggtgtccctgcacttcggcaccacccacatctgtggcggcaccctgattgatgcccagtgggtgctgacagctgcccactgcttctttgtgacccgggagaaggtgctggagggctggaaggtgtatgccggcaccagcaacctgcaccagctgcctgaggccgccagcattgctgagatcatcatcaacagcaactacacagatgaagaagatgattatgacatcgccctgatgaggctgagcaagcccctgaccctgagcgcccacatccacccagcctgcctgcccatgcacggccagaccttcagcctgaatgagacctgctggatcaccggctttgggaagacccgggagacagatgacaagaccagccccttcctgcgggaggtgcaggtgaacctgattgacttcaagaagtgcaatgactacctggtgtatgacagctacctgacccccaggatgatgtgtgccggggacctgcggggcggccgggacagctgccagggcgacagcggcggccccctggtgtgtgagcagaacaaccgctggtacctggccggcgtgacctcctggggcaccggctgcggccagaggaacaagccaggagtgtacaccaaggtgacagaggtgctgccctggatctacagcaagatggagagcgaggtgcgcttcaggaagagctag

SEQ ID NO: 173969 - DNA, 1761 bp, synthetic construct
  misc_feature 1..1761: note = Description of Artificial Sequence: Synthetic coding sequence
  source 1..1761: mol_type = other DNA
atggagcgggacagccacggcaatgccagccctgcccggacccccagcgctggggccagccctgcccaggccagccctgctggcaccccacctggccgggccagccctgcccaggccagccctgcccaggccagccctgctggcaccccacctggccgggccagccctgcccaggccagccctgctggcaccccacctggccgggccagccctggccgggccagccctgcccaggccagccctgcccaggccagccctgcccgggccagccctgccctggccagcctgagccgcagcagcagcggccgcagcagcagcgcccggagcgcctctgtgaccaccagccccaccagggtgtacctggtgcgggccacccctgtgggcgctgtgcccatccgcagcagccctgcccggagcgccccagccacccgggccacccgggagagccctggcaccagcctgcccaagttcacctggagggagggccagaagcagctgcccctgattggctgtgtgctgctgctgattgccctggtggtgtccctcatcatcctcttccagttctggcagggccacacaggcatccgctacaaggagcagcgggagagctgccccaagcatgctgtgcgctgtgatggagtggtggactgcaagctgaagagtgatgagctgggctgtgtgcgctttgactgggacaagagcctgctgaagatctacagcggcagcagccaccagtggctgcccatctgcagcagcaactggaatgacagctacagcgagaagacctgccagcagctgggctttgagagcgcccacaggaccacagaggtggcccaccgggactttgccaacagcttcagcatcctgcgctacaacagcaccatccaggagagcctgcacagaagtgaatgtcccagccagcgctacatcagcctgcagtgcagccactgcggcctgcgggccatgacaggccgcatcgtgggcggggccctggccagtgacagcaagtggccctggcaggtgtccctgcacttcggcaccacccacatctgtggcggcaccctgattgatgcccagtgggtgctgacagctgcccactgcttctttgtgacccgggagaaggtgctggagggctggaaggtgtatgccggcaccagcaacctgcaccagctgcctgaggccgccagcattgctgagatcatcatcaacagcaactacacagatgaggaggatgattatgacatcgccctgatgaggctgagcaagcccctgaccctgagcgcccacatccacccagcctgcctgcccatgcacggccagaccttcagcctgaatgagacctgctggatcactggatttgggaagacccgggagacagatgacaagaccagccccttcctgcgggaggtgcaggtgaacctgattgacttcaagaagtgcaatgactacctggtgtatgacagctacctgacccccaggatgatgtgtgccggggacctgcggggcggccgggacagctgccagggcgacagcggcggccccctggtgtgtgagcagaacaaccgctggtacctggccggcgtgacctcctggggcaccggctgcggccagaggaacaagccaggagtgtacaccaaggtgacagaggtgctgccctggatctacagcaagatggaggtgcgcagcctgcagcaggacacagcccccagccggctgggcaccagcagcggcggggaccccggcggggccccccggctgtag

SEQ ID NO: 173970 - DNA, 1704 bp, synthetic construct
  misc_feature 1..1704: note = Description of Artificial Sequence: Synthetic coding sequence
  source 1..1704: mol_type = other DNA
atggagcgggacagccacggcaatgccagccctgcccggacccccagcgctggggccagccctgcccaggccagccctgctggcaccccacctggccgggccagccctgcccaggccagccctgcccaggccagccctgctggcaccccacctggccgggccagccctgcccaggccagccctgctggcaccccacctggccgggccagccctggccgggccagccctgcccaggccagccctgcccaggccagccctgcccgggccagccctgccctggccagcctgagccgcagcagcagcggccgcagcagcagcgcccggagcgcctctgtgaccaccagccccaccagggtgtacctggtgcgggccacccctgtgggcgctgtgcccatccgcagcagccctgcccggagcgccccagccacccgggccacccgggagagccctggcaccagcctgcccaagttcacctggagggagggccagaagcagctgcccctgattggctgtgtgctgctgctgattgccctggtggtgtccctcatcatcctcttccagttctggcagggccacacaggcatccgctacaaggagcagcgggagagctgccccaagcatgctgtgcgctgtgatggagtggtggactgcaagctgaagagtgatgagctgggctgtgtgcgctttgactgggacaagagcctgctgaagatctacagcggcagcagccaccagtggctgcccatctgcagcagcaactggaatgacagctacagcgagaagacctgccagcagctgggctttgagagcgcccacaggaccacagaggtggcccaccgggactttgccaacagcttcagcatcctgcgctacaacagcaccatccaggagagcctgcacagaagtgaatgtcccagccagcgctacatcagcctgcagtgcagccactgcggcctgcgggccatgacaggccgcatcgtgggcggggccctggccagtgacagcaagtggccctggcaggtgtccctgcacttcggcaccacccacatctgtggcggcaccctgattgatgcccagtgggtgctgacagctgcccactgcttctttgtgacccgggagaaggtgctggagggctggaaggtgtatgccggcaccagcaacctgcaccagctgcctgaggccgccagcattgctgagatcatcatcaacagcaactacacagatgaggaggatgattatgacatcgccctgatgaggctgagcaagcccctgaccctgagcgcccacatccacccagcctgcctgcccatgcacggccagaccttcagcctgaatgagacctgctggatcactggatttgggaagacccgggagacagatgacaagaccagccccttcctgcgggaggtgcaggtgaacctgattgacttcaagaagtgcaatgactacctggtgtatgacagctacctgacccccaggatgatgtgtgccggggacctgcggggcggccgggacagctgccagggcgacagcggcggccccctggtgtgtgagcagaacaaccgctggtacctggccggcgtgacctcctggggcaccggctgcggccagaggaacaagccaggagtgtacaccaaggtgacagaggtgctgccctggatctacagcaagatggagagcgaggtgcgcttcaggaagagctag

SEQ ID NO: 173971 - DNA, 1476 bp, synthetic construct
  misc_feature 1..1476: note = Description of Artificial Sequence: Synthetic coding sequence
  source 1..1476: mol_type = other DNA
atggagcgggacagccacggcaatgccagccctgcccggacccccagcgctggggccagccctgcccaggccagccctgctggcaccccacctggccgggccagccctgcccaggccagccctgcccaggccagccctgctggcaccccacctggccgggccagccctgcccaggccagccctgctggcaccccacctggccgggccagccctggccgggccagccctgcccaggccagccctgcccaggccagccctgcccgggccagccctgccctggccagcctgagccgcagcagcagcggccgcagcagcagcgcccggagcgcctctgtgaccaccagccccaccagggtgtacctggtgcgggccacccctgtgggcgctgtgcccatccgcagcagccctgcccggagcgccccagccacccgggccacccgggagagccctggcaccagcctgcccaagttcacctggagggagggccagaagcagctgcccctgattggctgtgtgctgctgctgattgccctggtggtgtccctcatcatcctcttccagttctggcagggccacacaggcatccgctacaaggagcagcgggagagctgccccaagcatgctgtgcgctgtgatggagtggtggactgcaagctgaagagtgatgagctgggctgtgtgcgctttgactgggacaagagcctgctgaagatctacagcggcagcagccaccagtggctgcccatctgcagcagcaactggaatgacagctacagcgagaagacctgccagcagctgggctttgagagcgcccacaggaccacagaggtggcccaccgggactttgccaacagcttcagcatcctgcgctacaacagcaccatccaggagagcctgcacagaagtgaatgtcccagccagcgctacatcagcctgcagtgcagccactgcggcctgcgggccatgacaggccgcatcgtgggcggggccctggccagtgacagcaagtggccctggcaggtgtccctgcacttcggcaccacccacatctgtggcggcaccctgattgatgcccagtgggtgctgacagctgcccactgcttctttgtgacccgggagaaggtgctggagggctggaaggtgtatgccggcaccagcaacctgcaccagctgcctgaggccgccagcattgctgagatcatcatcaacagcaactacacagatgaggaggatgattatgacatcgccctgatgaggctgagcaagcccctgaccctgtctggagagggcatctgcacccccaggagccctgccccccagccccagcaccccctgcagcccagccacctgagcgcctctgtgaacagctacccaggccccaaggccagcgctggccagaagagcaagaccctgaaggacccctacatggagcacttctgcttcatcatccgggagacagaggcccagggcctgtag

SEQ ID NO: 173972 - DNA, 1599 bp, synthetic construct
  misc_feature 1..1599: note = Description of Artificial Sequence: Synthetic coding sequence
  source 1..1599: mol_type = other DNA
atggagcgggacagccacggcaatgccagccctgcccggacccccagcgctggggccagccctgcccaggccagccctgctggcaccccacctggccgggccagccctgcccaggccagccctgcccaggccagccctgctggcaccccacctggccgggccagccctgcccaggccagccctgctggcaccccacctggccgggccagccctggccgggccagccctgcccaggccagccctgcccaggccagccctgcccgggccagccctgccctggccagcctgagccgcagcagcagcggccgcagcagcagcgcccggagcgcctctgtgaccaccagccccaccagggtgtacctggtgcgggccacccctgtgggcgctgtgcccatccgcagcagccctgcccggagcgccccagccacccgggccacccgggagagccctgtgcagttctggcagggccacacaggcatccgctacaaggagcagcgggagagctgccccaagcatgctgtgcgctgtgatggagtggtggactgcaagctgaagagtgatgagctgggctgtgtgcgctttgactgggacaagagcctgctgaagatctacagcggcagcagccaccagtggctgcccatctgcagcagcaactggaatgacagctacagcgagaagacctgccagcagctgggctttgaaagtgcccacaggaccacagaggtggcccaccgggactttgccaacagcttcagcatcctgcgctacaacagcaccatccaggagagcctgcacaggtctgagtgccccagccagcgctacatcagcctgcagtgcagccactgcggcctgcgggccatgactggaagaattgtgggcggggccctggccagtgacagcaagtggccctggcaggtgtccctgcacttcggcaccacccacatctgtggcggcaccctgattgatgcccagtgggtgctgacagctgcccactgcttctttgtgacccgggagaaggtgctggagggctggaaggtgtatgccggcaccagcaacctgcaccagctgcctgaggccgccagcattgctgagatcatcatcaacagcaactacacagatgaagaagatgattatgacatcgccctgatgaggctgagcaagcccctgaccctgagcgcccacatccacccagcctgcctgcccatgcacggccagaccttcagcctgaatgagacctgctggatcaccggctttgggaagacccgggagacagatgacaagaccagccccttcctgcgggaggtgcaggtgaacctgattgacttcaagaagtgcaatgactacctggtgtatgacagctacctgacccccaggatgatgtgtgccggggacctgcggggcggccgggacagctgccagggcgacagcggcggccccctggtgtgtgagcagaacaaccgctggtacctggccggcgtgacctcctggggcaccggctgcggccagaggaacaagccaggagtgtacaccaaggtgacagaggtgctgccctggatctacagcaagatggagagcgaggtgcgcttcaggaagagctag

SEQ ID NO: 173973 - DNA, 1365 bp, synthetic construct
  misc_feature 1..1365: note = Description of Artificial Sequence: Synthetic coding sequence
  source 1..1365: mol_type = other DNA
atgggagaaaatgaccccccagctgtggaggcccccttctccttccgcagcctgtttggcctggatgacctgaagatcagccctgtggccccagatgctgatgctgtggccgcccagatcctgagcctgctgcccctgaagttcttccccatcatcgtcatcggcatcatcgccctgatcctggccctggccatcggcctgggcatccactttgactgcagcggcaagtaccgctgccgcagcagcttcaagtgcatcgagctgattgcccgctgtgatggagtgtctgactgcaaggatggagaagatgagtaccgctgtgtgcgggtgggcggccagaatgctgtgctgcaggtgttcaccgctgcctcctggaagaccatgtgcagtgatgactggaagggccactacgccaacgtggcctgtgcccagctgggcttccccagctatgtgtccagtgacaacctgcgggtgagcagcctggagggccagttccgggaggagtttgtgtccattgaccacctgctgcctgatgacaaggtgacagccctgcaccacagcgtgtatgtgcgggagggctgtgccagcggccacgtggtgaccctgcagtgcacagcctgtggccaccggcggggctacagcagcagaattgtgggcggcaacatgagcctgctgagccagtggccctggcaggccagcctgcagttccagggctaccacctgtgtggcggcagcgtcatcacccccctgtggatcatcacagctgcccactgtgtgtatgacctgtacctgcccaagtcctggaccatccaggtgggcctggtgtccctgctggacaacccagcccccagccacctggtggagaagatcgtgtaccacagcaagtacaagcccaagaggctgggcaatgacatcgccctgatgaagctggccggccccctgaccttcaatgagatgatccagcctgtgtgcctgcccaacagcgaggagaacttcccagatggcaaggtgtgctggaccagcggctggggcgccacagaagatggagctggagatgccagccctgtgctgaaccacgccgctgtgcccctcatcagcaacaagatctgcaaccacagagatgtgtatggaggcatcatcagccccagcatgctgtgtgccggctacctgactggaggagtggacagctgccagggcgacagcggcggccccctggtgtgccaggagcggcggctgtggaagctggtgggcgccaccagctttggaattggctgtgccgaggtgaacaagccaggagtgtacaccagggtgaccagcttcctggactggattcatgagcagatggagcgggacctgaagacctag

SEQ ID NO: 173974 - DNA, 1617 bp, synthetic construct
  misc_feature 1..1617: note = Description of Artificial Sequence: Synthetic coding sequence
  source 1..1617: mol_type = other DNA
atgcaggccgtgggccccaagcccctgcccaccctgctgtgtggcggccgcacaggccacaggacagcccgggtgctgtccttcctgatccgcagctgcccctgtgagcccgggaagggctgtgtgtatggcaagcctgtgaccctgtggcccaccatcagctctgtggtgcccagcaccttcctgggcctgggcaactatgaggtggaggtggaggccgagccagatgtgcggggccctgagatcgtgaccatgggagaaaatgaccccccagctgtggaggcccccttctccttccgcagcctgtttggcctggatgacctgaagatcagccctgtggccccagatgctgatgctgtggccgcccagatcctgagcctgctgcccctgaagttcttccccatcatcgtcatcggcatcatcgccctgatcctggccctggccatcggcctgggcatccactttgactgcagcggcaagtaccgctgccgcagcagcttcaagtgcatcgagctgattgcccgctgtgatggagtgtctgactgcaaggatggagaagatgagtaccgctgtgtgcgggtgggcggccagaatgctgtgctgcaggtgttcaccgctgcctcctggaagaccatgtgcagtgatgactggaagggccactacgccaacgtggcctgtgcccagctgggcttccccagctatgtgtccagtgacaacctgcgggtgagcagcctggagggccagttccgggaggagtttgtgtccattgaccacctgctgcctgatgacaaggtgacagccctgcaccacagcgtgtatgtgcgggagggctgtgccagcggccacgtggtgaccctgcagtgcacagcctgtggccaccggcggggctacagcagcagaattgtgggcggcaacatgagcctgctgagccagtggccctggcaggccagcctgcagttccagggctaccacctgtgtggcggcagcgtcatcacccccctgtggatcatcacagctgcccactgtgtgtatgacctgtacctgcccaagtcctggaccatccaggtgggcctggtgtccctgctggacaacccagcccccagccacctggtggagaagatcgtgtaccacagcaagtacaagcccaagaggctgggcaatgacatcgccctgatgaagctggccggccccctgaccttcaatgagatgatccagcctgtgtgcctgcccaacagcgaggagaacttcccagatggcaaggtgtgctggaccagcggctggggcgccacagaagatggagctggagatgccagccctgtgctgaaccacgccgctgtgcccctcatcagcaacaagatctgcaaccacagagatgtgtatggaggcatcatcagccccagcatgctgtgtgccggctacctgactggaggagtggacagctgccagggcgacagcggcggccccctggtgtgccaggagcggcggctgtggaagctggtgggcgccaccagctttggaattggctgtgccgaggtgaacaagccaggagtgtacaccagggtgaccagcttcctggactggattcatgagcagatggagcgggacctgaagacctag

SEQ ID NO: 173975 - DNA, 1035 bp, synthetic construct
  misc_feature 1..1035: note = Description of Artificial Sequence: Synthetic coding sequence
  source 1..1035: mol_type = other DNA
atgggagaaaatgaccccccagctgtggaggcccccttctccttccgcagcctgtttggcctggatgacctgaagatcagccctgtggccccagatgctgatgctgtggccgcccagatcctgagcctgctgcccctgaagttcttccccatcatcgtcatcggcatcatcgccctgatcctggccctggccatcggcctgggcatccactttgactgcagcggcaagtaccgctgccgcagcagcttcaagtgcatcgagctgattgcccgctgtgatggagtgtctgactgcaaggatggagaagatgagtaccgctgtgtgcgggtgggcggccagaatgctgtgctgcaggtgttcaccgctgcctcctggaagaccatgtgcagtgatgactggaagggccactacgccaacgtggcctgtgcccagctgggcttccccagctatgtgtccagtgacaacctgcgggtgagcagcctggagggccagttccgggaggagtttgtgtccattgaccacctgctgcctgatgacaaggtgacagccctgcaccacagcgtgtatgtgcgggagggctgtgccagcggccacgtggtgaccctgcagtgcacagcctgtggccaccggcggggctacagcagcagaattgtgggcggcaacatgagcctgctgagccagtggccctggcaggccagcctgcagttccagggctaccacctgtgtggcggcagcgtcatcacccccctgtggatcatcacagctgcccactgtgtgtatgacctgtacctgcccaagtcctggaccatccaggtgggcctggtgtccctgctggacaacccagcccccagccacctggtggagaagatcgtgtaccacagcaagtacaagcccaagaggctgggcaatgacatcgccctgatgaagctggccggccccctgaccttcaacggcaccagcggcagcctgtgtggcagcgctgccctgcccctcttccaggaggacctgcagctgctgattgaggccttcctgtag

SEQ ID NO: 173976 - DNA, 1362 bp, synthetic construct
  misc_feature 1..1362: note = Description of Artificial Sequence: Synthetic coding sequence
  source 1..1362: mol_type = other DNA
atgggagaaaatgaccccccagctgtggaggcccccttctccttccgcagcctgtttggcctggatgacctgaagatcagccctgtggccccagatgctgatgctgtggccgcccagatcctgagcctgctgcccctgaagttcttccccatcatcgtcatcggcatcatcgccctgatcctggccctggccatcggcctgggcatccactttgactgcagcggcaagtaccgctgccgcagcagcttcaagtgcatcgagctgattgcccgctgtgatggagtgtctgactgcaaggatggagaagatgagtaccgctgtgtgcgggtgggcggccagaatgctgtgctgcaggtgttcaccgctgcctcctggaagaccatgtgcagtgatgactggaagggccactacgccaacgtggcctgtgcccagctgggcttccccagctatgtgtccagtgacaacctgcgggtgagcagcctggagggccagttccgggaggagtttgtgtccattgaccacctgctgcctgatgacaaggtgacagccctgcaccacagcgtgtatgtgcgggagggctgtgccagcggccacgtggtgaccctgcagtgcacagcctgtggccaccggcggggctacagcagcagaattgtgggcggcaacatgagcctgctgagccagtggccctggcaggccagcctgcagttccagggctaccacctgtgtggcggcagcgtcatcacccccctgtggatcatcacagctgcccactgtgtgtatgacctgtacctgcccaagtcctggaccatccaggtgggcctggtgtccctgctggacaacccagcccccagccacctggtggagaagatcgtgtaccacagcaagtacaagcccaagaggctgggcaatgacatcgccctgatgaagctggccggccccctgaccttcaatgagatgatccagcctgtgtgcctgcccaacagcgaggagaacttcccagatggcaaggtgtgctggaccagcggctggggcgccacagaagatggaggagatgccagccctgtgctgaaccacgccgctgtgcccctcatcagcaacaagatctgcaaccacagagatgtgtatggaggcatcatcagccccagcatgctgtgtgccggctacctgaccggcggcgtggacagctgccagggcgacagcggcggccccctggtgtgccaggagcggcggctgtggaagctggtgggcgccaccagctttggcatcggctgtgccgaggtgaacaagccaggagtgtacaccagggtgaccagcttcctggactggatccacgagcagatggagcgggacctgaagacctag

SEQ ID NO: 173977 - DNA, 1314 bp, synthetic construct
  misc_feature 1..1314: note = Description of Artificial Sequence: Synthetic coding sequence
  source 1..1314: mol_type = other DNA
atgctgcaggaccctgacagcgaccagcccctgaacagcctggatgtgaagcccctgaggaagccccgcatccccatggagaccttcaggaaggtgggcatccccatcatcatcgccctgctgagcctggccagcatcatcatcgtggtggtgctgatcaaggtgatcctggacaagtactacttcctgtgtggccagcccctgcacttcatccccaggaagcagctgtgtgatggagagctggactgccccctgggagaagatgaggagcactgtgtgaagagcttccctgagggccctgctgtggccgtgcggctgagcaaggacaggagcaccctgcaggtgctggacagcgccaccggcaactggttcagcgcctgctttgacaacttcacagaggccctggccgagacagcctgccggcagatgggctacagcagcaagcccaccttccgggctgtggagatcggccctgaccaggacctggatgtggtggagatcacagagaacagccaggagctgaggatgaggaacagcagcggcccctgcctgagcggcagcctggtgtccctgcactgcctggcctgtgggaagagcctgaagaccccccgggtggtgggcgtggaggaggcctctgtggacagctggccctggcaggtgtccatccagtatgacaagcagcacgtgtgtggcggcagcatcctggacccccactgggtgctgacagctgcccactgcttcaggaagcacacagatgtgttcaactggaaggtgcgggccggcagtgacaagctgggcagcttccccagcctggccgtggccaagatcatcatcatcgagttcaaccccatgtaccccaaggacaatgacatcgccctgatgaagctgcagttccccctgaccttctctggaacagtgcggcccatctgcctgcccttctttgatgaggagctgaccccagccacccccctgtggatcatcggctggggcttcaccaagcagaatggaggcaagatgtctgacatcctgctgcaggcctctgtgcaggtgattgacagcacccgctgcaatgctgatgatgcctaccagggcgaggtgacagagaagatgatgtgtgccggcatccctgagggcggcgtggacacctgccagggcgacagcggcggccccctgatgtaccagagcgaccagtggcacgtggtgggcatcgtgtcctggggctacggctgcggcggccccagcaccccaggagtgtacaccaaggtgtctgcctacctgaactggatctacaacgtgtggaaggccgagctgtag

SEQ ID NO: 173978 - DNA, 1299 bp, synthetic construct
  misc_feature 1..1299: note = Description of Artificial Sequence: Synthetic coding sequence
  source 1..1299: mol_type = other DNA
atgctgcaggaccctgacagcgaccagcccctgaacagcctggatgtgaagcccctgaggaagccccgcatccccatggagaccttcaggaaggtgggcatccccatcatcatcgccctgctgagcctggccagcatcatcatcgtggtggtgctgatcaaggtgatcctggacaagtactacttcctgtgtggccagcccctgcacttcatccccaggaagcagctgtgtgatggagagctggactgccccctgggagaagatgaggagcactgtgtgaagagcttccctgagggccctgctgtggccgtgcggctgagcaaggacaggagcaccctgcaggtgctggacagcgccaccggcaactggttcagcgcctgctttgacaacttcacagaggccctggccgagacagcctgccggcagatgggctacagcagagctgtggagattggaccagaccaggacctggatgtggtggagatcacagagaacagccaggagctgaggatgaggaacagcagcggcccctgcctgagcggcagcctggtgtccctgcactgcctggcctgtgggaagagcctgaagaccccccgggtggtgggcgtggaggaggcctctgtggacagctggccctggcaggtgtccatccagtatgacaagcagcacgtgtgtggcggcagcatcctggacccccactgggtgctgacagctgcccactgcttcaggaagcacacagatgtgttcaactggaaggtgcgggccggcagtgacaagctgggcagcttccccagcctggccgtggccaagatcatcatcatcgagttcaaccccatgtaccccaaggacaatgacatcgccctgatgaagctgcagttccccctgaccttcagcggcaccgtgcggcccatctgcctgcccttctttgatgaggagctgaccccagccacccccctgtggatcatcggctggggcttcaccaagcagaatggaggcaagatgtctgacatcctgctgcaggcctctgtgcaggtgattgacagcacccgctgcaatgctgatgatgcctaccagggcgaggtgacagagaagatgatgtgtgccggcatccctgagggcggcgtggacacctgccagggcgacagcggcggccccctgatgtaccagagcgaccagtggcacgtggtgggcatcgtgtcctggggctacggctgcggcggccccagcaccccaggagtgtacaccaaggtgtctgcctacctgaactggatctacaacgtgtggaaggccgagctgtag

SEQ ID NO: 173979 - DNA, 1308 bp, synthetic construct
  misc_feature 1..1308: note = Description of Artificial Sequence: Synthetic coding sequence
  source 1..1308: mol_type = other DNA
atggaccctgacagcgaccagcccctgaacagcctggatgtgaagcccctgaggaagccccgcatccccatggagaccttcaggaaggtgggcatccccatcatcatcgccctgctgagcctggccagcatcatcatcgtggtggtgctgatcaaggtgatcctggacaagtactacttcctgtgtggccagcccctgcacttcatccccaggaagcagctgtgtgatggagagctggactgccccctgggagaagatgaggagcactgtgtgaagagcttccctgagggccctgctgtggccgtgcggctgagcaaggacaggagcaccctgcaggtgctggacagcgccaccggcaactggttcagcgcctgctttgacaacttcacagaggccctggccgagacagcctgccggcagatgggctacagcagcaagcccaccttccgggctgtggagatcggccctgaccaggacctggatgtggtggagatcacagagaacagccaggagctgaggatgaggaacagcagcggcccctgcctgagcggcagcctggtgtccctgcactgcctggcctgtgggaagagcctgaagaccccccgggtggtgggcgtggaggaggcctctgtggacagctggccctggcaggtgtccatccagtatgacaagcagcacgtgtgtggcggcagcatcctggacccccactgggtgctgacagctgcccactgcttcaggaagcacacagatgtgttcaactggaaggtgcgggccggcagtgacaagctgggcagcttccccagcctggccgtggccaagatcatcatcatcgagttcaaccccatgtaccccaaggacaatgacatcgccctgatgaagctgcagttccccctgaccttctctggaacagtgcggcccatctgcctgcccttctttgatgaggagctgaccccagccacccccctgtggatcatcggctggggcttcaccaagcagaatggaggcaagatgtctgacatcctgctgcaggcctctgtgcaggtgattgacagcacccgctgcaatgctgatgatgcctaccagggcgaggtgacagagaagatgatgtgtgccggcatccctgagggcggcgtggacacctgccagggcgacagcggcggccccctgatgtaccagagcgaccagtggcacgtggtgggcatcgtgtcctggggctacggctgcggcggccccagcaccccaggagtgtacaccaaggtgtctgcctacctgaactggatctacaacgtgtggaaggccgagctgtag

SEQ ID NO: 173980 - DNA, 1374 bp, synthetic construct
  misc_feature 1..1374: note = Description of Artificial Sequence: Synthetic coding sequence
  source 1..1374: mol_type = other DNA
atgagcctgatgctggatgaccagccccccatggaggcccagtatgcagaggagggccctggccctggcatcttccgggcagagcccggggaccagcagcaccccatcagccaggccgtgtgctggaggtccatgaggcggggctgtgctgtgctgggcgccctgggcctgctggccggggccggcgtgggctcctggctgctggtgctgtacctgtgcccagctgccagccagcccatcagcggcaccctgcaggatgaggagatcaccctgagctgcagcgaggccagcgctgaggaggccctgctgcctgccctgcccaagacagtgtccttccgcatcaacagcgaggacttcctgctggaggcccaggtgcgggaccagccccgctggctgctggtgtgccacgagggctggagccctgccctgggcctgcagatctgctggagcctgggccacctgcggctgacccaccacaagggcgtgaacctgacagacatcaagctgaacagcagccaggagtttgcccagctgagcccccggctgggcggcttcctggaggaggcctggcagcccaggaacaactgcaccagcggccaggtggtgtccctgcgctgcagtgaatgtggggcccggcccctggccagccgcatcgtgggcggccagagcgtggcccctggccgctggccctggcaggcctctgtggccctgggcttccgccacacctgtggcggctctgtgctggccccccgctgggtggtgacagctgcccactgcatgcacagcttccggctggcccggctgagctcctggagggtgcatgctggcctggtgagccacagcgctgtgcggccccaccagggcgccctggtggagcgcatcatcccccaccccctgtacagcgcccagaaccacgactatgatgtggccctgctgcggctgcagacagccctgaacttcagtgacacagtgggcgctgtgtgcctgcctgccaaggagcagcacttccccaagggcagccgctgctgggtgtctggctggggccacacccaccccagccacacctacagcagtgacatgctgcaggacacagtggtgcccctcttcagcacccagctgtgcaacagcagctgtgtgtacagcggggccctgacccccaggatgctgtgtgccggctacctggatggccgggcagatgcctgccagggcgacagcggcggccccctggtgtgcccagatggagacacctggaggctggtgggcgtggtgtcctggggccggggctgtgccgagcccaaccaccctggggtgtatgccaaggtggccgagttcctggactggattcatgacacagcccaggacagcctgctgtag

SEQ ID NO: 173981 - DNA, 2436 bp, synthetic construct
  misc_feature 1..2436: note = Description of Artificial Sequence: Synthetic coding sequence
  source 1..2436: mol_type = other DNA
atgctgctgctcttccacagcaagaggatgcctgtggccgaggccccccaggtggccggcggccagggagatggaggagatggagaggaggccgagcctgagggcatgttcaaggcctgtgaggacagcaagaggaaggcccggggctacctgcggctggtgcccctgtttgtgctgctggccctgctggtgctggccagcgctggggtgctgctgtggtacttcctgggctacaaggccgaggtgatggtgtcccaggtgtacagcggcagcctgcgggtgctgaacagacacttcagccaggacctgacccggcgggagagcagcgccttccgctcagaaacagccaaggcccagaagatgctgaaggagctgatcaccagcacccggctgggcacctactacaacagcagctctgtgtacagctttggagagggccccctgacctgcttcttctggttcatcctgcagatccctgagcaccggcggctgatgctgagccctgaggtggtgcaggccctgctggtggaggagctgctgagcacagtgaacagcagcgctgctgtgccctacagagcagaatatgaggtggaccctgagggcctggtgatcctggaggcctctgtgaaggacattgctgccctgaacagcaccctgggctgctaccgctacagctatgtgggccagggccaggtgctgcggctgaagggccctgaccacctggccagcagctgcctgtggcacctgcagggccccaaggacctgatgctgaagctgcggctggagtggaccctggctgaatgtcgggaccggctggccatgtatgatgtggccggccccctggagaagaggctcatcacctctgtgtatggctgcagccggcaggagcctgtggtggaggtgctggccagcggggccatcatggctgtggtgtggaagaagggcctgcacagctactatgacccctttgtgctgtctgtgcagcctgtggtgttccaggcctgtgaggtgaacctgaccctggacaaccggctggacagccagggcgtgctgagcaccccctacttccccagctactacagcccccagacccactgctcctggcacctgactgtgcccagcctggactatggcctggccctgtggtttgatgcctatgccctgcggcggcagaagtatgacctgccctgcacccagggccagtggaccatccagaacagaaggctgtgtggcctgcgcatcctgcagccctatgcagagcgcatccctgtggtggccacagctggcatcaccatcaacttcaccagccagatcagcctgactggacctggggtgcgggtgcactacggcctgtacaaccagagcgacccctgccctggagagttcctgtgcagcgtgaatggcctgtgtgtgcctgcctgtgatggagtgaaggactgccccaacggcctggatgaaagaaactgtgtgtgccgggccaccttccagtgcaaggaggacagcacctgcatcagcctgcccaaggtgtgtgatggccagcctgactgcctgaatggaagtgatgaggagcagtgccaggagggcgtgccctgtggcaccttcaccttccagtgtgaagatagaagctgtgtgaagaagcccaacccccagtgtgatggccgcccagactgcagagatggcagtgatgaggagcactgtgactgtggcctgcagggccccagcagcagaattgtgggcggcgctgtgagcagcgagggggagtggccctggcaggccagcctgcaggtgcggggccgccacatctgtggcggggccctgattgctgaccgctgggtgatcacagctgcccactgcttccaggaggacagcatggccagcacagtgctgtggacagtgttcctgggcaaggtgtggcagaacagccgctggccaggagaggtgtccttcaaggtgtcccggctgctgctgcacccctaccacgaggaggacagccatgactatgatgtggccctgctgcagctggaccaccctgtggtgcgctctgctgctgtgcggcctgtgtgcctgcctgcccggagccacttctttgagcccggcctgcactgctggatcaccggctggggcgccctgcgggagggcggccccatcagcaatgccctgcagaaggtggatgtgcagctgatcccccaggacctgtgcagcgaggtgtaccgctaccaggtgacccccaggatgctgtgtgccggctacaggaagggcaagaaggatgcctgccagggcgacagcggcggccccctggtgtgcaaggccctgagcggccgctggttcctggccggcctggtgtcctggggcctgggctgcggccggcccaactactttggagtgtacacccgcatcaccggggtcatctcctggatccagcaggtggtgacctag

SEQ ID NO: 173982 - DNA, 2475 bp, synthetic construct
  misc_feature 1..2475: note = Description of Artificial Sequence: Synthetic coding sequence
  source 1..2475: mol_type = other DNA
atgcctgtggccgaggccccccaggtggccggcggccagggagatggaggagatggagaggaggccgagcctgagggcatgttcaaggcctgtgaggacagcaagaggaaggcccggggctacctgcggctggtgcccctgtttgtgctgctggccctgctggtgctggccagcgctggggtgctgctgtggtacttcctgggctacaaggccgaggtgatggtgtcccaggtgtacagcggcagcctgcgggtgctgaacagacacttcagccaggacctgacccggcgggagagcagcgccttccgctcagaaacagccaaggcccagaagatgctgaaggagctgatcaccagcacccggctgggcacctactacaacagcagctctgtgtacagctttggagagggccccctgacctgcttcttctggttcatcctgcagatccctgagcaccggcggctgatgctgagccctgaggtggtgcaggccctgctggtggaggagctgctgagcacagtgaacagcagcgctgctgtgccctacagagcagaatatgaggtggaccctgagggcctggtgatcctggaggcctctgtgaaggacattgctgccctgaacagcaccctgggctgctaccgctacagctatgtgggccagggccaggtgctgcggctgaagggccctgaccacctggccagcagctgcctgtggcacctgcagggccccaaggacctgatgctgaagctgcggctggagtggaccctggccgagtgccgggaccggctggccatgtatgatgtggccggccccctggagaagaggctcatcacctctgtgtatggctgcagccggcaggagcctgtggtggaggtgctggccagcggggccatcatggctgtggtgtggaagaagggcctgcacagctactatgacccctttgtgctgtctgtgcagcctgtggtgttccaggcctgtgaggtgaacctgaccctggacaaccggctggacagccagggcgtgctgagcaccccctacttccccagctactacagcccccagacccactgctcctggcacctgactgtgcccagcctggactatggcctggccctgtggtttgatgcctatgccctgcggcggcagaagtatgacctgccctgcacccagggccagtggaccatccagaacagaaggctgtgtggcctgcgcatcctgcagccctatgcagagcgcatccctgtggtggccacagctggcatcaccatcaacttcaccagccagatcagcctgaccggccctggggtgcgggtgcactacggcctgtacaaccagagcgacccctgccctggagagttcctgtgcagcgtgaatggcctgtgtgtgcctgcctgtgatggagtgaaggactgccccaacggcctggatgagaggaactgtgtgtgccgggccaccttccagtgcaaggaggacagcacctgcatcagcctgcccaaggtgtgtgatggccagcctgactgcctgaatggaagtgatgaggagcagtgccaggagggcgtgccctgtggcaccttcaccttccagtgtgaggacaggagctgtgtgaagaagcccaacccccagtgtgatggccgcccagactgcagagatggcagtgatgaggagcactgtgactgtggcctgcagggccccagcagccgcatcgtgggcggcgctgtgtcctctgagggggagtggccctggcaggccagcctgcaggtgcggggccgccacatctgtggcggggccctgattgctgaccgctgggtgatcacagctgcccactgcttccaggaggacagcatggccagcacagtgctgtggacagtgttcctgggcaaggtgtggcagaacagccgctggccaggagaggtgtccttcaaggtgtcccggctgctgctgcacccctaccacgaggaggacagccatgactatgatgtggccctgctgcagctggaccaccctgtggtgcgctctgctgctgtgcggcctgtgtgcctgcctgcccggagccacttctttgagcccggcctgcactgctggatcaccggctggggcgccctgcgggagggcgccctgcgggcagatgctgtggccctcttctacggctggaggaaccagggcagcgagacctgctgctgccccatcagcaatgccctgcagaaggtggatgtgcagctgatcccccaggacctgtgcagcgaggtgtaccgctaccaggtgacccccaggatgctgtgtgccggctacaggaagggcaagaaggatgcctgccagggcgacagcggcggccccctggtgtgcaaggccctgagcggccgctggttcctggccggcctggtgtcctggggcctgggctgcggccggcccaactactttggagtgtacacccgcatcactggagtcatctcctggatccagcaggtggtgacctag

SEQ ID NO: 173983 - DNA, 2409 bp, synthetic construct
  misc_feature 1..2409: note = Description of Artificial Sequence: Synthetic coding sequence
  source 1..2409: mol_type = other DNA
atgcctgtggccgaggccccccaggtggccggcggccagggagatggaggagatggagaggaggccgagcctgagggcatgttcaaggcctgtgaggacagcaagaggaaggcccggggctacctgcggctggtgcccctgtttgtgctgctggccctgctggtgctggccagcgctggggtgctgctgtggtacttcctgggctacaaggccgaggtgatggtgtcccaggtgtacagcggcagcctgcgggtgctgaacagacacttcagccaggacctgacccggcgggagagcagcgccttccgctcagaaacagccaaggcccagaagatgctgaaggagctgatcaccagcacccggctgggcacctactacaacagcagctctgtgtacagctttggagagggccccctgacctgcttcttctggttcatcctgcagatccctgagcaccggcggctgatgctgagccctgaggtggtgcaggccctgctggtggaggagctgctgagcacagtgaacagcagcgctgctgtgccctacagagcagaatatgaggtggaccctgagggcctggtgatcctggaggcctctgtgaaggacattgctgccctgaacagcaccctgggctgctaccgctacagctatgtgggccagggccaggtgctgcggctgaagggccctgaccacctggccagcagctgcctgtggcacctgcagggccccaaggacctgatgctgaagctgcggctggagtggaccctggccgagtgccgggaccggctggccatgtatgatgtggccggccccctggagaagaggctcatcacctctgtgtatggctgcagccggcaggagcctgtggtggaggtgctggccagcggggccatcatggctgtggtgtggaagaagggcctgcacagctactatgacccctttgtgctgtctgtgcagcctgtggtgttccaggcctgtgaggtgaacctgaccctggacaaccggctggacagccagggcgtgctgagcaccccctacttccccagctactacagcccccagacccactgctcctggcacctgactgtgcccagcctggactatggcctggccctgtggtttgatgcctatgccctgcggcggcagaagtatgacctgccctgcacccagggccagtggaccatccagaacagaaggctgtgtggcctgcgcatcctgcagccctatgcagagcgcatccctgtggtggccacagctggcatcaccatcaacttcaccagccagatcagcctgaccggccctggggtgcgggtgcactacggcctgtacaaccagagcgacccctgccctggagagttcctgtgcagcgtgaatggcctgtgtgtgcctgcctgtgatggagtgaaggactgccccaacggcctggatgagaggaactgtgtgtgccgggccaccttccagtgcaaggaggacagcacctgcatcagcctgcccaaggtgtgtgatggccagcctgactgcctgaatggaagtgatgaggagcagtgccaggagggcgtgccctgtggcaccttcaccttccagtgtgaggacaggagctgtgtgaagaagcccaacccccagtgtgatggccgcccagactgcagagatggcagtgatgaggagcactgtgactgtggcctgcagggccccagcagccgcatcgtgggcggcgctgtgtcctctgagggggagtggccctggcaggccagcctgcaggtgcggggccgccacatctgtggcggggccctgattgctgaccgctgggtgatcacagctgcccactgcttccaggaggacagcatggccagcacagtgctgtggacagtgttcctgggcaaggtgtggcagaacagccgctggccaggagaggtgtccttcaaggtgtcccggctgctgctgcacccctaccacgaggaggacagccatgactatgatgtggccctgctgcagctggaccaccctgtggtgcgctctgctgctgtgcggcctgtgtgcctgcctgcccggagccacttctttgagcccggcctgcactgctggatcaccggctggggcgccctgcgggagggcggccccatcagcaatgccctgcagaaggtggatgtgcagctgatcccccaggacctgtgcagcgaggtgtaccgctaccaggtgacccccaggatgctgtgtgccggctacaggaagggcaagaaggatgcctgccagggcgacagcggcggccccctggtgtgcaaggccctgagcggccgctggttcctggccggcctggtgtcctggggcctgggctgcggccggcccaactactttggagtgtacacccgcatcactggagtcatctcctggatccagcaggtggtgacctag

SEQ ID NO: 173984 - DNA, 2475 bp, synthetic construct; identical to SEQ ID NO: 173982
  misc_feature 1..2475: note = Description of Artificial Sequence: Synthetic coding sequence
  source 1..2475: mol_type = other DNA

SEQ ID NO: 173985 - DNA, 426 bp, synthetic construct
  misc_feature 1..426: note = Description of Artificial Sequence: Synthetic coding sequence
  source 1..426: mol_type = other DNA
atgcctgtggccgaggccccccaggtggccggcggccagggagatggaggagatggagaggaggccgagcctgagggcatgttcaaggcctgtgaggacagcaagaggaaggcccggggctacctgcggctggtgcccctgtttgtgctgctggccctgctggtgctggccagcgctggggtgctgctgtggtacttcctgggctacaaggccgaggtgatggtgtcccaggtgtacagcggcagcctgcgggtgctgaacagacacttcagccaggacctgacccggcgggagagcagcgccttccgctcagaaacagccaaggcccagaagatgctgaaggagctgatcaccagcacccggctgggcacctactacaacagcagctctgtgtacagctttggagagggccccctgacctgctag

SEQ ID NO: 173986 - DNA, 1386 bp, synthetic construct
  misc_feature 1..1386: note = Description of Artificial Sequence: Synthetic coding sequence
  source 1..1386: mol_type = other DNA
atgctgctgctcttccacagcaagaggatgcctgtggccgaggccccccaggtggccggcggccagggagatggaggagatggagaggaggccgagcctgagggcatgttcaaggcctgtgaggacagcaagaggaaggcccggggctacctgcggctggtgcccctgtttgtgctgctggccctgctggtgctggccagcgctggggtgctgctgtggtacttcctgggctacaaggccgaggtgatggtgtcccaggtgtacagcggcagcctgcgggtgctgaacagacacttcagccaggacctgacccggcgggagagcagcgccttccgctcagaaacagccaaggcccagaagatgctgaaggagctgatcaccagcacccggctgggcacctactacaacagcagctctgtgtacagctttggagagggccccctgacctgcttcttctggttcatcctgcagatccctgagcaccggcggctgatgctgagccctgaggtggtgcaggccctgctggtggaggagctgctgagcacagtgaacagcagcgctgctgtgccctacagagcagaatatgaggtggaccctgagggcctggtgatcctggaggcctctgtgaaggacattgctgccctgaacagcaccctgggctgctaccgctacagctatgtgggccagggccaggtgctgcggctgaagggccctgaccacctggccagcagctgcctgtggcacctgcagggccccaaggacctgatgctgaagctgcggctggagtggaccctggctgaatgtcgggaccggctggccatgtatgatgtggccggccccctggagaagaggctcatcacctctgtgtatggctgcagccggcaggagcctgtggtggaggtgctggccagcggggccatcatggctgtggtgtggaagaagggcctgcacagctactatgacccctttgtgctgtctgtgcagcctgtggtgttccaggcctgtgaggtgaacctgaccctggacaaccggctggacagccagggcgtgctgagcaccccctacttccccagctactacagcccccagacccactgctcctggcacctgactgtgcccagcctggactatggcctggccctgtggtttgatgcctatgccctgcggcggcagaagtatgacctgccctgcacccagggccagtggaccatccagaacagacgctaccacttcctgagcagcctgtggctgcccttcctgcccccaccacccagcctgcccagcagcatcgtgacccccagcctggaggcccaggtgcccaacctgcggggagctgcccggggggccagccggggctggggctggtgccaggcctgctgcccctag

SEQ ID NO: 173987 - DNA, 1527 bp, synthetic construct
  misc_feature 1..1527: note = Description of Artificial Sequence: Synthetic coding sequence
  source 1..1527: mol_type = other DNA
atggccagcgctgtgtggggcagcgccccctggtggggccccccacctccagccccagcccggcccctgacagacatcgacttctgcagcggggcccagctgcaggagctgacccagctgatccaggagctgggcgtgcaggagagctggagcgatggccccaagccaggagctgacctgctgcgggccaaggactttgtgttcagcctgctgggcctggtgcaccggcgggacccccgcttccccccccaggccgagctgctgctgctgcggggcggcatccgggagggcagcctggacctgggccacgcccccctgggcccctatgcccggggcccccactatgatgctggcttcaccctgctggtgcccatgttcagcctggatggaacagagctgcagctggacctggagagctgctacgcccaggtgtgcctgcctgagatggtgtgtggcacccccatccgggagatgtggcaggactgcctgggcccccctgtgcctggggcccgggacagcatccacaggacagaaagtgaggagagcagcaaggactggcagagctctgtggaccagccccacagctatgtgacagagcacgaggcccctgtgtccctggagaagagccccagtgatgtgtctgccagcgagagcccccagcatgatgtggtggacctgggcagcacagcccccctgaagaccatgagcagtgatgtgaccaaggctgctgtggagagccctgtgcccaagcccagcgaggcccgggaggcctggcccaccctgtgcagcgcccaggtggccgcctggttctttgccaccctggccgctgtggccgagagcctcatccctgtgcctggggccccccggctggtgcatgctgcccggcatgctggcttcaccaccgtgctgctggccaccccagagcccccccggcggctgctgctgtttgacctgatccctgtggtgtctgtggccggctggccagagggcgcccggagccacagctgggccggccccctggccagcgagagcgccagcttctacctggtgcctgggggcggcacagagcggccctgtgccagcgcctggcagctgtgctttgcccggcaggagctggccctgaaggcccgcatcccagcccccctgctgcaggcccatgctgctgcccaggccctgctgcggcccctggtggccggcaccagggctgctgccccctacctgctgcggaccctgctgtactgggcctgtgagcggctgcctgccctgtacctggcccggccagaaaatgctggggcctgctgcctgggcctgctggatgagctgggccgggtgctggaggccggcaccctgccccactacttcctgaatggccggcagctgaggactggagatgacagcgctgccctgctgggggagctggcccggctgcggggggaccctgcccgggccctgcgggctgctgtggaggaggccaaggtggccaggaagggcggcggcctggccggcgtgggcggcggggcccactag

SEQ ID NO: 173988 - DNA, 1527 bp, synthetic construct; identical to SEQ ID NO: 173987
  misc_feature 1..1527: note = Description of Artificial Sequence: Synthetic coding sequence
  source 1..1527: mol_type = other DNA

SEQ ID NO: 173989 - DNA, 825 bp, synthetic construct
  misc_feature 1..825: note = Description of Artificial Sequence: Synthetic coding sequence
  source 1..825: mol_type = other DNA
atgggcaagagcctgagccacctgcccctgcacagcagcaaagaagatgcctatgatggagtgaccagcgagaacatgagaaatggcctggtgaacagcgaggtgcacaatgaagatggaagaaatggagatgtgtcccagttcccctacgtggagttcaccggccgggacagcgtgacctgccccacctgccagggcaccggccgcatcccccggggccaggagaaccagctggtggccctgatcccctacagcgaccagaggctgcggcccaggaggaccaagctgtatgtgatggcctctgtgtttgtgtgcctgctgctgagcggcctggccgtgttcttcctgttccccaggagcattgatgtgaagtacatcggcgtgaagagcgcctacgtgtcctatgatgtgcagaagaggaccatctacctgaacatcaccaacaccctgaacatcaccaacaacaactactacagcgtggaggtggagaacatcacagcccaggtgcagttcagcaagacagtcatcggcaaggcccggctgaacaacatcaccatcatcggccccctggacatgaagcagattgactacacagtgcccaccgtgattgctgaggagatgagctacatgtatgacttctgcaccctcatcagcatcaaggtgcacaacatcgtgctgatgatgcaggtgacagtgaccaccacctacttcggccacagcgagcagatcagccaggagcgctaccagtatgtggactgtggcaggaacaccacctaccagctgggccagagcgagtacctgaatgtgctgcagccccagcagtag

SEQ ID NO: 173990 - DNA, 825 bp, synthetic construct; identical to SEQ ID NO: 173989
  misc_feature 1..825: note = Description of Artificial Sequence: Synthetic coding sequence
  source 1..825: mol_type = other DNA

SEQ ID NO: 173991 - DNA, 78 bp, synthetic construct
  misc_feature 1..78: note = Description of Artificial Sequence: Synthetic coding sequence
  source 1..78: mol_type = other DNA
atgggcaagagcctgagccacctgcccctgcacagcagcaaagaagatgcctatgatggagtgaccagcgagaactag

SEQ ID NO: 173992 - DNA, 333 bp, synthetic construct
  misc_feature 1..333: note = Description of Artificial Sequence: Synthetic coding sequence
  source 1..333: mol_type = other DNA
atgggcaagagcctgagccacctgcccctgcacagcagcaaagaagatgcctatgatggagtgaccagcgagaacatgagaaatggcctggtgaacagcgaggtgcacaatgaagatggaagaaatggagatgtgtcccagttcccctacgtggagttcaccggccgggacagcgtgacctgccccacctgccagggcaccggccgcatcccccggggccaggagaaccagctggtggccctgatcccctacagcgaccagaggctgcggcccaggaggaccaagctgtatgtgatggcctctgtgtttgtgtgcctgctgctgtctggatag

SEQ ID NO: 173993 - DNA, 369 bp, synthetic construct
  misc_feature 1..369: note = Description of Artificial Sequence: Synthetic coding sequence
  source 1..369: mol_type = other DNA
atgcacggcacctttgtgatcctgctgcccctgagcctcatcctgatggtgtttggaggcatgacaggcttcctgtccttcctgctgcaggcctacctgctgctgctgctgaccggcatcctcttcctgtttggagccatggtgaccctggccggcatctctgtgtacatcgcctacagcgctgctgccttccgggaggccctgtgcctgctggaggagaaggccctgctggaccaggtggacatcagctttggctggagcctggccctgggctggatctccttcatcgccgagctgctgactggagctgccttcctggccgccgcccgggagctgagcctgcggcggcggcaggaccaggccatctag

SEQ ID NO: 173994 - DNA, 570 bp, synthetic construct
  misc_feature 1..570: note = Description of Artificial Sequence: Synthetic coding sequence
  source 1..570: mol_type = other DNA
atgggcctgggcgcccggggggcctgggccgccctgctgctgggcaccctgcaggtgctggccctgctgggcgccgcccatgaatctgctgccatggccgagaccctgcagcacgtgcccagcgaccacaccaatgagaccagcaacagcacagtgaagccacccacctctgtggccagtgacagcagcaacaccaccgtgaccaccatgaagcccacagctgccagcaacaccaccaccccaggcatggtgtccaccaacatgaccagcaccaccctgaagagcacccccaagaccacctctgtgtcccagaacaccagccagatcagcaccagcaccatgacagtgacccacaacagctctgtgaccagcgctgccagctctgtgaccatcaccaccaccatgcacagcgaggccaagaagggcagcaagtttgacaccggcagctttgtgggcggcatcgtgctgaccctgggcgtgctgagcatcctgtacatcggctgcaagatgtactacagccggcggggcatccgctaccgcaccattgatgaacatgatgccatcatctag

SEQ ID NO: 173995 - DNA, 627 bp, synthetic construct
  misc_feature 1..627: note = Description of Artificial Sequence: Synthetic coding sequence
  source 1..627: mol_type = other DNA
atgggcctgggcgcccggggggcctgggccgccctgctgctgggcaccctgcaggtgctggccctgctgggcgccgcccatgaatctgctgccatggccgccagcgccaacattgaaaattctggcctgccccacaacagcagcgccaacagcacagagaccctgcagcacgtgcccagcgaccacaccaatgagaccagcaacagcacagtgaagccacccacctctgtggccagtgacagcagcaacaccaccgtgaccaccatgaagcccacagctgccagcaacaccaccaccccaggcatggtgtccaccaacatgaccagcaccaccctgaagagcacccccaagaccacctctgtgtcccagaacaccagccagatcagcaccagcaccatgacagtgacccacaacagctctgtgaccagcgctgccagctctgtgaccatcaccaccaccatgcacagcgaggccaagaagggcagcaagtttgacaccggcagctttgtgggcggcatcgtgctgaccctgggcgtgctgagcatcctgtacatcggctgcaagatgtactacagcagaagaggcatccgctaccgcaccattgatgaacatgatgccatcatctag

SEQ ID NO: 173996 - DNA, 588 bp, synthetic construct
  misc_feature 1..588: note = Description of Artificial Sequence: Synthetic coding sequence
  source 1..588: mol_type = other DNA
atggagaaccacaagagcaacaacaaggagaacatcaccatcgtggacatcagcaggaagatcaaccagctgcctgaggccgagaggaacctgctggagaatggatctgtgtatgtgggcctgaatgctgccctgtgtggcctgattgccaacagcctcttccgccgcatcctgaatgtgaccaaggccagaattgctgctggcctgcccatggccggcatccccttcctgaccacagacctgacctaccgctgctttgtgtccttccccctgaacacaggagacctggactgtgagacctgcaccatcaccaggagcggcctgaccggcctggtgattggaggcctgtaccctgtgttcctggccatccctgtgaatggaggcctggccgcccgctaccagagcgccctgctgccccacaagggcaacatcctgagctactggatccgcaccagcaagcctgtgttcaggaagatgctgttccccatcctgctgcagaccatgttcagcgcctacctgggcagcgagcagtacaagctgctgatcaaggccctgcagctgtctgagcccgggaaggagatccactag

SEQ ID NO: 173997 - DNA, 378 bp, synthetic construct
  misc_feature 1..378: note = Description of Artificial Sequence: Synthetic coding sequence
  source 1..378: mol_type = other DNA
atggccggcatccccttcctgaccacagacctgacctaccgctgctttgtgtccttccccctgaacacaggagacctggactgtgagacctgcaccatcaccaggagcggcctgaccggcctggtgattggaggcctgtaccctgtgttcctggccatccctgtgaatggaggcctggccgcccgctaccagagcgccctgctgccccacaagggcaacatcctgagctactggatccgcaccagcaagcctgtgttcaggaagatgctgttccccatcctgctgcagaccatgttcagcgcctacctgggcagcgagcagtacaagctgctgatcaaggccctgcagctgtctgagcccgggaaggagatccactag

SEQ ID NO: 173998 - DNA, 489 bp, synthetic construct
  misc_feature 1..489: note = Description of Artificial Sequence: Synthetic coding sequence
  source 1..489: mol_type = other DNA
atgctgcagaccagcaactacagcctggtgctgagcctgcagttcctgctgctgtcctatgacctgtttgtgaacagcttcagcgagctgctgcagaagacccctgtgatccagctggtgctcttcatcatccaggacattgctgtgctcttcaacatcatcatcatcttcctgatgttcttcaacacctttgtgttccaggccggcctggtgaacctgctcttccacaagttcaagggcaccatcatcctgacagctgtgtactttgccctgagcatcagcctgcacgtgtgggtgatgaacctgcgctggaagaacagcaacagcttcatctggacagatggcctgcagatgctgtttgtgttccagaggctggccgctgtgctgtactgctacttctacaagaggacagctgtgcggctgggggacccccacttctaccaggacagcctgtggctgaggaaggagttcatgcaggtgagaagatag

SEQ ID NO: 173999 - DNA, 318 bp, synthetic construct
  misc_feature 1..318: note = Description of Artificial Sequence: Synthetic coding sequence
  source 1..318: mol_type = other DNA
atgctgcagaccagcaactacagcctggtgctgagcctgcagttcctgctgctgtcctatgacctgtttgtgaacagcttcagcgagctgctgcagaagacccctgtgatccagctggtgctcttcatcatccaggacattgctgtgctcttcaacatcatcatcatcttcctgatgttcttcaacacctttgtgttccaggccggcctggtgaacctgctcttccacaagttcaagggcaccatcatcctgacagctgtgtactttgccctgagcatcagcctgcacgtgtgggtgatggtgcgggtggccgtgtag

SEQ ID NO: 174000 - DNA, 1140 bp, synthetic construct
  misc_feature 1..1140: note = Description of Artificial Sequence: Synthetic coding sequence
  source 1..1140: mol_type = other DNA
atgccccacagcagcctgcaccccagcatcccctgcccccggggccacggggcccagaaggccgccctggtgctgctgagcgcctgcctggtgaccctgtggggcctgggggagcccccagagcacaccctgcgctacctggtgctgcacctggccagcctgcagctgggcctgctgctgaatggagtgtgcagcctggccgaggagctgcggcacatccacagccgctaccggggcagctactggaggacagtgcgggcctgcctgggctgccccctgcggcggggggccctgctgctgctgagcatctacttctactacagcctgcccaatgctgtgggcccccccttcacctggatgctggccctgctgggcctgagccaggccctgaacatcctgctgggcctgaagggcctggccccagctgagatctctgctgtgtgtgagaagggcaacttcaacgtggcccacggcctggcctggagctactacatcggctacctgcggctcatcctgcctgagctgcaggcccgcatccgcacctacaaccagcactacaacaacctgctgcggggagctgtgtcccagaggctgtacatcctgctgcccctggactgtggggtgcctgacaacctgtccatggctgaccccaacatccgcttcctggacaagctgccccagcagacaggagaccatgctggcatcaaggacagagtgtacagcaacagcatctatgagctgctggagaatggccagagagctggcacctgtgtgctggagtatgccacccccctgcagaccctgtttgccatgagccagtacagccaggccggcttcagccgggaggaccggctggagcaggccaagctgttctgcaggaccctggaggacatcctggctgatgcccctgagagccagaacaactgccgcctcatcgcctaccaggagccagcagatgacagcagcttcagcctgagccaggaggtgctgcggcacctgcggcaggaggagaaggaggaggtgacagtgggcagcctgaagaccagcgctgtgcccagcaccagcaccatgagccaggagcctgagctgctgatcagcggcatggagaagcccctgcccctgaggacagacttctcctag

SEQ ID NO: 174001 - DNA, 762 bp, synthetic construct
  misc_feature 1..762: note = Description of Artificial Sequence: Synthetic coding sequence
  source 1..762: mol_type = other DNA
atgccccacagcagcctgcaccccagcatcccctgcccccggggccacggggcccagaaggccgccctggtgctgctgagcgcctgcctggtgaccctgtggggcctgggggagcccccagagcacaccctgcgctacctggtgctgcacctggccagcctgcagctgggcctgctgctgaatggagtgtgcagcctggccgaggagctgcggcacatccacagccgctaccggggcagctactggaggacagtgcgggcctgcctgggctgccccctgcggcggggggccctgctgctgctgagcatctacttctactacagcctgcccaatgctgtgggcccccccttcacctggatgctggccctgctgggcctgagccaggccctgaacatcctgctgggcctgaagggcctggccccagctgagatctctgctgtgtgtgagaagggcaacttcaacgtggcccacggcctggcctggagctactacatcggctacctgcggctcatcctgcctgagctgcaggcccgcatccgcacctacaaccagcactacaacaacctgctgcggggagctgtgtcccagaggctgtacatcctgctgcccctggactgtggggtgcctgacaacctgtccatggctgaccccaacatccgcttcctggacaagctgccccagcagacaggagaccatgctggcatcaaggacagagtgtacagcaacagcatctatgagctgctggagaatggccagaggtag

SEQ ID NO: 174002 - DNA, 423 bp, synthetic construct
  misc_feature 1..423: note = Description of Artificial Sequence: Synthetic coding sequence
  source 1..423: mol_type = other DNA
atgcccagcgccttctctgtgtcctccttccctgtgtccatcccagctgtgctgacccagacagactggacagagccctggctgatgggcctggccaccttccacgccctgtgtgtgctgctgacctgcctgagcagccgcagctaccgcctgcagatcggccacttcctgtgcctggtgatcctggtgtactgtgccgagtacatcaatgaggccgccgccatgaactggaggctcttcagcaagtaccagtactttgacagccggggcatgttcatcagcatcgtgttcagcgcccccctgctggtgaatgccatgatcatcgtggtgatgtgggtgtggaagaccctgaatgtgatgacagacctgaagaatgcccaggagaggaggaaggagaagaagagaagaagaaaagaagattag

SEQ ID NO: 174003 - DNA, 384 bp, synthetic construct
  misc_feature 1..384: note = Description of Artificial Sequence: Synthetic coding sequence
  source 1..384: mol_type = other DNA
atgctgagcggctacctgcagacagactggacagagccctggctgatgggcctggccaccttccacgccctgtgtgtgctgctgacctgcctgagcagccgcagctaccgcctgcagatcggccacttcctgtgcctggtgatcctggtgtactgtgccgagtacatcaatgaagctgctgccatgaactggaggctcttcagcaagtaccagtactttgacagccggggcatgttcatcagcatcgtgttttctgcccccctgctggtgaatgccatgatcatcgtggtgatgtgggtgtggaagaccctgaatgtgatgacagacctgaagaatgcccaggagaggaggaaggagaagaagagaagaaggaaggaggactag

SEQ ID NO: 174004 - DNA, 1560 bp, synthetic construct
  misc_feature 1..1560: note = Description of Artificial Sequence: Synthetic coding sequence
  source 1..1560: mol_type = other DNA
ggccctgcccagagggccagcagccccatccccagcgctggaagaagagagggcgcccaggccgccacccagagggtggagcggcgggaccgggaccccggcggctgtgccgcctggacccccagcaccctgcccctgagccccaggtctgctgccagcagcagcacctgtgccggcggctgcggcaagaggacagccagcagcaggaggaccagccggcccagcaggatgacagccaccaccggccccaaggtgatccagaccagcgctgccaacttcagcctgaacaacagcaagaagctgaagcccatccagatcctgagcaaccccctgagcacctacaaccagcagctgtggctgacctgtgtggtggagctggaccagagcaaggagaccagcatcaagaccagcttccccatgacagtgaaggtggatggagtggcccaggacggcaccaccatgtacatccacaacaaggtgcacaacagaaccaggaccctgacctgtgccgggaaatgtgccgagatcatcgtggcccacctgggctacctgaactacacccagtacaccgtcatcgtgggctttgagcacctgaagctgcccatcaagggcatgaacttcacctggaagacctacaacccagccttcagccggctggagatctggttccgcttcttctttgtggtgctgaccttcatcgtgacctgcctgtttgcccacagcctgaggaagttctccatgagggactggggcatcgagcagaagtggatgtctgtgctgctgcccctgctgctgctgtacaatgaccccttcttccccctgtccttcctggtgaacagctggctgcccggcatgctggatgacctcttccagagcatgttcctgtgtgccctgctgctcttctggctgtgtgtgtaccacggcatccgggtgcagggcgagaggaagtgcctgaccttctacctgcccaagttcttcatcgtgggcctgctgtggctggcctctgtgaccctgggcatctggcagacagtgaatgagctgcatgaccccatgtaccagtacagagtggacaccggcaacttccagggcatgaaggtgttcttcatggtggtggccgctgtgtacatcctgtacctgctcttcctgattgtgcgggcctgcagcgagctgcggcacatgccctacgtggacctgcggctgaagttcctgacagccctgacctttgtggtgctggtgatcagcatcgccatcctgtacctgcgctttggagcccaggtgctgcaggacaactttgtggccgagctgagcacccactaccagaagccagctgagttcctgtccttctacggcctgctgaacttctacctgtacaccctggcctttgtgtacagccccagcaagaatgccctgtatgagagccagctgaaggacaacccagccttctccatgctgaatgacagtgatgatgatgtgatctacggcagtgactatgaggagatgcccctgcagaatggccaggccatccgggccaagtacaaggaggagagtgacagcgactag

SEQ ID NO: 174005 - DNA, 1839 bp, synthetic construct
  misc_feature 1..1839: note = Description of Artificial Sequence: Synthetic coding sequence
  source 1..1839: mol_type = other DNA
atgggcgccgcccccagccccacccaggccagcagccggggcggcggccctggccccccagcccccaccagggctgtgagcagcagcagccgggcccggggcggggccctgagcgccctgggccccagccctgcccggcccctgaccaccagccctgccccagcccccccacccaggagcaggcctgcccggcagcagcctgacccccagtgctgggagaagaggggcggggccggcggggacaccaagggcggcgctgctggccctggccctggccgcctgcggggcatggatgctgagtacccagcctttgagccccccctgtgcagcgagctgaagcacctgtgccggcggctgcgggaggcctaccgggagctgaaggaggacctgacccccttcaaggatgaccgctactaccgcctggcccccatgaggctgtacaccctgagcaagaggcactttgtgctggtgtttgtggtgttcttcatctgcttcggcctgaccatctttgtgggcatccggggccccaaggtgatccagaccagcgctgccaacttcagcctgaacaacagcaagaagctgaagcccatccagatcctgagcaaccccctgagcacctacaaccagcagctgtggctgacctgtgtggtggagctggaccagagcaaggagaccagcatcaagaccagcttccccatgacagtgaaggtggatggagtggcccaggacggcaccaccatgtacatccacaacaaggtgcacaacagaaccaggaccctgacctgtgccgggaaatgtgccgagatcatcgtggcccacctgggctacctgaactacacccagtacacagtgattgtgggctttgagcacctgaagctgcccatcaagggcatgaacttcacctggaagacctacaacccagccttcagccggctggagatctggttccgcttcttctttgtggtgctgaccttcatcgtgacctgcctgtttgcccacagcctgaggaagttctccatgagggactggggcatcgagcagaagtggatgtctgtgctgctgcccctgctgctgctgtacaatgaccccttcttccccctgtccttcctggtgaacagctggctgcccggcatgctggatgacctcttccagagcatgttcctgtgtgccctgctgctcttctggctgtgtgtgtaccacggcatccgggtgcagggcgagaggaagtgcctgaccttctacctgcccaagttcttcatcgtgggcctgctgtggctggcctctgtgaccctgggcatctggcagacagtgaatgagctgcatgaccccatgtaccagtacagagtggacaccggcaacttccagggcatgaaggtgttcttcatggtggtggccgctgtgtacatcctgtacctgctcttcctgattgtgcgggcctgcagcgagctgcggcacatgccctacgtggacctgcggctgaagttcctgacagccctgacctttgtggtgctggtgatcagcatcgccatcctgtacctgcgctttggagcccaggtgctgcaggacaactttgtggccgagctgagcacccactaccagaacagcgctgagttcctgtccttctacggcctgctgaacttctacctgtacaccctggcctttgtgtacagccccagcaagaatgccctgtatgagagccagctgaaggacaacccagccttctccatgctgaatgacagtgatgatgatgtgatctacggcagtgactatgaggagatgcccctgcagaatggccaggccatccgggccaagtacaaggaggagagtgacagcgactag

SEQ ID NO: 174006 - DNA, 1317 bp, synthetic construct
  misc_feature 1..1317: note = Description of Artificial Sequence: Synthetic coding sequence
  source 1..1317: mol_type = other DNA
atgccctgcacctgcacctggaggaactggaggcagtggatccggcccctggtggccgtcatctacctggtgtccatcgtggtggccgtgcccctgtgtgtgtgggagctgcagaagctggaggtgggcatccacaccaaggcctggttcatcgccggcatcttcctgctgctgaccatccccatcagcctgtgggtgatcctgcagcacctggtgcactacacccagcctgagctgcagaagcccatcatccgcatcctgtggatggtgcccatctacagcctggacagctggatcgccctgaagtacccaggcatcgccatctacgtggacacctgcagagaatgttatgaggcctacgtgatctacaacttcatgggcttcctgaccaactacctgaccaaccgctaccccaacctggtgctgatcctggaggccaaggaccagcagaagcacttcccccccctgtgctgctgccccccctgggccatgggagaggtgctgctcttccgctgcaagctgggcgtgctgcagtacacagtggtgcggcccttcaccaccatcgtggccctgatctgtgagctgctgggcatctatgatgagggcaacttctccttcagcaatgcctggacctacctggtgatcatcaacaacatgagccagctgtttgccatgtactgcctgctgctcttctacaaggtgctgaaggaggagctgagccccatccagcctgtgggcaagttcctgtgtgtgaagctggtggtgtttgtgtccttctggcaggccgtggtgattgccctgctggtgaaggtgggcgtcatcagcgagaagcacacctgggagtggcagacagtggaggccgtggccaccggcctgcaggacttcatcatctgcatcgagatgttcctggccgccatcgcccaccactacaccttctcctacaagccctacgtgcaggaggccgaggagggcagctgctttgacagcttcctggccatgtgggatgtgtctgacatcagagatgacatcagcgagcaggtgagacatgtgggccgcacagtgcggggccaccccaggaagaagctgtttcctgaggaccaggaccagaatgagcacaccagcctgctgagcagcagcagccaggatgccatcagcatcgccagctccatgccacccagccccatgggccactaccagggcttcggccacacagtgaccccccagaccacccccaccacagccaagatcagtgatgagatcctgagtgacaccatcggggagaagaaggagcccagcgacaagtctgtggacagctag

SEQ ID NO: 174007 - DNA, 4152 bp, synthetic construct
  misc_feature 1..4152: note = Description of Artificial Sequence: Synthetic coding sequence
  source 1..4152: mol_type = other DNA
atgtatgccacagacagccggggccacagccctgccttcctgcagccccagaatggaaacagccgccaccccagcggctacgtgcctgggaaggtggtgcccctgcggcccccacctccacccaagagccaggccagcgccaagttcaccagcatcagaagagaagatcgggccacctttgccttcagccctgaggagcagcaggcccagcgggagagccagaagcagaagaggcacaagaacaccttcatctgctttgccatcaccagcttctccttcttcatcgccctggccatcatcctgggcatcagcagcaaatatgccccagatgagaactgcccagaccagaacccccggctgaggaactgggaccccggccaggacagcgccaagcaggtggtgatcaaggagggggacatgctgcggctgaccagtgatgccaccgtgcacagcatcgtcatccaggacggcggcctgctggtgtttggagacaacaaggatggcagcaggaacatcaccctgcggacccactacatcctgatccaggatggaggagccctgcacatcggggctgagaagtgccgctacaagagcaaggccaccatcaccctgtatggcaagagtgatgaaggagagagcatgcccaccttcggcaagaagttcatcggcgtggaggccggcggcaccctggagctgcatggagccaggaaggcctcctggaccctgctggcccggaccctgaacagcagcggcctgcccttcggcagctacacctttgagaaggacttcagccggggcctgaatgtgcgggtcatcgaccaggacacagccaagatcctggagagcgagagatttgacacccatgagtacagaaatgaaagccggcggctgcaggagttcctgcgcttccaggaccccggcagaattgtggccatcgctgtgggggacagcgctgccaagagcctgctgcagggcaccatccagatgatccaggagcggctgggcagcgagctgatccagggcctgggctaccggcaggcctgggccctggtgggcgtgattgatggcggcagcaccagctgcaatgaatctgtgaggaactatgagaaccacagcagcggcggcaaggccctggcccagcgggagttctacacagtggatggccagaagttctctgtgacagcctacagcgagtggattgagggcgtgtccctgagcggcttccgggtggaggtggtggatggagtgaagctgaacctgctggatgatgtgtcctcctggaagccaggggaccagatcgtggtggccagcacagactacagcatgtaccaggccgaggagttcaccctgctgccctgcagtgaatgtagccacttccaggtgaaggtgaaggagaccccccagttcctgcacatgggagagatcattgatggagtggacatgagagctgaggtgggcatcctgaccaggaacatcgtcatccagggcgaggtggaggacagctgctacgccgagaaccagtgccagttctttgattatgacaccttcggcggccacatcatgatcatgaagaacttcacctctgtgcacctgtcctatgtggagctgaagcacatgggccagcagcagatgggccgctaccctgtgcacttccacctgtgtggagatgtggactacaagggcggctacagacatgccacctttgtggatggcctgagcatccaccacagcttcagccgctgcatcaccgtgcacggcaccaacggcctgctgatcaaggacaccatcggctttgacaccctgggccactgcttcttcctggaggatggcatcgagcagaggaacaccctcttccacaacctgggcctgctgaccaagccaggcaccctgctgcccacagacaggaacaacagcatgtgcaccaccatgagggacaaggtgtttggaaactacatccctgtgcctgccacagactgcatggctgtgtccaccttctggatcgcccaccccaacaacaacctgatcaacaatgctgctgctggcagccaggatgctggcatctggtacctgttccacaaggagcccaccggggagagcagcggcctgcagctgctggccaagccagagctgacccccctgggcatcttctacaacaacagagtgcacagcaacttcaaggccggcctcttcatcgacaagggcgtgaagaccaccaacagcagcgctgctgacccccgggagtacctgtgcctggacaacagcgcccgcttccggccccaccaggatgccaaccctgagaagccccgggtggccgccctgattgacaggctcatcgccttcaagaacaatgacaatggagcctgggtgcggggcggggacatcatcgtgcagaacagcgcctttgctgacaatggcatcggcctgacctttgccagtgatggcagcttccccagtgatgagggcagcagccaggaggtgtctgagagcctgtttgtgggggagagcaggaactacggcttccagggcggccagaacaagtatgtgggcaccggcggcatcgaccagaagcccaggaccctgcccaggaacagaaccttccccatccggggcttccagatctatgatggccccatccacctgaccaggagcaccttcaagaagtatgtgcccaccccagaccgctacagcagcgccatcggcttcctgatgaagaacagctggcagatcacccccaggaacaacatcagcctggtgaagtttggcccccacgtgtccctgaatgtgttcttcggcaagccaggcccctggtttgaggactgtgagatggatggagacaagaacagcatcttccatgacattgatggctctgtgacaggctacaaggatgcctacgtgggccgcatggacaactacctgatccgccaccccagctgtgtgaatgtgtccaagtggaatgctgtgatctgcagcggcacctacgcccaggtgtatgtgcagacctggagcacccagaacctgtccatgaccatcaccagagatgagtaccccagcaaccccatggtgctgcggggcatcaaccagaaggccgccttcccccagtaccagcctgtggtgatgctggagaagggctacaccatccactggaatggacctgcccccaggaccaccttcctgtacctggtgaacttcaacaagaatgactggatccgggtgggcctgtgctaccccagcaacaccagcttccaggtgaccttcggctacctgcagaggcagaatggcagcctgagcaagattgaggagtatgagcctgtgcacagcctggaggagctgcagaggaagcagagcgagaggaagttctactttgacagcagcacaggcctgctcttcctgtacctgaaggccaagagccacagacatggccacagctactgcagcagccagggctgtgagcgggtgaagatccaggccgccacagacagcaaggacatcagcaactgcatggccaaggcctacccccagtactacaggaagcccagcgtggtgaagaggatgcctgccatgctgaccggcctgtgccagggctgcggcacccggcaggtggtgttcaccagtgacccccacaagagctacctgcctgtgcagttccagagcccagacaaggccgagacccagagaggagaccccagcgtcatctctgtgaatggaacagacttcaccttccgctctgctggggtgctgctgctggtggtggacccctgcagcgtgcccttccggctgacagagaagacagtgttccccctggctgatgtgtccagaattgaggagtacctgaagacaggcatcccccccaggagcatcgtgctgctgagcaccagaggagagatcaagcagctgaacatcagccacctgctggtgcccctgggcctggccaagccagcccacctgtatgacaagggcagcaccatcttcctgggcttcagcggcaacttcaagcccagctggaccaagctgttcaccagccctgctggccagggcctgggcgtgctggagcagttcatccccctgcagctggatgaatatggctgcccccgggccaccaccgtgagaagaagagacctggagctgctgaagcaggccagcaaggcccactag

SEQ ID NO: 174008 - DNA, 3963 bp, synthetic construct
  misc_feature 1..3963: note = Description of Artificial Sequence: Synthetic coding sequence
  source 1..3963: mol_type = other DNA
atgtatgccacagacagccggggccacagccctgccttcctgcagccccagaatggaaacagccgccaccccagcggctacgtgcctgggaaggtggtgcccctgcggcccccacctccacccaagagccaggccagcgccaagttcaccagcatcagaagagaagatcgggccacctttgccttcagccctgaggagcagcaggcccagcgggagagccagaagcagaagaggcacaagaacaccttcatctgctttgccatcaccagcttctccttcttcatcgccctggccatcatcctgggcatcagcagcaaatatgccccagatgagaactgcccagaccagaacccccggctgaggaactgggaccccggccaggacagcgccaagcaggtggtgatcaaggagggggacatgctgcggctgaccagtgatgccaccgtgcacagcatcgtcatccaggacggcggcctgctggtgtttggagacaacaaggatggcagcaggaacatcaccctgcggacccactacatcctgatccaggatggaggagccctgcacatcggggctgagaagtgccgctacaagagcaaggccaccatcaccctgtatggcaagagtgatgaaggagagagcatgcccaccttcggcaagaagttcatcggcgtggaggccggcggcaccctggagctgcatggagccaggaaggcctcctggaccctgctggcccggaccctgaacagcagcggcctgcccttcggcagctacacctttgagaaggacttcagccggggcctgaatgtgcgggtcatcgaccaggacacagccaagatcctggagagcgagagatttgacacccatgagtacagaaatgaaagccggcggctgcaggagttcctgcgcttccaggaccccggcagaattgtggccatcgctgtgggggacagcgctgccaagagcctgctgcagggcaccatccagatgatccaggagcggctgggcagcgagctgatccagggcctgggctaccggcaggcctgggccctggtgggcgtgattgatggcggcagcaccagctgcaatgaatctgtgaggaactatgagaaccacagcagcggcggcaaggccctggcccagcgggagttctacacagtggatggccagaagttctctgtgacagcctacagcgagtggattgaggagaccccccagttcctgcacatgggagagatcattgatggagtggacatgagagctgaggtgggcatcctgaccagaaatattgtcatccagggcgaggtggaggacagctgctacgccgagaaccagtgccagttctttgattatgacacctttggaggccacatcatgatcatgaagaacttcacctctgtgcacctgtcctatgtggagctgaagcacatgggccagcagcagatgggccgctaccctgtgcacttccacctgtgtggagatgtggactacaagggcggctacagacatgccacctttgtggatggcctgagcatccaccacagcttcagccgctgcatcaccgtgcacggcaccaacggcctgctgatcaaggacaccatcggctttgacaccctgggccactgcttcttcctggaggatggcatcgagcagaggaacaccctcttccacaacctgggcctgctgaccaagccaggcaccctgctgcccacagacaggaacaacagcatgtgcaccaccatgagggacaaggtgtttggaaactacatccctgtgcctgccacagactgcatggctgtgtccaccttctggatcgcccaccccaacaacaacctgatcaacaatgctgctgctggcagccaggatgctggcatctggtacctgttccacaaggagcccactggagagagcagcggcctgcagctgctggccaagccagagctgacccccctgggcatcttctacaacaacagagtgcacagcaacttcaaggccggcctcttcatcgacaagggcgtgaagaccaccaacagcagcgctgctgacccccgggagtacctgtgcctggacaacagcgcccgcttccggccccaccaggatgccaaccctgagaagccccgggtggccgccctgattgaccggctgattgccttcaagaacaatgacaacggggcctgggtgcggggcggggacatcatcgtgcagaacagcgcctttgctgacaatggaattggcctgacctttgccagtgatggcagcttccccagtgatgagggcagcagccaggaggtgtctgagagcctgtttgtgggggagagcagaaattatggcttccagggcggccagaacaagtatgtgggcactggaggcatcgaccagaagcccaggaccctgcccaggaacagaaccttccccatccggggcttccagatctatgatggccccatccacctgaccaggagcaccttcaagaagtatgtgcccaccccagaccgctacagcagcgccatcggcttcctgatgaagaacagctggcagatcaccccaagaaacaacatcagcctggtgaagtttggcccccacgtgtccctgaatgtgttcttcggcaagccaggcccctggtttgaggactgtgagatggatggagacaagaacagcatcttccatgacattgatggctctgtgacaggctacaaggatgcctacgtgggccgcatggacaactacctgatccgccaccccagctgtgtgaatgtgtccaagtggaatgctgtgatctgcagcggcacctacgcccaggtgtatgtgcagacctggagcacccagaacctgtccatgaccatcaccagagatgagtaccccagcaaccccatggtgctgcggggcatcaaccagaaggccgccttcccccagtaccagcctgtggtgatgctggagaagggctacaccatccactggaatggacctgcccccaggaccaccttcctgtacctggtgaacttcaacaagaatgactggatccgggtgggcctgtgctaccccagcaacaccagcttccaggtgaccttcggctacctgcagaggcagaatggcagcctgagcaagattgaggagtatgagcctgtgcacagcctggaggagctgcagaggaagcagagcgagaggaagttctactttgacagcagcacaggcctgctcttcctgtacctgaaggccaagagccaccgccacggccacagctactgcagcagccagggctgtgagcgggtgaagatccaggccgccacagacagcaaggacatcagcaactgcatggccaaggcctacccccagtactacaggaagcccagcgtggtgaagaggatgcctgccatgctgaccggcctgtgccagggctgcggcacccggcaggtggtgttcaccagtgacccccacaagagctacctgcctgtgcagttccagagcccagacaaggccgagacccagagaggagaccccagcgtcatctctgtgaatggaacagacttcaccttccgctctgctggggtgctgctgctggtggtggacccctgcagcgtgcccttccggctgacagagaagacagtgttccccctggctgatgtgagccgcatcgaggagtacctgaagacaggcatccccccaagaagcatcgtgctgctgagcaccagaggagagatcaagcagctgaacatcagccacctgctggtgcccctgggcctggccaagccagcccacctgtatgacaagggcagcaccatcttcctgggcttcagcggcaacttcaagcccagctggaccaagctgttcaccagccctgctggccagggcctgggcgtgctggagcagttcatccccctgcagctggatgaatatggctgcccccgggccaccaccgtgagaagaagagacctggagctgctgaagcaggccagcaaggcccactag

SEQ ID NO: 174009 - DNA, 1131 bp, synthetic construct
  misc_feature 1..1131: note = Description of Artificial Sequence: Synthetic coding sequence
  source 1..1131: mol_type = other DNA
atgaccatcaccagagatgagtaccccagcaaccccatggtgctgcggggcatcaaccagaaggccgccttcccccagtaccagcctgtggtgatgctggagaagggctacaccatccactggaatggacctgcccccaggaccaccttcctgtacctggtgaacttcaacaagaatgactggatccgggtgggcctgtgctaccccagcaacaccagcttccaggtgaccttcggctacctgcagaggcagaatggcagcctgagcaagattgaggagtatgagcctgtgcacagcctggaggagctgcagaggaagcagagcgagaggaagttctactttgacagcagcacaggcctgctcttcctgtacctgaaggccaagagccaccgccacggccacagctactgcagcagccagggctgtgagcgggtgaagatccaggccgccacagacagcaaggacatcagcaactgcatggccaaggcctacccccagtactacaggaagcccagcgtggtgaagaggatgcctgccatgctgaccggcctgtgccagggctgcggcacccggcaggtggtgttcaccagtgacccccacaagagctacctgcctgtgcagttccagagcccagacaaggccgagacccagagaggagaccccagcgtcatctctgtgaatggaacagacttcaccttccgctctgctggggtgctgctgctggtggtggacccctgcagcgtgcccttccggctgacagagaagacagtgttccccctggctgatgtgagccgcatcgaggagtacctgaagacaggcatccccccaagaagcatcgtgctgctgagcaccagaggagagatcaagcagctgaacatcagccacctgctggtgcccctgggcctggccaagccagcccacctgtatgacaagggcagcaccatcttcctgggcttcagcggcaacttcaagcccagctggaccaagctgttcaccagccctgctggccagggcctgggcgtgctggagcagttcatccccctgcagctggatgaatatggctgcccccgggccaccaccgtgagaagaagagacctggagctgctgaagcaggccagcaaggcccactag

SEQ ID NO: 174010 - DNA, 57 bp, synthetic construct
  misc_feature 1..57: note = Description of Artificial Sequence: Synthetic coding sequence
  source 1..57: mol_type = other DNA
atgtatgccacagacagccggggccacagccctgccttcctgcagccccagaactag

SEQ ID NO: 174011 - DNA, 570 bp, synthetic construct
  misc_feature 1..570: note = Description of Artificial Sequence: Synthetic coding sequence
  source 1..570: mol_type = other DNA
atggaggagggcggcaacctgggcggcctcatcaagatggtgcacctgctggtgctgagcggggcctggggcatgcagatgtgggtgacctttgtgtctggcttcctgctcttccgcagcctgcccaggcacaccttcggcctggtgcagagcaagctgttccccttctacttccacatctccatgggctgtgccttcatcaacctgtgcatcctggccagccagcacgcctgggcccagctgaccttctgggaggccagccagctgtacctgctcttcctgagcctgaccctggccaccgtgaatgcccgctggctggagcccaggaccacagctgccatgtgggccctgcagacagtggagaaggagcggggcctgggcggggaggtgcccggcagccaccagggccctgacccctaccggcagctgcgggagaaggaccccaagtacagcgccctgcggcagaacttcttccgctaccacggcctgagcagcctgtgcaacctgggctgtgtgctgagcaatggcctgtgcctggccggcctggccctggagatccgcagcctgtag

SEQ ID NO: 174012 - DNA, 570 bp, synthetic construct; identical to SEQ ID NO: 174011
  misc_feature 1..570: note = Description of Artificial Sequence: Synthetic coding sequence
  source 1..570: mol_type = other DNA

SEQ ID NO: 174013 - DNA, 570 bp, synthetic construct; identical to SEQ ID NO: 174011
  misc_feature 1..570: note = Description of Artificial Sequence: Synthetic coding sequence
  source 1..570: mol_type = other DNA

SEQ ID NO: 174014 - DNA, 447 bp, synthetic construct
  misc_feature 1..447: note = Description of Artificial Sequence: Synthetic coding sequence
  source 1..447: mol_type = other DNA
atgctgccccggggcctgaagatggccccccggggcaagaggctgagcagcacccccctggagatcctcttcttcctgaatggctggtacaatgccacctacttcctgctggagctgttcatcttcctgtacaagggcgtgctgctgccctaccccacagccaacctggtgctggatgtggtgatgctgctgctgtacctgggcattgaagtcatccgcctcttcttcggcaccaagggcaacctgtgccagaggaagatgcccctgagcatctctgtggccctgaccttccccagcgccatgatggccagctactacctgctgctgcagacctacgtgctgcggctggaggccatcatgaatggcatcctgctcttcttctgtggcagcgagctgctgctggaggtgctgaccctggccgccttcagctccatggaccgcatctag

SEQ ID NO: 174015 - DNA, 438 bp, synthetic construct
  misc_feature 1..438: note = Description of Artificial Sequence: Synthetic coding sequence
  source 1..438: mol_type = other DNA
atgctgccccggggcctgaagatggccccccggggcaagaggctgagcagcacccccctggagatcctcttcttcctgaatggctggtacaatgccacctacttcctgctggagctgttcatcttcctgtacaagggcgtgctgctgccctaccccacagccaacctggtgctggatgtggtgatgctgctgctgtacctgggcattgaagtcatccgcctcttcttcggcaccaagggcaacctgtgccagaggaagatgcccctgagcatctctgtggccctgaccttccccagcgccatgatggccagctactacctgctgctgcagacctacgtgctgcggctggaggccatcatgaatggcatcctgctcttcttctgtggcagcgagctgctgctggaggtgctgaccctggccgccttcagccgcatctag

SEQ ID NO: 174016 - DNA, 942 bp, synthetic construct
  misc_feature 1..942: note = Description of Artificial Sequence: Synthetic coding sequence
  source 1..942: mol_type = other DNA
atgaggacagattctggggcccggctggaggagggccacctgcggcccccccgggccctgccccctgtgcccagcattgatgacatccccctgagccggcccaagaagaagaagacccagcctgctgagctgcagtatgccaatgagctgggcgtggaggatgaggacatcatcacagatgagcagaccaccgtggagcagcagagcgtcttcaccgcccccaccggcatcagccagcctgtgggcaaggtgtttgtggagaagagccgccgcttccaggccgctgacagaagtgagctgatcaagaccacagaaaatattgatgtgtccatggatgtgaagcccagctggaccaccagagatgtggccctgactgtgcaccgggccttcaggatgattggcctcttcagccacggcttcctggccggctgtgctgtgtggaacatcgtggtgatctacgtgctggccggggaccagctgagcaacctgagcaacctgctgcagcagtacaagaccctggcctaccccttccagagcctgctgtacctgctgctggccctgagcaccatcagcgcctttgacagaattgactttgccaagatctctgtggccatccggaacttcctggccctggaccccacagccctggccagcttcctgtacttcaccgccctgatcctgagcctgagccagcagatgaccagtgaccgcatccacctgtacacccccagctctgtgaatggcagcctgtgggaggccggcatcgaggagcagatcctgcagccctggatcgtggtgaacctggtggtggccctgctggtgggcctgtcctggctgttcctgagctacagacctggcatggacctgtctgaggagctgatgttcagcagcgaggtggaggagtacccagacaaggagaaggagatcaaggccagcagctag

SEQ ID NO: 174017 - DNA, 1203 bp, synthetic construct
  misc_feature 1..1203: note = Description of Artificial Sequence: Synthetic coding sequence
  source 1..1203: mol_type = other DNA
atgggcaagaaccctgtgcggcccccccgggccctgccccctgtgcccagccaggatgacatccccctgagccggcccaagaagaagaagcccaggaccaagaacaccccagccagcgccagcctggagggcctggcccagacagctggaagaagacccagcgagggcaatgagcccagcaccaaggagctgaaggagcaccctgaggcccctgtgcagaggcggcagaagaagacccggctgcccctggagctggagaccagcagcacccagaagaagagcagcagcagcagcctgctgagaaatgaaaatggaattgatgctgagcctgctgaggaggccgtcatccagaagcccaggaggaagaccaagaagacccagcctgctgagctgcagtatgccaatgagctgggcgtggaggatgaggacatcatcacagatgagcagaccaccgtggagcagcagagcgtcttcaccgcccccaccggcatcagccagcctgtgggcaaggtgtttgtggagaagagccgccgcttccaggccgctgacagaagtgagctgatcaagaccacagagaacattgatgtgtccatggatgtgaagcccagctggaccaccagagatgtggccctgactgtgcaccgggccttcaggatgattggcctcttcagccacggcttcctggccggctgtgctgtgtggaacatcgtggtgatctacgtgctggccggggaccagctgagcaacctgagcaacctgctgcagcagtacaagaccctggcctaccccttccagagcctgctgtacctgctgctggccctgagcaccatcagcgcctttgacagaattgactttgccaagatctctgtggccatccggaacttcctggccctggaccccacagccctggccagcttcctgtacttcaccgccctgatcctgagcctgagccagcagatgaccagtgaccgcatccacctgtacacccccagctctgtgaatggcagcctgtgggaggccggcatcgaggagcagatcctgcagccctggatcgtggtgaacctggtggtggccctgctggtgggcctgtcctggctgttcctgagctaccggcccggcatggacctgtctgaggagctgatgttcagcagcgaggtggaggagtacccagacaaggagaaggagatcaaggccagcagctag

SEQ ID NO: 174018 - DNA, 1227 bp, synthetic construct
  misc_feature 1..1227: note = Description of Artificial Sequence: Synthetic coding sequence
  source 1..1227: mol_type = other DNA
atgaggacagattctggggcccggctggaggagggccacctgcggcccccccgggccctgccccctgtgcccagccaggatgacatccccctgagccggcccaagaagaagaagcccaggaccaagaacaccccagccagcgccagcctggagggcctggcccagacagctggaagaagacccagcgagggcaatgagcccagcaccaaggagctgaaggagcaccctgaggcccctgtgcagaggcggcagaagaagacccggctgcccctggagctggagaccagcagcacccagaagaagagcagcagcagcagcctgctgagaaatgaaaatggaattgatgctgagcctgctgaggaggccgtcatccagaagcccaggaggaagaccaagaagacccagcctgctgagctgcagtatgccaatgagctgggcgtggaggatgaggacatcatcacagatgagcagaccaccgtggagcagcagagcgtcttcaccgcccccaccggcatcagccagcctgtgggcaaggtgtttgtggagaagagccgccgcttccaggccgctgacagaagtgagctgatcaagaccacagagaacattgatgtgtccatggatgtgaagcccagctggaccaccagagatgtggccctgactgtgcaccgggccttcaggatgattggcctcttcagccacggcttcctggccggctgtgctgtgtggaacatcgtggtgatctacgtgctggccggggaccagctgagcaacctgagcaacctgctgcagcagtacaagaccctggcctaccccttccagagcctgctgtacctgctgctggccctgagcaccatcagcgcctttgacagaattgactttgccaagatctctgtggccatccggaacttcctggccctggaccccacagccctggccagcttcctgtacttcaccgccctgatcctgagcctgagccagcagatgaccagtgaccgcatccacctgtacacccccagctctgtgaatggcagcctgtgggaggccggcatcgaggagcagatcctgcagccctggatcgtggtgaacctggtggtggccctgctggtgggcctgtcctggctgttcctgagctaccggcccggcatggacctgtctgaggagctgatgttcagcagcgaggtggaggagtacccagacaaggagaaggagatcaaggccagcagctag

SEQ ID NO: 174019 - DNA, 1293 bp, synthetic construct
  misc_feature 1..1293: note = Description of Artificial Sequence: Synthetic coding sequence
  source 1..1293: mol_type = other DNA
atgacccactgtgcctgtgcccgggaccggcgggagggctggggcgcccgctgcctgggcagaagaccacccaggcctgccaagaggaggatgggcaagaaccctgtgcggcccccccgggccctgccccctgtgcccagcattgatgacatccccctgagccggcccaagaagaagaagcccaggaccaagaacaccccagccagcgccagcctggagggcctggcccagacagctggaagaagacccagcgagggcaatgagcccagcaccaaggagctgaaggagcaccctgaggcccctgtgcagaggcggcagaagaagacccggctgcccctggagctggagaccagcagcacccagaagaagagcagcagcagcagcctgctgagaaatgaaaatggaattgatgctgagcctgctgaggaggccgtcatccagaagcccaggaggaagaccaagaagacccagcctgctgagctgcagtatgccaatgagctgggcgtggaggatgaggacatcatcacagatgagcagaccaccgtggagcagcagagcgtcttcaccgcccccaccggcatcagccagcctgtgggcaaggtgtttgtggagaagagccgccgcttccaggccgctgacagaagtgagctgatcaagaccacagagaacattgatgtgtccatggatgtgaagcccagctggaccaccagagatgtggccctgactgtgcaccgggccttcaggatgattggcctcttcagccacggcttcctggccggctgtgctgtgtggaacatcgtggtgatctacgtgctggccggggaccagctgagcaacctgagcaacctgctgcagcagtacaagaccctggcctaccccttccagagcctgctgtacctgctgctggccctgagcaccatcagcgcctttgacagaattgactttgccaagatctctgtggccatccggaacttcctggccctggaccccacagccctggccagcttcctgtacttcaccgccctgatcctgagcctgagccagcagatgaccagtgaccgcatccacctgtacacccccagctctgtgaatggcagcctgtgggaggccggcatcgaggagcagatcctgcagccctggatcgtggtgaacctggtggtggccctgctggtgggcctgtcctggctgttcctgagctaccggcccggcatggacctgtctgaggagctgatgttcagcagcgaggtggaggagtacccagacaaggagaaggagatcaaggccagcagctag

SEQ ID NO: 174020 - DNA, 1227 bp, synthetic construct
  misc_feature 1..1227: note = Description of Artificial Sequence: Synthetic coding sequence
  source 1..1227: mol_type = other DNA
atgaggacagattctggggcccggctggaggagggccacctgcggcccccccgggccctgccccctgtgcccagcattgatgacatccccctgagccggcccaagaagaagaagcccaggaccaagaacaccccagccagcgccagcctggagggcctggcccagacagctggaagaagacccagcgagggcaatgagcccagcaccaaggagctgaaggagcaccctgaggcccctgtgcagaggcggcagaagaagacccggctgcccctggagctggagaccagcagcacccagaagaagagcagcagcagcagcctgctgagaaatgaaaatggaattgatgctgagcctgctgaggaggccgtcatccagaagcccaggaggaagaccaagaagacccagcctgctgagctgcagtatgccaatgagctgggcgtggaggatgaggacatcatcacagatgagcagaccaccgtggagcagcagagcgtcttcaccgcccccaccggcatcagccagcctgtgggcaaggtgtttgtggagaagagccgccgcttccaggccgctgacagaagtgagctgatcaagaccacagagaacattgatgtgtccatggatgtgaagcccagctggaccaccagagatgtggccctgactgtgcaccgggccttcaggatgattggcctcttcagccacggcttcctggccggctgtgctgtgtggaacatcgtggtgatctacgtgctggccggggaccagctgagcaacctgagcaacctgctgcagcagtacaagaccctggcctaccccttccagagcctgctgtacctgctgctggccctgagcaccatcagcgcctttgacagaattgactttgccaagatctctgtggccatccggaacttcctggccctggaccccacagccctggccagcttcctgtacttcaccgccctgatcctgagcctgagccagcagatgaccagtgaccgcatccacctgtacacccccagctctgtgaatggcagcctgtgggaggccggcatcgaggagcagatcctgcagccctggatcgtggtgaacctggtggtggccctgctggtgggcctgtcctggctgttcctgagctaccggcccggcatggacctgtctgaggagctgatgttcagcagcgaggtggaggagtacccagacaaggagaaggagatcaaggccagcagctag

SEQ ID NO: 174021 - DNA, 1101 bp, synthetic construct
  misc_feature 1..1101: note = Description of Artificial Sequence: Synthetic coding sequence
  source 1..1101: mol_type = other DNA
atggccctgcccccaggccctgctgccctgcggcacaccctgctgctgctgcctgccctgctgagcagcggctggggcgagctggagccccagattgatggccagacctgggccgagcgggccctgcgggagaatgaaagacatgccttcacctgccgggtggccggcggccctggcaccccccggctggcctggtacctggatggccagctgcaggaggccagcaccagccggctgctgtctgtgggcggggaggccttcagcggcggcaccagcaccttcaccgtgacagcccaccgggcccagcacgagctgaactgcagcctgcaggaccccaggagcggccgcagcgccaatgccagcgtcatcctgaatgtgcagttcaagccagagatcgcccaggtgggcgccaagtaccaggaggcccagggccctggcctgctggtggtgctgtttgccctggtgcgggccaaccccccagccaacgtgacctggattgaccaggacggccctgtgacagtgaacaccagtgacttcctggtgctggatgcccagaactacccctggctgaccaaccacacagtgcagctgcagctgcggagcctggcccacaacctgtctgtggtggccaccaatgatgtgggcgtgaccagcgccagcctgcctgcccctggcctgctggccaccagggtggaggtgcccctgctgggcatcgtggtggccgccggcctggccctgggcaccctggtgggcttcagcaccctggtggcctgcctggtgtgcaggaaggagaagaagaccaagggccccagccgccaccccagcctcatcagcagtgacagcaacaacctgaagctgaacaacgtgcggctgccccgggagaacatgagcctgcccagcaacctgcagctgaatgacctgaccccagacagcagagctgtgaagccagctgaccggcagatggcccagaacaacagcaggcctgagctgctggaccctgagcccggcggcctgctgaccagccagggcttcatccggctgcctgtgctgggctacatctacagagtgtcctctgtgtccagtgatgagatctggctgtag

SEQ ID NO: 174022 - DNA, 657 bp, synthetic construct
  misc_feature 1..657: note = Description of Artificial Sequence: Synthetic coding sequence
  source 1..657: mol_type = other DNA
atggccctgcccccaggccctgctgccctgcggcacaccctgctgctgctgcctgccctgctgagctctgtgaagccagagatcgcccaggtgggcgccaagtaccaggaggcccagggccctggcctgctggtggtgctgtttgccctggtgcgggccaaccccccagccaacgtgacctggattgaccaggacggccctgtgacagtgaacaccagtgacttcctggtgctggatgcccagaactacccctggctgaccaaccacacagtgcagctgcagctgcggagcctggcccacaacctgtctgtggtggccaccaatgatgtgggcgtgaccagcgccagcctgcctgcccctggccccagccgccaccccagcctcatcagcagtgacagcaacaacctgaagctgaacaacgtgcggctgccccgggagaacatgagcctgcccagcaacctgcagctgaatgacctgaccccagacagcagagctgtgaagccagctgaccggcagatggcccagaacaacagcaggcctgagctgctggaccctgagcccggcggcctgctgaccagccagggcttcatccggctgcctgtgctgggctacatctacagagtgtcctctgtgtccagtgatgagatctggctgtag

SEQ ID NO: 174023 - DNA, 1056 bp, synthetic construct
  misc_feature 1..1056: note = Description of Artificial Sequence: Synthetic coding sequence
  source 1..1056: mol_type = other DNA
atggccctgcccccaggccctgctgccctgcggcacaccctgctgctgctgcctgccctgctgagcagcggctggggcgagctggagccccagattgatggccagacctgggccgagcgggccctgcgggagaatgaaagacatgccttcacctgccgggtggccggcggccctggcaccccccggctggcctggtacctggatggccagctgcaggaggccagcaccagccggctgctgtctgtgggcggggaggccttcagcggcggcaccagcaccttcaccgtgacagcccaccgggcccagcacgagctgaactgcagcctgcaggaccccaggagcggccgcagcgccaatgccagcgtcatcctgaatgtgcagttcaagccagagatcgcccaggtgggcgccaagtaccaggaggcccagggccctggcctgctggtggtgctgtttgccctggtgcgggccaaccccccagccaacgtgacctggattgaccaggacggccctgtgacagtgaacaccagtgacttcctggtgctggatgcccagaactacccctggctgaccaaccacacagtgcagctgcagctgcggagcctggcccacaacctgtctgtggtggccaccaatgatgtgggcgtgaccagcgccagcctgcctgcccctggcctgctggccaccagggtggaggtgcccctgctgggcatcgtggtggccgccggcctggccctgggcaccctggtgggcttcagcaccctggtggcctgcctggtgtgcaggaaggagaagaagaccaagggccccagccgccaccccagcctcatcagcagtgacagcaacaacctgaagctgaacaacgtgcggctgccccgggagaacatgagcctgcccagcaacctgcagctgaatgacctgaccccagacagcagagctgtgaagccagctgaccggcagatggcccagaacaacagcaggcctgagctgctggaccctgagcccggcggcctgctgaccagccagggcagaagaaaccaggacaaggatgcctag

SEQ ID NO: 174024 - DNA, 969 bp, synthetic construct
  misc_feature 1..969: note = Description of Artificial Sequence: Synthetic coding sequence
  source 1..969: mol_type = other DNA
atggccctgcccccaggccctgctgccctgcggcacaccctgctgctgctgcctgccctgctgagcagcggctggggcgagctggagccccagattgatggccagacctgggccgagcgggccctgcgggagaatgaaagacatgccttcacctgccgggtggccggcggccctggcaccccccggctggcctggtacctggatggccagctgcaggaggccagcaccagccggctgctgtctgtgggcggggaggccttcagcggcggcaccagcaccttcaccgtgacagcccaccgggcccagcacgagctgaactgcagcctgcaggaccccaggagcggccgcagcgccaatgccagcgtcatcctgaatgtgcagttcaagccagagatcgcccaggtgggcgccaagtaccaggaggcccagggccctggcctgctggtggtgctgtttgccctggtgcgggccaaccccccagccaacgtgacctggattgaccaggacggccctgtgacagtgaacaccagtgacttcctggtgctggatgcccagaactacccctggctgaccaaccacacagtgcagctgcagctgcggagcctggcccacaacctgtctgtggtggccaccaatgatgtgggcgtgaccagcgccagcctgcctgcccctggccccagccgccaccccagcctcatcagcagtgacagcaacaacctgaagctgaacaacgtgcggctgccccgggagaacatgagcctgcccagcaacctgcagctgaatgacctgaccccagacagcagagctgtgaagccagctgaccggcagatggcccagaacaacagcaggcctgagctgctggaccctgagcccggcggcctgctgaccagccagggcttcatccggctgcctgtgctgggctacatctacagagtgtcctctgtgtccagtgatgagatctggctgtag

SEQ ID NO: 174025 - DNA, 969 bp, synthetic construct; identical to SEQ ID NO: 174024
  misc_feature 1..969: note = Description of Artificial Sequence: Synthetic coding sequence
  source 1..969: mol_type = other DNA

SEQ ID NO: 174026 - DNA, 921 bp, synthetic construct
  misc_feature 1..921: note = Description of Artificial Sequence: Synthetic coding sequence
  source 1..921: mol_type = other DNA
atggccctgcccccaggccctgctgccctgcggcacaccctgctgctgctgcctgccctgctgagcagcggctggggcgagctggagccccagattgatggccagacctgggccgagcgggccctgcgggagaatgaaagacatgccttcacctgccgggtggccggcggccctggcaccccccggctggcctggtacctggatggccagctgcaggaggccagcaccagccggctgctgtctgtgggcggggaggccttcagcggcggcaccagcaccttcaccgtgacagcccaccgggcccagcacgagctgaactgcagcctgcaggaccccaggagcggccgcagcgccaatgccagcgtcatcctgaatgtgcagttcaagccagagatcgcccaggtgggcgccaagtaccaggaggcccagggccctggcctgctggtggtgctgtttgccctggtgcgggccaaccccccagccaacgtgacctggattgaccaggacggccctgtgacagtgaacaccagtgacttcctggtgctggatgcccagaactacccctggctgaccaaccacacagtgcagctgcagctgcggagcctggcccacaacctgtctgtggtggccaccaatgatgtgggcgtgaccagcgccagcctgcctgcccctggccccagccgccaccccagcctcatcagcagtgacagcaacaacctgaagctgaacaacgtgcggctgccccgggagaacatgagcctgcccagcaacctgcagctgaatgacctgaccccagacagccgggtgaagccagctgaccggcagatggcccagaacaacagcaggcctgagctgctggaccctgagcccggcggcctgctgaccagccagggcagaagaaaccaggacaaggatgcctag

SEQ ID NO: 174027 - DNA, 1146 bp, synthetic construct
  misc_feature 1..1146: note = Description of Artificial Sequence: Synthetic coding sequence
  source 1..1146: mol_type = other DNA
atggccctgcccccaggccctgctgccctgcggcacaccctgctgctgctgcctgccctgctgagcagcggctggggcgagctggagccccagattgatggccagacctgggccgagcgggccctgcgggagaatgaaagacatgccttcacctgccgggtggccggcggccctggcaccccccggctggcctggtacctggatggccagctgcaggaggccagcaccagccggctgctgtctgtgggcggggaggccttcagcggcggcaccagcaccttcaccgtgacagcccaccgggcccagcacgagctgaactgcagcctgcaggaccccaggagcggccgcagcgccaatgccagcgtcatcctgaatgtgcagttcaagccagagatcgcccaggtgggcgccaagtaccaggaggcccagggccctggcctgctggtggtgctgtttgccctggtgcgggccaaccccccagccaacgtgacctggattgaccaggacggccctgtgacagtgaacaccagtgacttcctggtgctggatgcccagaactacccctggctgaccaaccacacagtgcagctgcagctgcggagcctggcccacaacctgtctgtggtggccaccaatgatgtgggcgtgaccagcgccagcctgcctgcccctggcctgctggccaccagggtggaggtgcccctgctgggcatcgtggtggccgccggcctggccctgggcaccctggtgggcttcagcaccctggtggcctgcctggtgtgcaggaaggagaagaagaccaagggccccagccgccaccccagcctcatcagcagtgacagcaacaacctgaagctgaacaacgtgcggctgccccgggagaacatgagcctgcccagcaacctgcagctgaatgacctgaccccagacagccgggtgaagccagctgaccggcagatggcccagaacaacagcaggcctgagctgctggaccctgagcccggcggcctgctgaccagccaggcctgcctgctgcaccacggcaccccagccctgaccaacccctggctgccccaccagcaggagggcgccctgcccggcggctggagcccccaggcccacaacagcacagtgtggaagctgtag

SEQ ID NO: 174028 - DNA, 810 bp, synthetic construct
  misc_feature 1..810: note = Description of Artificial Sequence: Synthetic coding sequence
  source 1..810: mol_type = other DNA
atggccctgcccccaggccctgctgccctgcggcacaccctgctgctgctgcctgccctgctgagcagcggctggggcgagctggagccccagattgatggccagacctgggccgagcgggccctgcgggagaatgaaagacatgccttcacctgccgggtggccggcggccctggcaccccccggctggcctggtacctggatggccagctgcaggaggccagcaccagccggctgctgtctgtgggcggggaggccttcagcggcggcaccagcaccttcaccgtgacagcccaccgggcccagcacgagctgaactgcagcctgcaggaccccaggagcggccgcagcgccaatgccagcgtcatcctgaatgtgcagtggctgctggccaccagggtggaggtgcccctgctgggcatcgtggtggccgccggcctggccctgggcaccctggtgggcttcagcaccctggtggcctgcctggtgtgcaggaaggagaagaagaccaagggccccagccgccaccccagcctcatcagcagtgacagcaacaacctgaagctgaacaacgtgcggctgccccgggagaacatgagcctgcccagcaacctgcagctgaatgacctgaccccagacagcagagctgtgaagccagctgaccggcagatggcccagaacaacagcaggcctgagctgctggaccctgagcccggcggcctgctgaccagccagggcttcatccggctgcctgtgctgggctacatctacagagtgtcctctgtgtccagtgatgagatctggctgtag

SEQ ID NO: 174029 - DNA, 669 bp, synthetic construct
  misc_feature 1..669: note = Description of Artificial Sequence: Synthetic coding sequence
  source 1..669: mol_type = other DNA
atgctgtggctgctcttcttcctggtgacagccatccacgccgagctgtgccagcctggagcagaaaatgccttcaaggtgcggctgagcatcagaacagccctgggggacaaggcctatgcctgggacaccaatgaggagtacctgttcaaggccatggtggccttctccatgaggaaggtgcccaaccgggaggccacagagatcagccacgtgctgctgtgcaatgtgacccagagggtgtccttctggtttgtggtgacagaccccagcaagaaccacaccctgcctgctgtggaggtgcagagcgccatccgcatgaacaagaaccgcatcaacaatgccttcttcctgaatgaccagaccctggagttcctgaagatccccagcaccctggccccacccatggaccccagcgtgcccatctggatcatcatctttggagtcatcttctgcatcatcatcgtggccatcgccctgctgatcctgagcggcatctggcagaggaggaggaagaacaaggagcccagcgaggtggatgatgctgaagataaatgtgagaacatgatcaccattgaaaatggcatccccagcgaccccctggacatgaagggcggccacatcaatgatgccttcatgacagaagatgagcggctgacccccctgtag

SEQ ID NO: 174030 - DNA, 252 bp, synthetic construct
  misc_feature 1..252: note = Description of Artificial Sequence: Synthetic coding sequence
  source 1..252: mol_type = other DNA
atgctgaggaacctgctggccctgcggcagatcggccagaggaccatcagcacagccagcagaagacacttcaagaacaaggtgcctgagaagcagaagctgttccaggaggatgatgagatccccctgtacctgaagggcggcgtggctgatgccctgctgtaccgggccaccatgatcctgactgtgggcggcacagcctatgccatctatgagctggccgtggccagcttccccaagaagcaggagtag

SEQ ID NO: 174031 - DNA, 729 bp, synthetic construct
  misc_feature 1..729: note = Description of Artificial Sequence: Synthetic coding sequence
  source 1..729: mol_type = other DNA
atgtactacggcctgagcaacttctaccagaaccacagaagatatgtgaagagcagagatgacagccagctgaatggagacagcagcgccctgctgaaccccagcaaagaatgtgagccctacagaagaaatgaagacaagcccatcgccccctgtggggccatcgccaacagcatgtttaatgacaccctggagctgttcctgattggaaatgacagctaccccatccccatcgccctgaagaagaagggcatcgcctggtggacagacaagaatgtgaagttcaggaaccccccaggaggagacaacctggaggagcgcttcaagggcaccaccaagcctgtgaactggctgaagcctgtgtacatgctggacagcgaccctgacaacaacggcttcatcaatgaagacttcatcgtgtggatgaggacagctgccctgcccaccttcaggaagctgtaccgcctgattgaaaggaagagtgacctgcaccccaccctgcctgctggccgctacagcctgaatgtgacctacaactaccctgtgcactactttgatggcaggaagaggatgatcctgagcaccatctcctggatgggcggcaagaaccccttcctgggcatcgcctacatcgctgtgggcagcatctccttcctgctgggcgtggtgctgctggtgatcaaccacaagtacagaaacagcagcaacacagctgacatcaccatctag

SEQ ID NO: 174032 - DNA, 978 bp, synthetic construct
  misc_feature 1..978: note = Description of Artificial Sequence: Synthetic coding sequence
  source 1..978: mol_type = other DNA
atggccatgaactacaatgccaaggatgaggtggatggcggccccccctgtgcccctgggggcacagccaagacccggcggccagacaacacagccttcaagcagcagaggctgcctgcctggcagcccatcctgacagctggcaccgtgctgcccatcttcttcatcatcggcctcatcttcatccccatcggcatcggcatctttgtgaccagcaacaacatccgggagattgagggcaatgtgttcatgtactacggcctgagcaacttctaccagaaccaccggcgctacgtgaagagcagagatgacagccagctgaatggagacagcagcgccctgctgaaccccagcaaagaatgtgagccctacagaagaaatgaagacaagcccatcgccccctgtggggccatcgccaacagcatgtttaatgacaccctggagctgttcctgattggaaatgacagctaccccatccccatcgccctgaagaagaagggcatcgcctggtggacagacaagaatgtgaagttcagaaatcctcctggaggagacaacctggaggagcgcttcaagggcaccaccaagcctgtgaactggctgaagcctgtgtacatgctggacagcgaccctgacaacaacggcttcatcaatgaagacttcatcgtgtggatgaggacagctgccctgcccaccttcaggaagctgtaccgcctcatcgagaggaagagtgacctgcaccccaccctgcctgctggccgctacagcctgaatgtgacctacaactaccctgtgcactactttgatggcaggaagaggatgatcctgagcaccatctcctggatgggcggcaagaaccccttcctgggcatcgcctacatcgctgtgggcagcatctccttcctgctgggcgtggtgctgctggtgatcaaccacaagtacagaaacagcagcaacacagctgacatcaccatctag

SEQ ID NO: 174033 - DNA, 234 bp, synthetic construct
  misc_feature 1..234: note = Description of Artificial Sequence: Synthetic coding sequence
  source 1..234: mol_type = other DNA
atgtactacggcctgagcaacttctaccagaaccacagaagatatgtgaagagcagagatgacagccagctgaatggagacagcagcgccctgctgaaccccagcaaagaatgtgagccctacagaagaaatgaagacaagcccatcgccccctgtggggccatcgccaacagcatgtttaatgacaccctggagctgttcctgattggaaatgacagctaccccatcccctag

SEQ ID NO: 174034 - DNA, 1038 bp, synthetic construct
  misc_feature 1..1038: note = Description of Artificial Sequence: Synthetic coding sequence
  source 1..1038: mol_type = other DNA
atggccatgaactacacagccaagacccggcggccagacaacacagccttcaagcagcagaggctgcctgcctggcagcccatcctgacagctggcaccgtgctgcccatcttcttcatcatcggcctcatcttcatccccatcggcatcggcatctttgtgaccagcaacaacatccgggagattgaaattgactacacaggaacagagcccagcagcccctgcaacaagtgcctgagcccagatgtgaccccctgcttctgcaccatcaacttcaccctggagaagagctttgagggcaatgtgttcatgtactacggcctgagcaacttctaccagaaccaccggcgctacgtgaagagcagagatgacagccagctgaatggagacagcagcgccctgctgaaccccagcaaagaatgtgagccctacagaagaaatgaagacaagcccatcgccccctgtggggccatcgccaacagcatgtttaatgacaccctggagctgttcctgattggaaatgacagctaccccatccccatcgccctgaagaagaagggcatcgcctggtggacagacaagaatgtgaagttcagaaatcctcctggaggagacaacctggaggagcgcttcaagggcaccaccaagcctgtgaactggctgaagcctgtgtacatgctggacagcgaccctgacaacaacggcttcatcaatgaagacttcatcgtgtggatgaggacagctgccctgcccaccttcaggaagctgtaccgcctcatcgagaggaagagtgacctgcaccccaccctgcctgctggccgctacagcctgaatgtgacctacaactaccctgtgcactactttgatggcaggaagaggatgatcctgagcaccatctcctggatgggcggcaagaaccccttcctgggcatcgcctacatcgctgtgggcagcatctccttcctgctgggcgtggtgctgctggtgatcaaccacaagtacagaaacagcagcaacacagctgacatcaccatctag

SEQ ID NO: 174035 - DNA, 1056 bp, synthetic construct
  misc_feature 1..1056: note = Description of Artificial Sequence: Synthetic coding sequence
  source 1..1056: mol_type = other DNA
atgacctggagcgccacagcccggggggcccaccagcctgacaacacagccttcacccagcagaggctgcctgcctggcagcccctgctgagcgccagcatcgccctgcccctcttcttctgtgccggcctggccttcatcggcctgggcctgggcctgtactacagcagcaatggcatcaaggagctggagtatgactacaccggggaccccggcactggaaactgcagcgtgtgtgccgccgccggccagggccgggccctgcccccaccctgcagctgtgcctggtacttcagcctgcctgagctgttccagggccctgtgtacctgtactatgagctgaccaacttctaccagaacaacagaagatatggagtgtccagagatgatgcccagctgagcggcctgcccagcgccctgcggcaccctgtgaatgaatgtgccccctaccagaggtctgctgctggcctgcccatcgccccctgtggggccatcgccaacagcctcttcaatgacagcttcagcctgtggcaccagaggcagcccggcggcccctacgtggaggtgcccctggacaggagcggcatcgcctggtggacagactaccacgtgaagttcagaaatccacccctggtgaatggcagcctggccctggccttccagggcacagcccccccacccaactggaggaggcctgtgtatgagctgagcccagaccccaacaacacaggcttcatcaaccaggactttgtggtgtggatgaggacagctgccctgcccaccttcaggaagctgtatgcccgcatccggcagggcaactacagcgctggcctgcccaggggggcctacagagtgaacatcacctacaactaccctgtgcgggccttcggcggccacaagctgctgatcttcagcagcatctcctggatgggcggcaagaaccccttcctgggcatcgcctacctggtggtgggcagcctgtgcatcctgactggatttgtgatgctggtggtgtacatccgctaccaggaccaggatgatgatgatgaggagtag

SEQ ID NO: 174036 - DNA, 1056 bp, synthetic construct; identical to SEQ ID NO: 174035
  misc_feature 1..1056: note = Description of Artificial Sequence: Synthetic coding sequence
  source 1..1056: mol_type = other DNA

SEQ ID NO: 174037 - DNA, 342 bp, synthetic construct
  misc_feature 1..342: note = Description of Artificial Sequence: Synthetic coding sequence
  source 1..342: mol_type = other DNA
atggaggagcgggcccagcactgcctgagccggctgctggacaacagcgccctgaagcagcaggagctgcccatccaccggctgtacttcaccgccaggagagtgctgtttgtgttctttgccaccggcatcttctgcctgtgcatgggcatcatcctgatcctgagcgcccggagcacccaggagattgagatcaactacacccgcatctgtgccaactgtgccaagctgagagaaaatgccagcaactttgacaaggaatgtacctgcagcatccccttctacctgagcggcaagatgatggtgggggagatccaggagacccggctgaccctgcactag

SEQ ID NO: 174038 - DNA, 207 bp, synthetic construct
  misc_feature 1..207: note = Description of Artificial Sequence: Synthetic coding sequence
  source 1..207: mol_type = other DNA
tgactgtgcatgggcatcatcctgatcctgagcgcccggagcacccaggagattgagatcaactacacccgcatctgtgccaactgtgccaagctgcgggagaatgccagcaactttgacaaggagtgcacctgcagcatccccttctacctgagcggcaagatgatggtgggggagatccaggagacccggctgaccctgcactag

SEQ ID NO: 174039 - DNA, 1203 bp, synthetic construct
  misc_feature 1..1203: note = Description of Artificial Sequence: Synthetic coding sequence
  source 1..1203: mol_type = other DNA
atggccgccaactacagcagcaccagcacccggcgggagcacgtgaaggtgaagaccagcagccagcccggcttcctggagcggctgtctgagaccagcggcggcatgtttgtgggcctgatggccttcctgctgtccttctacctgatcttcaccaatgaaggccgggccctgaagacagccaccagcctggccgagggcctgagcctggtggtgtccccagacagcatccacagcgtggccccagaaaatgaaggccgcctggtgcacatcatcggggccctgcggaccagcaagctgctgagtgaccccaactacggcgtgcacctgcctgctgtgaagctgcggcggcacgtggagatgtaccagtgggtggagacagaggagagccgggagtacacagaagatggccaggtgaagaaggagacccgctacagctacaacacagagtggaggtctgagatcatcaacagcaagaactttgaccgggagatcggccacaagaaccccagcgccatggctgtggagagcttcatggccacagccccctttgtgcagatcggccgcttcttcctgagcagcggcctgattgacaaggtggacaacttcaagagcctgagcctgagcaagctggaggacccccacgtggacatcatccggcggggggacttcttctaccacagcgagaaccccaagtacccagaggtgggggacctgcgggtgtccttctcctatgccggcctgtctggagatgatcctgacctgggccctgcccacgtggtgaccgtcatcgcccggcagagaggagaccagctggtgcccttcagcaccaagagcggggacaccctgctgctgctgcaccacggggacttctctgctgaggaggtgttccaccgggagctgcggagcaacagcatgaagacctggggcctgcgggccgccggctggatggccatgttcatgggcctgaacctgatgacccgcatcctgtacaccctggtggactggttccctgtgttccgggacctggtgaacatcggcctgaaggcctttgccttctgtgtggccaccagcctgaccctgctgactgtggccgccggctggctgttctaccggcccctgtgggccctgctgattgctggcctggccctggtgcccatcctggtggcccggaccagggtgcctgccaagaagctggagtag

SEQ ID NO: 174040 - DNA, 546 bp, synthetic construct
  misc_feature 1..546: note = Description of Artificial Sequence: Synthetic coding sequence
  source 1..546: mol_type = other DNA
atggccagcgctggcagcggcatggaggaggtgcgggtgtctgtgctgacccccctgaagctggtgggcctggtgtgcatcttcctggccctgtgcctggacctgggcgctgtgctgagccctgcctgggtgacagctgaccaccagtactacctgagcctgtgggagagctgcaggaagccagccagcctggacatctggcactgtgagagcaccctgagcagtgactggcagatcgccaccctggccctgctgctgggcggggccgccatcatcctgattgccttcctggtgggcctcatcagcatctgtgtgggcagcagaagacgcttctacagacctgtggccgtgatgctgtttgctgctgtggtgctgcaggtgtgcagcctggtgctgtaccccatcaagttcatcgagaccgtgtccctgaagatctaccacgagttcaactggggctacggcctggcctggggcgccaccatcttctcctttggaggagccatcctgtactgcctgaaccccaagaactatgaggactactactag

SEQ ID NO: 174041 - DNA, 2745 bp, synthetic construct; identical to SEQ ID NO: 147366
  misc_feature 1..2745: note = Description of Artificial Sequence: Synthetic coding sequence
  source 1..2745: mol_type = other DNA

SEQ ID NO: 174042 - DNA, 1674 bp, synthetic construct
  misc_feature 1..1674: note = Description of Artificial Sequence: Synthetic coding sequence
  source 1..1674: mol_type = other DNA
atggccacagctgtgtcccggccctgtgccggccgcagccgggacatcctgtggagggtgctgggctggagaattgtggccagcatcgtgtggagcgtgctcttcctgcccatctgcaccaccgtcttcatcatcttcagcagaattgacctcttccaccccatccagtggctgagtgacagcttcagtgacctgtacagcagctatgtgatcttctacttcctgctgctgtctgtggtgatcatcatcatcagcatcttcaacgtggagttctatgctgtggtgcccagcatcccctgcagccggctggccctgattggcaagatcatccacccccagcagctgatgcacagcttcatccacgccgccatgggcatggtgatggcctggtgtgccgctgtgatcacccagggccagtacagcttcctggtggtgccctgcaccggcaccaacagctttggcagccctgctgcccagacctgcctgaatgagtaccacctgttcttcctgctgaccggggccttcatgggctacagctacagcctgctgtactttgtgaacaacatgaactacctgcccttccccatcatccagcagtacaagttcctgcgcttccgccgcagcctgctgctgctggtgaagcacagctgtgtggagagcctcttcctggtgaggaacttctgcatcctgtactacttcctgggctacatccccaaggcctggatcagcacagccatgaacctgcacattgatgagcaggtgcaccggcccctggacacagtgtctggcctgctgaacctgagcctgctgtaccacgtgtggctgtgtggggtcttcctgctgaccacctggtacgtgtcctggatcctcttcaagatctatgccacagaggcccacgtgtttcctgtgcagcccccatttgctgagggcagtgatgaatgtctgcccaaggtgctgaacagcaaccccccacccatcatcaagtacctggccctgcaggacctgatgctgctgagccagtacagccccagccggcggcaggaggtgttcagcctgagccagcccggcggccacccccacaactggacagccatcagccgggagtgcctgaacctgctgaatgagatgacagagttcagcaaccccagccccagcaccagcatctctgctgagggcaagaccatgaggcagcccagcgtcatctacagctggatccagaacaagcgggagcagatcaagaacttcctgagcaagagggtgctgatcatgtacttcttcagcaagcaccctgaggccagcatccaggccgtgttcagtgatgcccagatgcacatctgggccctggagggcctgagccacctggtggccgccagcttcacagaagatcgcttcggcgtggtgcagaccaccctgcctgccatcctgaacaccctgctgaccctgcaggaggccgtggacaagtacttcaagctgccccacgccagcagcaagccaccccgcatcagcggcagcctggtggacaccagctacaagaccctgcgctttgccttccgggccagcctgaagacagccatctaccgcatcaccaccaccttcggggagcacctgaatgctgtgcaggccagcgctgagcaccagaagaggctgcagcagttcctggagttcaaggagtag

SEQ ID NO: 174043 - DNA, 2025 bp, synthetic construct
  misc_feature 1..2025: note = Description of Artificial Sequence: Synthetic coding sequence
  source 1..2025: mol_type = other DNA
atggccacagctgtgtcccggccctgtgccggccgcagccgggacatcctgtggagggtgctgggctggagaattgtggccagcatcgtgtggagcgtgctcttcctgcccatctgcaccaccgtcttcatcatcttcagcagaattgacctcttccaccccatccagtggctgagtgacagcttcagtgacctgtacagcagctatgtgatcttctacttcctgctgctgtctgtggtgatcatcatcatcagcatcttcaacgtggagttctatgctgtggtgcccagcatcccctgcagccggctggccctgattggcaagatcatccacccccagcagctgatgcacagcttcatccacgccgccatgggcatggtgatggcctggtgtgccgctgtgatcacccagggccagtacagcttcctggtggtgccctgcaccggcaccaacagctttggcagccctgctgcccagacctgcctgaatgagtaccacctgttcttcctgctgaccggggccttcatgggctacagctacagcctgctgtactttgtgaacaacatgaactacctgcccttccccatcatccagcagtacaagttcctgcgcttccgccgcagcctgctgctgctggtgaagcacagctgtgtggagagcctcttcctggtgaggaacttctgcatcctgtactacttcctgggctacatccccaaggcctggatcagcacagccatgaacctgcacattgatgagcaggtgcaccggcccctggacacagtgtctggcctgctgaacctgagcctgctgtaccacgtgtggctgtgtggggtcttcctgctgaccacctggtacgtgtcctggatcctcttcaagatctatgccacagaggcccacgtgtttcctgtgcagcccccatttgctgagggcagtgatgaatgtctgcccaaggtgctgaacagcaaccccccacccatcatcaagtacctggccctgcaggacctgatgctgctgagccagtacagccccagccggcggcaggaggtgttcagcctgagccagcccggcggccacccccacaactggacagccatcagccgggagtgcctgaacctgctgaatggcatgacccagaagctgatcctgtaccaggaggccgccgccaccaacggccgggtgagcagcagctaccctgtggagcccaagaagctgaacagccctgaggagacagccttccagacccccaagagcagccagatgccccggcccagcgtgccccccctggtgaagaccagcctcttcagcagcaagctgagcaccccagatgtggtgagccccttcggcaccccatttggcagctctgtgatgaacaggatggccggcatctttgatgtgaacacctgctacggcagcccccagagcccccagctgatcagaagaggcccccggctgtggaccagcgccagtgaccagcagatgacagagttcagcaaccccagccccagcaccagcatctctgctgagggcaagaccatgaggcagcccagcgtcatctacagctggatccagaacaagcgggagcagatcaagaacttcctgagcaagagggtgctgatcatgtacttcttcagcaagcaccctgaggccagcatccaggccgtgttcagtgatgcccagatgcacatctgggccctggagggcctgagccacctggtggccgccagcttcacagaggacagatttggagtggtgcagaccaccctgcctgccatcctgaacaccctgctgaccctgcaggaggccgtggacaagtacttcaagctgccccacgccagcagcaagcccccacgcatcagcggcagcctggtggacaccagctacaagaccctgcgctttgccttccgggccagcctgaagacagccatctaccgcatcaccaccacctttggagagcacctgaatgctgtgcaggccagcgctgagcaccagaagaggctgcagcagttcctggagttcaaggagtag

SEQ ID NO: 174044 - DNA, 1020 bp, synthetic construct
  misc_feature 1..1020: note = Description of Artificial Sequence: Synthetic coding sequence
  source 1..1020: mol_type = other DNA
atgctgctgagccagtacagccccagccggcggcaggaggtgttcagcctgagccagcccggcggccacccccacaactggacagccatcagcagagaatgtctgaacctgctgaatggcatgacccagaagctgatcctgtaccaggaggccgccgccaccaacggccgggtgagcagcagctaccctgtggagcccaagaagctgaacagccctgaggagacagccttccagacccccaagagcagccagatgccccggcccagcgtgccccccctggtgaagaccagcctcttcagcagcaagctgagcaccccagatgtggtgagccccttcggcacccccttcggcagctctgtgatgaacaggatggccggcatctttgatgtgaacacctgctacggcagcccccagagcccccagctgatccggcggggcccccggctgtggaccagcgccagtgaccagcagatgacagagttcagcaaccccagccccagcaccagcatctctgctgagggcaagaccatgaggcagcccagcgtcatctacagctggatccagaacaagcgggagcagatcaagaacttcctgagcaagagggtgctgatcatgtacttcttcagcaagcaccctgaggccagcatccaggccgtgttcagtgatgcccagatgcacatctgggccctggagggcctgagccacctggtggccgccagcttcacagaagatcgcttcggcgtggtgcagaccaccctgcctgccatcctgaacaccctgctgaccctgcaggaggccgtggacaagtacttcaagctgccccacgccagcagcaagccaccccgcatcagcggcagcctggtggacaccagctacaagaccctgcgctttgccttccgggccagcctgaagacagccatctaccgcatcaccaccaccttcggggagcacctgaatgctgtgcaggccagcgctgagcaccagaagaggctgcagcagttcctggagttcaaggagtag

SEQ ID NO: 174045 - DNA, 1629 bp, synthetic construct
  misc_feature 1..1629: note = Description of Artificial Sequence: Synthetic coding sequence
  source 1..1629: mol_type = other DNA
atggccacagctgtgtcccggccctgtgccggccgcagccgggacatcctgtggagggtgctgggctggagaattgtggccagcatcgtgtggagcgtgctcttcctgcccatctgcaccaccgtcttcatcatcttcagcagaattgacctcttccaccccatccagtggctgagtgacagcttcagtgacctgtacagcagctatgtgatcttctacttcctgctgctgtctgtggtgatcatcatcatcagcatcttcaacgtggagttctatgctgtggtgcccagcatcccctgcagccggctggccctgattggcaagatcatccacccccagcagctgatgcacagcttcatccacgccgccatgggcatggtgatggcctggtgtgccgctgtgatcacccagggccagtacagcttcctggtggtgccctgcaccggcaccaacagctttggcagccctgctgcccagacctgcctgaatgagtaccacctgttcttcctgctgaccggggccttcatgggctacagctacagcctgctgtactttgtgaacaacatgaactacctgcccttccccatcatccagcagtacaagttcctgcgcttccgccgcagcctgctgctgctggtgaagcacagctgtgtggagagcctcttcctggtgaggaacttctgcatcctgtactacttcctgggctacatccccaaggcctggatcagcacagccatgaacctgcacattgatgagcaggtgcaccggcccctggacacagtgtctggcctgctgaacctgagcctgctgtaccacgtgtggctgtgtggggtcttcctgctgaccacctggtacgtgtcctggatcctcttcaagatctatgccacagaggcccacgtgtttcctgtgcagcccccatttgctgagggcagtgatgaatgtctgcccaaggtgctgaacagcaaccccccacccatcatcaagtacctggccctgcaggacctgatgctgctgagccagtacagccccagccggcggcaggaggtgttcagcctgagccagcccggcggccacccccacaactggacagccatcagccgggagtgcctgaacctgctgaatggcatgacccagaagctgatcctgtaccaggaggccgccgccaccaacggccgggtgagcagcagctaccctgtggagcccaagaagctgaacagccctgaggagacagccttccagacccccaagagcagccagatgccccggcccagcgtgccccccctggtgaagaccagcctcttcagcagcaagctgagcaccccagatgtggtgagccccttcggcaccccatttggcagctctgtgatgaacaggatggccggcatctttgatgtgaacacctgctacggcagcccccagagcccccagctgatcagaagaggcccccggctgtggaccagcgccagtgaccagcagatgacagagttcagcaaccccagccccagcaccagcatctctgctgaggccccccggggcctgcacagcggctgcttcttccgctgccccaatgcctacctgggcatcagaagatctgtggccctgagcagcagcatcatctaccggggctag

SEQ ID NO: 174046 - DNA, 1332 bp, synthetic construct
  misc_feature 1..1332: note = Description of Artificial Sequence: Synthetic coding sequence
  source 1..1332: mol_type = other DNA
atgaggctgaccaggaagaggctgtgcagcttcctgattgccctgtactgcctcttcagcctgtatgctgcctaccacgtgttctttggaagaagacggcaggccccagctggcagcccccggggcctgaggaaaggagctgccccagcccgggagcggcggggccgggagcagagcaccctggagagcgaggagtggaacccctgggagggagatgagaagaatgagcagcagcaccgcttcaagaccagcctgcagatcctggacaagagcaccaagggcaagacagacctgtctgtgcagatctggggcaaggccgccatcggcctgtacctgtgggagcacatctttgagggcctgctggaccccagtgatgtgacagcccagtggagggagggcaagagcatcgtgggccgcacccagtacagcttcatcaccggccctgctgtgattcctggctacttctctgtggatgtgaacaacgtggtgctgatcctgaatggccgggagaaggccaagatcttctacgccacccagtggctgctgtatgcccagaacctggtgcagatccagaagctgcagcacctggccgtggtgctgctgggcaatgagcactgtgacaatgagtggatcaaccccttcctgaagagaaatggaggctttgtggagctgctcttcatcatctatgacagcccctggatcaatgatgtggatgtgttccagtggcccctgggcgtggccacctacagaaacttccctgtggtggaggcctcctggagcatgctgcatgatgagcggccctacctgtgcaacttcctgggcaccatctatgagaacagcagccggcaggccctgatgaacatcctgaagaaggatggaaatgacaagctgtgctgggtgtctgcccgggagcactggcagccccaggagaccaatgaaagcctgaagaactaccaggatgccctgctgcagagcgacctgaccctgtgccctgtgggcgtgaacacagagtgctaccgcatctatgaggcctgcagctatggcagcatccctgtggtggaggatgtgatgacagctggcaactgtggcaacacctctgtgcaccacggggcccccctgcagctgctgaagtccatgggcgcccccttcatcttcatcaagaactggaaggagctgcctgctgtgctggagaaggagaagaccatcatcctgcaggagaagattgaaagaaggaagatgctgctgcagtggtaccagcacttcaagacagagctgaagatgaagttcaccaacatcctggagagcagcttcctgatgaacaacaagagctag

SEQ ID NO: 174047 - DNA, 774 bp, synthetic construct
  misc_feature 1..774: note = Description of Artificial Sequence: Synthetic coding sequence
  source 1..774: mol_type = other DNA
atggctgctgatggagtggatgagaggagccccctgctgagcgccagccacagcggaaatgtgacccccacagccccaccctacctgcaggagagcagccccagggctgagctgcccccaccctacacagccatcgccagcccagatgccagcggcatccctgtgatcaactgccgggtgtgccagagcctcatcaacctggatggcaagctgcaccagcacgtggtgaagtgcaccgtgtgcaatgaggccacccccatcaagaacccccccaccgggaagaagtatgtgcgctgcccctgcaactgcctgctgatctgcaaggacaccagccgccgcatcggctgcccccggcccaactgccgccgcatcatcaacctgggccctgtgatgctgatcagcgaggagcagcctgcccagcctgccctgcccatccagcctgagggcaccagggtggtgtgtggccactgcggcaacaccttcctgtggatggagctgcgcttcaacaccctggccaagtgcccccactgcaagaagatcagctctgtgggcagcgccctgccccggcggcgctgctgtgcctacatcaccatcggcatgatctgcatcttcatcggcgtgggcctgactgtgggcaccccagactttgcccggcgcttccgggccacctacgtgtcctgggccatcgcctacctgctgggcctcatctgcctgatccgggcctgctactggggcgccatccgggtgtcctacccagagcacagctttgcctag

SEQ ID NO: 174048 - DNA, 2745 bp, synthetic construct
  misc_feature 1..2745: note = Description of Artificial Sequence: Synthetic coding sequence
  source 1..2745: mol_type = other DNA
atgagcctgagccactggccctacttccggctggtgctgaacttccggccccaggtgatctgcctgccccagccccccaaggtgctgggctaccgcctggagcccccccacctgaccctggcctgcaccctggagggcatgtacaacatcatcgaggagatcctggagcgggacatcaatggcaccctgctgagccaggccacctgtgagctgtgtgatggaaatgaaaacagcttcatggtggtgaatgccctgggggacagatgtgtgcgctgtgagcccacctttgtgaacaccagccgcagctgtgcctgcagcgagcccaacatcctgaccggcggcctgtgcttcagcagcacaggcaacttccccctgcggcgcatctctgctgcccgctatggagaggtgggcatgagcctgaccagcgagtggtttgccaagtacctgcagagcagcgctgctgcctgctgggtgtatgccaacctgaccagctgccaggccctgggcaacatgtgtgtgatgaacatgaacagctatgactttgccacctttgatgcctgtggcctcttccagttcatctttgaaaatacagctggcctgagcacagtgcacagcatctccttctggaggcagaacctgccctggctgttctacggggaccagctgggcctggccccccaggtgctgagcagcaccagcctgcccaccaacttctccttcaagggggagaaccagaacaccaagctgaagtttgtggccgccagctatgacatccggggcaacttcctgaagtggcagaccctggagggcggcgtgctgcagctgtgcccagacacagagacccggctgaatgctgcctacagctttggcaccacctaccagcagaactgtgagatccccatcagcaagatcctgattgacttccccacccccatcttctatgatgtgtacctggagtacacagatgagaaccagcaccagtacatcctggccgtgcctgtgctgaacctgaacctgcagcacaacaagatctttgtgaaccaggacagcaacagcggcaagtggctgctgacccggcgcatcttcctggtggatgctgtgtctggaagagaaaatgacctgggcacccagcccagggtcatccgggtggccacccagatcagcctgtctgtgcacctggtgcccaacaccatcaatggaaacatctacccacccctcatcaccatcgcctacagcgacatcgacatcaaggatgccaacagccagagcgtgaaggtgtccttctctgtgacctatgagatggaccacggggaggcccacgtgcagacagacatcgccctgggcgtgctgggcggcctggccgtgctggccagcctgctgaagacagctggctggaagagaagaattggcagccccatgattgacctgcagacagtggtgaagttcctggtgtactatgctggggacctggccaacgtgttcttcatcatcaccgtgggcaccggcctgtactggctgatcttcttcaaggcccagaagtctgtgtctgtgctgctgcccatgcccatccaggaggagagatttgtgacctacgtgggctgtgcctttgccctgaaggccctgcagttcctgcacaagctgatcagccagatcaccattgatgtgttcttcatcgactgggagcggcccaagggcaaggtgctgaaggctgtggagggggagggcggcgtgcgcagcgccaccgtgcctgtgtccatctggaggacctactttgtggccaatgagtggaatgagatccagacagtgaggaagatcaacagcctcttccaggtgctgactgtgctcttcttcctggaggtggtgggcttcaagaacctggccctgatggacagcagcagcagcctgagcagaaatcctccttcctacatcgccccctacagctgcatcctgcgctatgctgtgtctgctgccctgtggctggccatcggcatcatccaggtggtgttctttgctgtgttctatgagcgcttcatcgaggacaagatccggcagtttgtggacctgtgcagcatgagcaacatctctgtgttcctgctgagccacaagtgcttcggctactacatccacggccgctctgtgcacggccatgctgacaccaacatggaggagatgaacatgaacctgaagcgggaggccgagaacctgtgcagccagaggggcctggtgcccaacacagatggccagacctttgagatcgccatcagcaaccagatgaggcagcactatgaccgcatccacgagaccctcatcaggaagaatggacctgcccggctgctgagcagcagcgccagcacctttgagcagagcatcaaggcctaccacatgatgaacaagttcctgggcagcttcatcgaccacgtgcacaaggagatggactacttcatcaaggacaagctgctgctggagcgcatcctgggcatggagttcatggagcccatggagaagagcatcttctacaatgatgagggctacagcttcagctctgtgctgtactatggaaatgaggccaccctgctgatctttgacctgctcttcttctgtgtggtggacctggcctgccagaacttcatcctggccagcttcctgacctacctgcagcaggagatcttccgctacatccggaacacagtgggccagaagaacctggccagcaagaccctggtggaccagcgcttcctgatctag

SEQ ID NO: 174049 - DNA, 2988 bp, synthetic construct
  misc_feature 1..2988: note = Description of Artificial Sequence: Synthetic coding sequence
  source 1..2988: mol_type = other DNA
atggccacccggggcggggccggcgtggccatggctgtgtggagcctgctgagcgcccgggctgtgacagccttcctgctgctcttcctgccccgcttcctgcaggcccagaccttctccttccccttccagcagcctgagaagtgtgacaacaaccagtactttgacatcagcgccctgagctgtgtgccctgtggggccaaccagaggcaggatgcccggggcaccagctgtgtgtgcctgcccggcttccagatgatcagcaacaacggcggccctgccatcatctgcaagaagtgcccagagaacatgaagggcgtgacagaagatggctggaactgcatcagctgccccagcgacctgacagctgagggcaagtgccactgccccatcggccacatcctggtggagcgggacatcaatggcaccctgctgagccaggccacctgtgagctgtgtgatggaaatgaaaattccttcatggtggtgaatgccctgggggacagatgtgtgcgctgtgagcccacctttgtgaacaccagccgcagctgtgcctgcagcgagcccaacatcctgactggaggcctgtgcttcagcagcactggaaacttccccctgcggcgcatctctgctgcccgctacggggaggtgggcatgagcctgaccagcgagtggtttgccaagtacctgcagagcagcgctgctgcctgctgggtgtatgccaacctgaccagctgccaggccctgggcaacatgtgtgtgatgaacatgaacagctatgactttgccacctttgatgcctgtggcctcttccagttcatctttgagaacacagctggcctgagcacagtgcacagcatctccttctggaggcagaacctgccctggctgttctatggagaccagctgggcctggccccccaggtgctgagcagcaccagcctgcccaccaacttctccttcaagggggagaaccagaacaccaagctgaagtttgtggccgccagctatgacatccggggcaacttcctgaagtggcagaccctggagggcggcgtgctgcagctgtgcccagacacagagacccggctgaatgctgcctacagctttggcaccacctaccagcagaactgtgagatccccatcagcaagatcctgattgacttccccacccccatcttctatgatgtgtacctggagtacacagatgagaaccagcaccagtacatcctggccgtgcctgtgctgaacctgaacctgcagcacaacaagatctttgtgaaccaggacagcaacagcggcaagtggctgctgacccggcgcatcttcctggtggatgctgtgtctggccgggagaatgacctgggcacccagcccagggtcatccgggtggccacccagatcagcctgtctgtgcacctggtgcccaacaccatcaatggaaacatctacccacccctcatcaccatcgcctacagcgacatcgacatcaaggatgccaacagccagagcgtgaaggtgtccttctctgtgacctatgagatggaccatggagaggcccacgtgcagacagacatcgccctgggcgtgctgggcggcctggccgtgctggccagcctgctgaagacagctggctggaagaggcgcatcggcagccccatgattgacctgcagacagtggtgaagttcctggtgtactatgctggggacctggccaacgtgttcttcatcatcaccgtgggcaccggcctgtactggctgatcttcttcaaggcccagaagtctgtgtctgtgctgctgcccatgcccatccaggaggagagatttgtgacctacgtgggctgtgcctttgccctgaaggccctgcagttcctgcacaagctgatcagccagatcaccattgatgtgttcttcatcgactgggagcggcccaagggcaaggtgctgaaggctgtggagggggagggcggcgtgcgcagcgccaccgtgcctgtgtccatctggaggacctactttgtggccaatgagtggaatgagatccagacagtgaggaagatcaacagcctcttccaggtgctgactgtgctcttcttcctggaggtggtgggcttcaagaacctggccctgatggacagcagcagcagcctgagcaggaacccccccagctacatcgccccctacagctgcatcctgcgctatgctgtgtctgctgccctgtggctggccatcggcatcatccaggtggtgttctttgctgtgttctatgagcgcttcatcgaggacaagatccggcagtttgtggacctgtgcagcatgagcaacatcagcgtcttcctgctgagccacaagtgcttcggctactacatccacggccgctctgtgcacggccacgccgacaccaacatggaggagatgaacatgaacctgaagcgggaggccgagaacctgtgcagccagaggggcctggtgcccaacacagatggccagacctttgaaattgccatcagcaaccagatgaggcagcactatgaccgcatccacgagaccctcatcaggaagaatggacctgcccggctgctgagcagcagcgccagcacctttgagcagagcatcaaggcctaccacatgatgaacaagttcctgggcagcttcatcgaccacgtgcacaaggagatggactacttcatcaaggacaagctgctgctggagcgcatcctgggcatggagttcatggagcccatggagaagagcatcttctacaatgatgagggctacagcttcagctctgtgctgtactatggaaatgaggccaccctgctgatctttgacctgctcttcttctgtgtggtggacctggcctgccagaacttcatcctggccagcttcctgacctacctgcagcaggagatcttccgctacatccggaacacagtgggccagaagaacctggccagcaagaccctggtggaccagcgcttcctgatctag

SEQ ID NO: 174050 - DNA, 783 bp, synthetic construct
  misc_feature 1..783: note = Description of Artificial Sequence: Synthetic coding sequence
  source 1..783: mol_type = other DNA
atgctgttcctggccctgggcagcccctgggccgtggagctgcccctgtgtggcagaagaacagccctgtgtgccgctgctgccctgcggggcccccgggcctctgtgtcccgggccagcagcagcagcggccccagcggccctgtggccggctggagcacaggccccagcggggccgcccggctgctgcggcggcccggccgggcccagatccctgtgtactgggagggctacgtgcgcttcctgaacacccccagcgacaagtcagaagatggccgcctcatctacacaggcaacatggcccgggctgtgtttggagtgaagtgcttctcctacagcaccagcctgattggcctgaccttcctgccctacatcttcacccagaacaatgccatcagcgagagcgtgcccctgcccatccagatcatcttctacggcatcatgggcagcttcaccgtcatcacccctgtgctgctgcacttcatcaccaagggctacgtgatccggctgtaccacgaggccaccacagacacctacaaggccatcacctacaatgccatgctggccgagaccagcacagtgttccaccagaatgatgtgaagatcccagatgccaagcacgtgttcaccaccttctacgccaagaccaagagcctgctggtgaaccctgtgctcttccccaaccgggaggactacatccacctgatgggctatgacaaggaggagttcatcctgtacatggaggagaccagcgaggagaagaggcacaaggatgacaagtag

SEQ ID NO: 174051 - DNA, 324 bp, synthetic construct
  misc_feature 1..324: note = Description of Artificial Sequence: Synthetic coding sequence
  source 1..324: mol_type = other DNA
atgctgttcctggccctgggcagcccctgggccgtggagctgcccctgtgtggcagaagaacagccctgtgtgccgctgctgccctgcggggcccccgggcctctgtgtcccgggccagcagcagcagcggccccagcggccctgtggccggctggagcacaggccccagcggggccgcccggctgctgcggcggcccggccgggcccagatccctgtgtactgggagggctacgtgcgcttcctgaacacccccagcgacaagtcagaagatggccgcctcatctacacaggcaacatggcccgggctgtgtttgggaagtag

SEQ ID NO: 174052 - DNA, 918 bp, synthetic construct
  misc_feature 1..918: note = Description of Artificial Sequence: Synthetic coding sequence
  source 1..918: mol_type = other DNA
atggagctgcactacctggccaagaagagcaaccaggccgacctgtgtgatgcccgggactggagcagccggggcctgcccggggaccaggccgacacagctgccacccgggccgccctgtgctgccagaagcagtgtgccagcaccccccgggccacagagatggagggcagcaagctgagcagcagccctgccagccccagcagcagcctgcagaacagcaccctgcagccagatgccttccccccaggcctgctgcacagcggcaacaaccagatcacagctgagaggaaggtgtgcaactgctgcagccaggagctggagaccagcttcacctacgtggacaagaacatcaacctggagcagaggaacagaagcagccccagcgccaagggccacaaccaccctggagagctgggctgggagaaccccaatgagtggagccaggaggccgccatcagcctcatcagcgaggaggaggatgacaccagcagcgaggccaccagcagcggcaagagcattgattatggcttcatcagcgccatcctcttcctggtgacaggcatcctgctggtgatcatctcctacatcgtgccccgggaggtgacagtggaccccaacacagtggccgcccgggagatggagcggctggagaaggagagcgcccggctgggcgcccacctggacagatgtgtgattgctggcctgtgcctgctgaccctgggcggcgtcatcctgagctgcctgctgatgatgtccatgtggaagggggagctgtacagaagaaacagatttgccagcagcaaggagagcgccaagctgtatggcagcttcaacttcaggatgaagaccagcaccaatgaaaacaccctggagctgagcctggtggaggaggatgccctggccgtgcagagctag

SEQ ID NO: 174053 - DNA, 951 bp, synthetic construct
  misc_feature 1..951: note = Description of Artificial Sequence: Synthetic coding sequence
  source 1..951: mol_type = other DNA
atgtctggggacacctgcctgtgcccagccagcggggccaagcccaagctgagcggcttcaagggcggcggcctgggcaacaagtatgtgcagctgaatgtgggcggcagcctgtactacaccaccgtgcgggccctgaccaggcatgacaccatgctgaaggccatgttcagcggccgcatggaggtgctgacagacaaggagggctggatcctgattgacagatgtgggaagcacttcggcaccatcctgaactacctgagagatgacaccatcaccctgccccagaaccggcaggagatcaaggagctgatggccgaggccaagtactacctgatccagggcctggtgaacatgtgccagagcgccctgcaggacaagaaggacagctaccagcctgtgtgcaacatccccatcatcaccagcctgaaggaggaggagcggctcatcgagagcagcaccaagcctgtggtgaagctgctgtacaacagaagcaacaacaagtacagctacaccagcaacagtgatgaccacctgctgaagaacatcgagctgtttgacaagctgagcctgcgcttcaacggccgggtgctcttcatcaaggatgtgattggagatgagatctgctgctggagcttctacggccagggcaggaagctggccgaggtgtgctgcaccagcatcgtgtatgccacagagaagaagcagaccaaggtggagttccctgaggcccgcatctatgaggagaccctgaatgtgctgctgtatgagaccccccgggtgcctgacaacagcctgctggaggccaccagccgcagccgcagccaggccagccccagtgaagatgaggagacctttgagctgcgggacagagtgcggcgcatccacgtgaagcgctacagcacctatgatgaccggcagctgggccaccagagcacccaccgggactag

SEQ ID NO: 174054 - DNA, 210 bp, synthetic construct
  misc_feature 1..210: note = Description of Artificial Sequence: Synthetic coding sequence
  source 1..210: mol_type = other DNA
atgaccaccctcatccccatcctgagcaccttcctgtttgaggacttcagcaaggccagcggcttcaagggccagaggcctgagaccctgcacgagcggctgaccctggtgtctgtgtatgccccctacctgctgatccccttcatcctgctgatcttcatgctgcggagcccctactacaagtatgaggagaagaggaagaagaagtag

SEQ ID NO: 174055 - DNA, 1125 bp, synthetic construct
  misc_feature 1..1125: note = Description of Artificial Sequence: Synthetic coding sequence
  source 1..1125: mol_type = other DNA
atggtgctgtgggagagcccccggcagtgcagctcctggaccctgtgtgagggcttctgctggctgctgctgctgcctgtgatgctgctgattgtggcccggcctgtgaagctggccgccttccccaccagcctgagtgactgccagacccccaccggctggaactgcagcggctatgatgacagagaaaatgacctcttcctgtgtgacaccaacacctgcaagtttgatggagaatgtctgagaattggagacacagtgacctgtgtgtgccagttcaagtgcaacaatgactatgtgcctgtgtgtggcagcaatggagagagctaccagaatgaatgctacctgcggcaggccgcctgcaagcagcagagcgagatcctggtggtgtctgagggcagctgtgccacagatgctggcagcggcagcggagatggagtgcatgagggcagcggggagaccagccagaaggagaccagcacctgtgacatctgccagtttggagcagaatgtgatgaagatgctgaagatgtgtggtgtgtgtgcaacatcgactgcagccagaccaacttcaaccccctgtgtgccagtgatggcaagagctatgacaatgcctgccagatcaaggaggccagctgccagaagcaggagaagattgaggtgatgagcctgggccgctgccaggacaacaccaccaccaccaccaagtcagaagatggccactacgccaggacagattatgcagaaaatgccaacaagctggaggagagcgcccgggagcaccacatcccctgcccagagcactacaacggcttctgcatgcatggaaaatgtgagcacagcatcaacatgcaggagcccagctgccgctgtgatgctggctacacaggccagcactgtgagaagaaggactacagcgtgctgtatgtggtgcccggccctgtgcgcttccagtatgtgctgattgctgctgtgattggcaccatccagattgctgtgatctgtgtggtggtgctgtgcatcaccaggaagtgccccaggagcaaccgcatccaccggcagaagcagaacacaggccactacagcagtgacaacaccacccgggccagcaccaggctcatctag

SEQ ID NO: 174056 - DNA, 528 bp, synthetic construct
  misc_feature 1..528: note = Description of Artificial Sequence: Synthetic coding sequence
  source 1..528: mol_type = other DNA
atggtgctgtgggagagcccccggcagtgcagctcctggaccctgtgtgagggcttctgctggctgctgctgctgcctgtgatgctgctgattgtggcccggcctgtgaagctggccgccttccccaccagcctgagtgactgccagacccccaccggctggaactgcagcggctatgatgacagagaaaatgacctcttcctgtgtgacaccaacacctgcaagtttgatggagaatgtctgagaattggagacacagtgacctgtgtgtgccagttcaagtgcaacaatgactatgtgcctgtgtgtggcagcaatggagagagctaccagaatgaatgctacctgcggcaggccgcctgcaagcagcagagcgagatcctggtggtgtctgagggcagctgtgccacagatgctggcagcggcagcggagatggcggccgcagctgcctcttcacctacctgaagatctactggtggatcctgctgtgcatcttcacctacgtgtgcagcatcagtgacatctag

SEQ ID NO: 174057 - DNA, 2427 bp, synthetic construct
  misc_feature 1..2427: note = Description of Artificial Sequence: Synthetic coding sequence
  source 1..2427: mol_type = other DNA
atggccgagctgctggccagcgctggcagcgcctgctcctgggacttcccccgggccccacccagcttccccccacctgctgccagcagaggaggcctgggcggcaccaggagcttccggccccacagaggagctgagagcccccggcccggccgggacagagatggagtgcgggtgcccatggccagcagccgctgcccagccccccggggctgccgctgcctgcccggggccagcctggcctggctgggcaccgtgctgctgctgctggccgactgggtgctgctgaggacagccctgccccgcatcttcagcctgctggtgcccacagccctgcccctgctgcgggtgtgggccgtgggcctgagccgctgggccgtgctgtggctgggcgcctgtggggtgctgcgggccaccgtgggcagcaagtcagaaaatgctggggcccagggctggctggccgccctgaagcccctggccgccgccctgggcctggccctgcccggcctggccctcttccgggagctgatctcctggggcgcccctggcagcgctgacagcacccggctgctgcactggggcagccaccccacagcctttgtggtgtcctatgctgctgccctgcctgctgctgccctgtggcacaagctgggcagcctgtgggtgcctgggggccagggcggcagcggcaaccctgtgcggcggctgctgggctgcctgggcagcgagacccggcggctgagcctcttcctggtgctggtggtgctgagcagcctgggggagatggccatccccttcttcaccggccgcctgacagactggatcctgcaggacggcagcgctgacaccttcaccaggaacctgaccctgatgagcatcctgaccatcgccagcgctgtgctggagtttgtgggagatggcatctacaacaacaccatgggccacgtgcacagccacctgcagggcgaggtgtttggagctgtgctgcggcaggagacagagttcttccagcagaaccagacaggcaacatcatgagccgggtgacagaggacaccagcaccctgagtgacagcctgtctgagaacctgagcctcttcctgtggtacctggtgcggggcctgtgcctgctgggcatcatgctgtggggctctgtgtccctgaccatggtgaccctcatcaccctgcccctgctcttcctgctgcccaagaaggtgggcaagtggtaccagctgctggaggtgcaggtgcgggagagcctggccaagagcagccaggtggccatcgaggccctgagcgccatgcccaccgtgcgcagctttgccaatgaggagggggaggcccagaagttccgggagaagctgcaggagatcaagaccctgaaccagaaggaggccgtggcctatgctgtgaacagctggaccaccagcatcagcggcatgctgctgaaggtgggcatcctgtacatcggcggccagctggtgaccagcggggctgtgagcagcggcaacctggtgacctttgtgctgtaccagatgcagttcacccaggccgtggaggtgctgctgagcatctacccccgggtgcagaaggctgtgggcagcagcgagaagatctttgagtacctggacaggaccccccgctgccccccatctggcctgctgacccccctgcacctggagggcctggtgcagttccaggatgtgtcctttgcctaccccaacagaccagatgtgctggtgctgcagggcctgaccttcaccctgcggcctggagaggtgacagccctggtgggccccaacggcagcggcaagagcacagtggccgccctgctgcagaacctgtaccagcccaccggcggccagctgctgctggatggcaagcccctgccccagtatgagcaccgctacctgcaccggcaggtggccgctgtgggccaggagccccaggtgtttggccgcagcctgcaggagaacatcgcctacggcctgacccagaagcccaccatggaggagatcacagctgctgctgtgaagagcggggcccacagcttcatcagcggcctgccccagggctatgacacagaggtggatgaagctggcagccagctgagcggcggccagaggcaggccgtggccctggcccgggccctgatcaggaagccctgtgtgctgatcctggatgatgccaccagcgccctggatgccaacagccagctgcaggtggagcagctgctgtatgagagccctgagcgctacagccgctctgtgctgctgatcacccagcacctgagcctggtggagcaggccgaccacatcctcttcctggagggcggggccatccgggagggcggcacccaccagcagctgatggagaagaagggctgctactgggccatggtgcaggccccagcagatgcccctgagtag

SEQ ID NO: 174058 - DNA, 2427 bp, synthetic construct; identical to SEQ ID NO: 174057
  misc_feature 1..2427: note = Description of Artificial Sequence: Synthetic coding sequence
  source 1..2427: mol_type = other DNA

SEQ ID NO: 174059 - DNA, 2427 bp, synthetic construct; identical to SEQ ID NO: 174057
  misc_feature 1..2427: note = Description of Artificial Sequence: Synthetic coding sequence
  source 1..2427: mol_type = other DNA

SEQ ID NO: 174060 - DNA, 2427 bp, synthetic construct; identical to SEQ ID NO: 174057
  misc_feature 1..2427: note = Description of Artificial Sequence: Synthetic coding sequence
  source 1..2427: mol_type = other DNA

SEQ ID NO: 174061 - DNA, 2427 bp, synthetic construct; identical to SEQ ID NO: 174057
  misc_feature 1..2427: note = Description of Artificial Sequence: Synthetic coding sequence
  source 1..2427: mol_type = other DNA

SEQ ID NO: 174062 - DNA, 1644 bp, synthetic construct
  misc_feature 1..1644: note = Description of Artificial Sequence: Synthetic coding sequence
  source 1..1644: mol_type = other DNA
atggccatccccttcttcaccggccgcctgacagactggatcctgcaggacggcagcgctgacaccttcaccaggaacctgaccctgatgagcatcctgaccatcgccagcgctgtgctggagtttgtgggagatggcatctacaacaacaccatgggccacgtgcacagccacctgcagggcgaggtgtttggagctgtgctgcggcaggagacagagttcttccagcagaaccagacaggcaacatcatgagccgggtgacagaggacaccagcaccctgagtgacagcctgtctgagaacctgagcctcttcctgtggtacctggtgcggggcctgtgcctgctgggcatcatgctgtggggctctgtgtccctgaccatggtgaccctcatcaccctgcccctgctcttcctgctgcccaagaaggtgggcaagtggtaccagctgctggaggtgcaggtgcgggagagcctggccaagagcagccaggtggccatcgaggccctgagcgccatgcccaccgtgcgcagctttgccaatgaggagggggaggcccagaagttccgggagaagctgcaggagatcaagaccctgaaccagaaggaggccgtggcctatgctgtgaacagctggaccaccagcatcagcggcatgctgctgaaggtgggcatcctgtacatcggcggccagctggtgaccagcggggctgtgagcagcggcaacctggtgacctttgtgctgtaccagatgcagttcacccaggccgtggaggtgctgctgagcatctacccccgggtgcagaaggctgtgggcagcagcgagaagatctttgagtacctggacaggaccccccgctgcccccccagcggcctgctgacccccctgcacctggagggcctggtgcagttccaggatgtgtcctttgcctaccccaacagaccagatgtgctggtgctgcagggcctgaccttcaccctgcggcctggagaggtgacagccctggtgggccccaatggaagtggcaagagcacagtggccgccctgctgcagaacctgtaccagcccactggaggccagctgctgctggatggcaagcccctgccccagtatgagcaccgctacctgcaccggcaggtggccgctgtgggccaggagccccaggtgtttggccgcagcctgcaggagaacatcgcctacggcctgacccagaagcccaccatggaggagatcacagctgctgctgtgaagagcggggcccacagcttcatcagcggcctgccccagggctatgacacagaggtggatgaggccggcagccagctgagcggcggccagaggcaggccgtggccctggcccgggccctgatcaggaagccctgtgtgctgatcctggatgatgccaccagcgccctggatgccaacagccagctgcaggtggagcagctgctgtatgagagccctgagcgctacagccgctctgtgctgctgatcacccagcacctgagcctggtggagcaggccgaccacatcctcttcctggagggcggggccatccgggagggcggcacccaccagcagctgatggagaagaagggctgctactgggccatggtgcaggccccagcagatgcccctgagtag

SEQ ID NO: 174063 - DNA, 2427 bp, synthetic construct
  misc_feature 1..2427: note = Description of Artificial Sequence: Synthetic coding sequence
  source 1..2427: mol_type = other DNA
atggccgagctgctggccagcgctggcagcgcctgctcctgggacttcccccgggccccacccagcttccccccacctgctgccagcagaggaggcctgggcggcaccaggagcttccggccccacagaggagctgagagcccccggcccggccgggacagagatggagtgcgggtgcccatggccagcagccgctgcccagccccccggggctgccgctgcctgcccggggccagcctggcctggctgggcaccgtgctgctgctgctggccgactgggtgctgctgaggacagccctgccccgcatcttcagcctgctggtgcccacagccctgcccctgctgcgggtgtgggccgtgggcctgagccgctgggccgtgctgtggctgggcgcctgtggggtgctgcgggccactggaggcagcaagtcagaaaatgctggggcccagggctggctggccgccctgaagcccctggccgccgccctgggcctggccctgcccggcctggccctcttccgggagctgatctcctggggcgcccctggcagcgctgacagcacccggctgctgcactggggcagccaccccacagcctttgtggtgtcctatgctgctgccctgcctgctgctgccctgtggcacaagctgggcagcctgtgggtgcctgggggccagggcggcagcggcaaccctgtgcggcggctgctgggctgcctgggcagcgagacccggcggctgagcctcttcctggtgctggtggtgctgagcagcctgggggagatggccatccccttcttcaccggccgcctgacagactggatcctgcaggacggcagcgctgacaccttcaccaggaacctgaccctgatgagcatcctgaccatcgccagcgctgtgctggagtttgtgggagatggcatctacaacaacaccatgggccacgtgcacagccacctgcagggcgaggtgtttggagctgtgctgcggcaggagacagagttcttccagcagaaccagacaggcaacatcatgagccgggtgacagaggacaccagcaccctgagtgacagcctgtctgagaacctgagcctcttcctgtggtacctggtgcggggcctgtgcctgctgggcatcatgctgtggggctctgtgtccctgaccatggtgaccctcatcaccctgcccctgctcttcctgctgcccaagaaggtgggcaagtggtaccagctgctggaggtgcaggtgcgggagagcctggccaagagcagccaggtggccatcgaggccctgagcgccatgcccaccgtgcgcagctttgccaatgaggagggggaggcccagaagttccgggagaagctgcaggagatcaagaccctgaaccagaaggaggccgtggcctatgctgtgaacagctggaccaccagcatcagcggcatgctgctgaaggtgggcatcctgtacatcggcggccagctggtgaccagcggggctgtgagcagcggcaacctggtgacctttgtgctgtaccagatgcagttcacccaggccgtggaggtgctgctgagcatctacccccgggtgcagaaggctgtgggcagcagcgagaagatctttgagtacctggacaggaccccccgctgccccccatctggcctgctgacccccctgcacctggagggcctggtgcagttccaggatgtgtcctttgcctaccccaacagaccagatgtgctggtgctgcagggcctgaccttcaccctgcggcctggagaggtgacagccctggtgggccccaacggcagcggcaagagcacagtggccgccctgctgcagaacctgtaccagcccaccggcggccagctgctgctggatggcaagcccctgccccagtatgagcaccgctacctgcaccggcaggtggccgctgtgggccaggagccccaggtgtttggccgcagcctgcaggagaacatcgcctacggcctgacccagaagcccaccatggaggagatcacagctgctgctgtgaagagcggggcccacagcttcatcagcggcctgccccagggctatgacacagaggtggatgaagctggcagccagctgagcggcggccagaggcaggccgtggccctggcccgggccctgatcaggaagccctgtgtgctgatcctggatgatgccaccagcgccctggatgccaacagccagctgcaggtggagcagctgctgtatgagagccctgagcgctacagccgctctgtgctgctgatcacccagcacctgagcctggtggagcaggccgaccacatcctcttcctggagggcggggccatccgggagggcggcacccaccagcagctgatggagaagaagggctgctactgggccatggtgcaggccccagcagatgcccctgagtag

SEQ ID NO: 174064 - DNA, 2427 bp, synthetic construct; identical to SEQ ID NO: 174057
  misc_feature 1..2427: note = Description of Artificial Sequence: Synthetic coding sequence
  source 1..2427: mol_type = other DNA

SEQ ID NO: 174065 - DNA, 2427 bp, synthetic construct; identical to SEQ ID NO: 174057
  misc_feature 1..2427: note = Description of Artificial Sequence: Synthetic coding sequence
  source 1..2427: mol_type = other DNA

SEQ ID NO: 174066 - DNA, 1644 bp, synthetic construct; identical to SEQ ID NO: 174062
  misc_feature 1..1644: note = Description of Artificial Sequence: Synthetic coding sequence
  source 1..1644: mol_type = other DNA

SEQ ID NO: 174067 - DNA, 1644 bp, synthetic construct; identical to SEQ ID NO: 174062
  misc_feature 1..1644: note = Description of Artificial Sequence: Synthetic coding sequence
  source 1..1644: mol_type = other DNA

SEQ ID NO: 174068 - DNA, 1644 bp, synthetic construct; identical to SEQ ID NO: 174062
  misc_feature 1..1644: note = Description of Artificial Sequence: Synthetic coding sequence
  source 1..1644: mol_type = other DNA

SEQ ID NO: 174069 - DNA, 1644 bp, synthetic construct; identical to SEQ ID NO: 174062
  misc_feature 1..1644: note = Description of Artificial Sequence: Synthetic coding sequence
  source 1..1644: mol_type = other DNA

SEQ ID NO: 174070 - DNA, 1644 bp, synthetic construct; identical to SEQ ID NO: 174062
  misc_feature 1..1644: note = Description of Artificial Sequence: Synthetic coding sequence
  source 1..1644: mol_type = other DNA

SEQ ID NO: 174071 - DNA, 1644 bp, synthetic construct; identical to SEQ ID NO: 174062
  misc_feature 1..1644: note = Description of Artificial Sequence: Synthetic coding sequence
  source 1..1644: mol_type = other DNA

SEQ ID NO: 174072 - DNA, 1644 bp, synthetic construct; identical to SEQ ID NO: 174062
  misc_feature 1..1644: note = Description of Artificial Sequence: Synthetic coding sequence
  source 1..1644: mol_type = other DNA

SEQ ID NO: 174073 - DNA, 2061 bp, synthetic construct
  misc_feature 1..2061: note = Description of Artificial Sequence: Synthetic coding sequence
  source 1..2061: mol_type = other DNA
atgaggctgcctgacctgcggccctggaccagcctgctgctggtggatgctgccctgctgtggctgctgcagggccccctgggcaccctgctgccccagggcctgcccggcctgtggctggagggcaccctgcggctgggcggcctgtggggcctgctgaagctgcggggcctgctgggctttgtgggcaccctgctgctgcccctgtgcctggccacccccctgactgtgtccctgcgggccctggtggccggggccagccgggcccccccagcccgggtggccagcgccccctggagctggctgctggtgggctacggggctgctggcctgtcctggagcctgtgggccgtgctgagccccccaggggcccaggagaaggagcaggaccaggtgaacaacaaggtgctgatgtggaggctgctgaagctgagcaggccagacctgcccctgctggtggccgccttcttcttcctggtgctggccgtgctgggggagaccctcatcccccactacagcggccgggtgattgacatcctgggcggggactttgacccccacgcctttgccagcgccatcttcttcatgtgcctcttctcctttggcagcagcctgtctgctggctgccggggcggctgcttcacctacaccatgagccgcatcaacctgcgcatccgggagcagctgttcagcagcctgctgcggcaggacctgggcttcttccaggagaccaagacaggagagctgaacagccggctgagcagtgacaccaccctgatgagcaactggctgcccctgaatgccaacgtgctgctgcggagcctggtgaaggtggtgggcctgtatggcttcatgctgagcatcagcccccggctgaccctgctgagcctgctgcacatgcccttcaccatcgctgctgagaaggtgtacaacaccaggcaccaggaggtgctgcgggagatccaggatgctgtggcccgggccggccaggtggtgcgggaggccgtgggcggcctgcagacagtgcgcagctttggagctgaggagcacgaggtgtgccgctacaaggaggccctggagcagtgccggcagctgtactggaggcgggacctggagcgggccctgtacctgctggtgcggcgggtgctgcacctgggcgtgcagatgctgatgctgagctgtggcctgcagcagatgcaggatggagagctgacccagggcagcctgctgtccttcatgatctaccaggagagcgtgggcagctatgtgcagaccctggtgtacatctacggggacatgctgagcaatgtgggcgctgctgagaaggtgttctcctacatggaccggcagcccaacctgcccagccctggcaccctggcccccaccaccctgcagggcgtggtgaagttccaggatgtgtcctttgcctaccccaacagaccagacaggcctgtgctgaagggcctgaccttcaccctgcggcctggagaggtgacagccctggtgggccccaatggaagtggcaagagcacagtggccgccctgctgcagaacctgtaccagcccactggaggccaggtgctgctggatgagaagcccatcagccagtatgagcactgctacctgcacagccaggtggtgtctgtgggccaggagcctgtgctcttcagcggctctgtgaggaacaacatcgcctacggcctgcagagctgtgaagatgacaaggtgatggctgctgcccaggccgcccatgctgatgacttcatccaggagatggagcacggcatctacacagatgtgggggagaagggcagccagctggccgccggccagaagcagaggctggccatcgcccgggccctggtgcgggacccccgggtgctgatcctggatgaggccaccagcgccctggatgtgcagtgtgagcaggccctgcaggactggaacagcagaggagacagaacagtgctggtgattgcccaccggctgcagacagtgcagagggcccaccagatcctggtgctgcaggagggcaagctgcagaagctggcccagctgtag

SEQ ID NO: 174074 - DNA, 1962 bp, synthetic construct
  misc_feature 1..1962: note = Description of Artificial Sequence: Synthetic coding sequence
  source 1..1962: mol_type = other DNA
atgaggctgcctgacctgcggccctggaccagcctgctgctggtggatgctgccctgctgtggctgctgcagggccccctgggcaccctgctgccccagggcctgcccggcctgtggctggagggcaccctgcggctgggcggcctgtggggcctgctgaagctgcggggcctgctgggctttgtgggcaccctgctgctgcccctgtgcctggccacccccctgactgtgtccctgcgggccctggtggccggggccagccgggcccccccagcccgggtggccagcgccccctggagctggctgctggtgggctacggggctgctggcctgtcctggagcctgtgggccgtgctgagccccccaggggcccaggagaaggagcaggaccaggtgaacaacaaggtgctgatgtggaggctgctgaagctgagcaggccagacctgcccctgctggtggccgccttcttcttcctggtgctggccgtgctgggggagaccctcatcccccactacagcggccgggtgattgacatcctgggcggggactttgacccccacgcctttgccagcgccatcttcttcatgtgcctcttctcctttggcagcagcctgtctgctggctgccggggcggctgcttcacctacaccatgagccgcatcaacctgcgcatccgggagcagctgttcagcagcctgctgcggcaggacctgggcttcttccaggagaccaagacaggagagctgaacagccggctgagcagtgacaccaccctgatgagcaactggctgcccctgaatgccaacgtgctgctgcggagcctggtgaaggtggtgggcctgtatggcttcatgctgagcatcagcccccggctgaccctgctgagcctgctgcacatgcccttcaccatcgctgctgagaaggtgtacaacaccaggcaccaggaggtgctgcgggagatccaggatgctgtggcccgggccggccaggtggtgcgggaggccgtgggcggcctgcagacagtgcgcagctttggagctgaggagcacgaggtgtgccgctacaaggaggccctggagcagtgccggcagctgtactggaggcgggacctggagcgggccctgtacctgctggtgcggcgggtgctgcacctgggcgtgcagatgctgatgctgagctgtggcctgcagcagatgcaggatggagagctgacccagggcagcctgctgtccttcatgatctaccaggagagcgtgggcagctatgtgcagaccctggtgtacatctacggggacatgctgagcaatgtgggcgctgctgagaaggtgttctcctacatggaccggcagcccaacctgcccagccctggcaccctggcccccaccaccctgcagggcgtggtgaagttccaggatgtgtcctttgcctaccccaacagaccagacaggcctgtgctgaagggcctgaccttcaccctgcggcctggagaggtgacagccctggtgggccccaatggaagtggcaagagcacagtggccgccctgctgcagaacctgtaccagcccactggaggccaggtgctgctggatgagaagcccatcagccagtatgagcactgctacctgcacagccaggtggtgtctgtgggccaggagcctgtgctcttcagcggctctgtgaggaacaacatcgcctacggcctgcagagctgtgaagatgacaaggtgatggctgctgcccaggccgcccatgctgatgacttcatccaggagatggagcacggcatctacacagatgtgggggagaagggcagccagctggccgccggccagaagcagaggctggccatcgcccgggccctggtgcgggacccccgggtgctgatcctggatgaggccaccagcgccctggatgtgcagtgtgagcaggccaagaccctgtggaagttcatgatcttctag

SEQ ID NO: 174075 - DNA, 2061 bp, synthetic construct; identical to SEQ ID NO: 174073
  misc_feature 1..2061: note = Description of Artificial Sequence: Synthetic coding sequence
  source 1..2061: mol_type = other DNA

SEQ ID NO: 174076 - DNA, 1962 bp, synthetic construct; identical to SEQ ID NO: 174074
  misc_feature 1..1962: note = Description of Artificial Sequence: Synthetic coding sequence
  source 1..1962: mol_type = other DNA

SEQ ID NO: 174077 - DNA, 2061 bp, synthetic construct; identical to SEQ ID NO: 174073
  misc_feature 1..2061: note = Description of Artificial Sequence: Synthetic coding sequence
  source 1..2061: mol_type = other DNA

SEQ ID NO: 174078 - DNA, 1962 bp, synthetic construct; identical to SEQ ID NO: 174074
  misc_feature 1..1962: note = Description of Artificial Sequence: Synthetic coding sequence
  source 1..1962: mol_type = other DNA

SEQ ID NO: 174079 - DNA, 1962 bp, synthetic construct; identical to SEQ ID NO: 174074
  misc_feature 1..1962: note = Description of Artificial Sequence: Synthetic coding sequence
  source 1..1962: mol_type = other DNA

SEQ ID NO: 174080 - DNA, 2061 bp, synthetic construct
  misc_feature 1..2061: note = Description of Artificial Sequence: Synthetic coding sequence
  source 1..2061: mol_type = other DNA
atgaggctgcctgacctgcggccctggaccagcctgctgctggtggatgctgccctgctgtggctgctgcagggccccctgggcaccctgctgccccagggcctgcccggcctgtggctggagggcaccctgcggctgggcggcctgtggggcctgctgaagctgcggggcctgctgggctttgtgggcaccctgctgctgcccctgtgcctggccacccccctgactgtgtccctgcgggccctggtggccggggccagccgggcccccccagcccgggtggccagcgccccctggagctggctgctggtgggctacggggctgctggcctgtcctggagcctgtgggccgtgctgagccccccaggggcccaggagaaggagcaggaccaggtgaacaacaaggtgctgatgtggaggctgctgaagctgagcaggccagacctgcccctgctggtggccgccttcttcttcctggtgctggccgtgctgggggagaccctcatcccccactacagcggccgggtgattgacatcctgggcggggactttgacccccacgcctttgccagcgccatcttcttcatgtgcctcttctcctttggcagcagcctgtctgctggctgccggggcggctgcttcacctacaccatgagccgcatcaacctgcgcatccgggagcagctgttcagcagcctgctgcggcaggacctgggcttcttccaggagaccaagacaggagagctgaacagccggctgagcagtgacaccaccctgatgagcaactggctgcccctgaatgccaacgtgctgctgcggagcctggtgaaggtggtgggcctgtatggcttcatgctgagcatcagcccccggctgaccctgctgagcctgctgcacatgcccttcaccatcgctgctgagaaggtgtacaacaccaggcaccaggaggtgctgcgggagatccaggatgctgtggcccgggccggccaggtggtgcgggaggccgtgggcggcctgcagacagtgcgcagctttggagctgaggagcacgaggtgtgccgctacaaggaggccctggagcagtgccggcagctgtactggaggcgggacctggagcgggccctgtacctgctgatccggcgggtgctgcacctgggcgtgcagatgctgatgctgagctgtggcctgcagcagatgcaggatggagagctgacccagggcagcctgctgtccttcatgatctaccaggagagcgtgggcagctatgtgcagaccctggtgtacatctacggggacatgctgagcaatgtgggcgctgctgagaaggtgttctcctacatggaccggcagcccaacctgcccagccctggcaccctggcccccaccaccctgcagggcgtggtgaagttccaggatgtgtcctttgcctaccccaacagaccagacaggcctgtgctgaagggcctgaccttcaccctgcggcctggagaggtgacagccctggtgggccccaatggaagtggcaagagcacagtggccgccctgctgcagaacctgtaccagcccactggaggccaggtgctgctggatgagaagcccatcagccagtatgagcactgctacctgcacagccaggtggtgtctgtgggccaggagcctgtgctcttcagcggctctgtgaggaacaacatcacctacggcctgcagagctgtgaagatgacaaggtgatggctgctgcccaggccgcccatgctgatgacttcatccaggagatggagcacggcatctacacagatgtgggggagaagggcagccagctggccgccggccagaagcagaggctggccatcgcccgggccctggtgcgggacccccgggtgctgatcctggatgaggccaccagcgccctggatgtgcagtgtgagcaggccctgcaggactggaacagcagaggagacagaacagtgctggtgattgcccaccggctgcagacagtgcagagggcccaccagatcctggtgctgcaggagggcaagctgcagaagctggcccagctgtag

SEQ ID NO: 174081 - DNA, 1962 bp, synthetic construct; identical to SEQ ID NO: 174074
  misc_feature 1..1962: note = Description of Artificial Sequence: Synthetic coding sequence
  source 1..1962: mol_type = other DNA

SEQ ID NO: 174082 - DNA, 1962 bp, synthetic construct; identical to SEQ ID NO: 174074
  misc_feature 1..1962: note = Description of Artificial Sequence: Synthetic coding sequence
  source 1..1962: mol_type = other DNA

SEQ ID NO: 174083 - DNA, 2061 bp, synthetic construct; identical to SEQ ID NO: 174073
  misc_feature 1..2061: note = Description of Artificial Sequence: Synthetic coding sequence
  source 1..2061: mol_type = other DNA

SEQ ID NO: 174084 - DNA, 1962 bp, synthetic construct
  misc_feature 1..1962: note = Description of Artificial Sequence: Synthetic coding sequence
  source 1..1962: mol_type = other DNA
atgaggctgcctgacctgcggccctggaccagcctgctgctggtggatgctgccctgctgtggctgctgcagggccccctgggcaccctgctgccccagggcctgcccggcctgtggctggagggcaccctgcggctgggcggcctgtggggcctgctgaagctgcggggcctgctgggctttgtgggcaccctgctgctgcccctgtgcctggccacccccctgactgtgtccctgcgggccctggtggccggggccagccgggcccccccagcccgggtggccagcgccccctggagctggctgctggtgggctacggggctgctggcctgtcctggagcctgtgggccgtgctgagccccccaggggcccaggagaaggagcaggaccaggtgaacaacaaggtgctgatgtggaggctgctgaagctgagcaggccagacctgcccctgctggtggccgccttcttcttcctggtgctggccgtgctgggggagaccctcatcccccactacagcggccgggtgattgacatcctgggcggggactttgacccccacgcctttgccagcgccatcttcttcatgtgcctcttctcctttggcagcagcctgtctgctggctgccggggcggctgcttcacctacaccatgagccgcatcaacctgcgcatccgggagcagctgttcagcagcctgctgcggcaggacctgggcttcttccaggagaccaagacaggagagctgaacagccggctgagcagtgacaccaccctgatgagcaactggctgcccctgaatgccaacgtgctgctgcggagcctggtgaaggtggtgggcctgtatggcttcatgctgagcatcagcccccggctgaccctgctgagcctgctgcacatgcccttcaccatcgctgctgagaaggtgtacaacaccaggcaccaggaggtgctgcgggagatccaggatgctgtggcccgggccggccaggtggtgcgggaggccgtgggcggcctgcagacagtgcgcagctttggagctgaggagcacgaggtgtgccgctacaaggaggccctggagcagtgccggcagctgtactggaggcgggacctggagcgggccctgtacctgctgatccggcgggtgctgcacctgggcgtgcagatgctgatgctgagctgtggcctgcagcagatgcaggatggagagctgacccagggcagcctgctgtccttcatgatctaccaggagagcgtgggcagctatgtgcagaccctggtgtacatctacggggacatgctgagcaatgtgggcgctgctgagaaggtgttctcctacatggaccggcagcccaacctgcccagccctggcaccctggcccccaccaccctgcagggcgtggtgaagttccaggatgtgtcctttgcctaccccaacagaccagacaggcctgtgctgaagggcctgaccttcaccctgcggcctggagaggtgacagccctggtgggccccaatggaagtggcaagagcacagtggccgccctgctgcagaacctgtaccagcccactggaggccaggtgctgctggatgagaagcccatcagccagtatgagcactgctacctgcacagccaggtggtgtctgtgggccaggagcctgtgctcttcagcggctctgtgaggaacaacatcacctacggcctgcagagctgtgaagatgacaaggtgatggctgctgcccaggccgcccatgctgatgacttcatccaggagatggagcacggcatctacacagatgtgggggagaagggcagccagctggccgccggccagaagcagaggctggccatcgcccgggccctggtgcgggacccccgggtgctgatcctggatgaggccaccagcgccctggatgtgcagtgtgagcaggccaagaccctgtggaagttcatgatcttctag

SEQ ID NO: 174085 - DNA, 1962 bp, synthetic construct; identical to SEQ ID NO: 174074
  misc_feature 1..1962: note = Description of Artificial Sequence: Synthetic coding sequence
  source 1..1962: mol_type = other DNA

SEQ ID NO: 174086 - DNA, 2112 bp, synthetic construct
  misc_feature 1..2112: note = Description of Artificial Sequence: Synthetic coding sequence
  source 1..2112: mol_type = other DNA
atgaggctgcctgacctgcggccctggaccagcctgctgctggtggatgctgccctgctgtggctgctgcagggccccctgggcaccctgctgccccagggcctgcccggcctgtggctggagggcaccctgcggctgggcggcctgtggggcctgctgaagctgcggggcctgctgggctttgtgggcaccctgctgctgcccctgtgcctggccacccccctgactgtgtccctgcgggccctggtggccggggccagccgggcccccccagcccgggtggccagcgccccctggagctggctgctggtgggctacggggctgctggcctgtcctggagcctgtgggccgtgctgagccccccaggggcccaggagaaggagcaggaccaggtgaacaacaaggtgctgatgtggaggctgctgaagctgagcaggccagacctgcccctgctggtggccgccttcttcttcctggtgctggccgtgctgggggagaccctcatcccccactacagcggccgggtgattgacatcctgggcggggactttgacccccacgcctttgccagcgccatcttcttcatgtgcctcttctcctttggcagcagcctgtctgctggctgccggggcggctgcttcacctacaccatgagccgcatcaacctgcgcatccgggagcagctgttcagcagcctgctgcggcaggacctgggcttcttccaggagaccaagacaggagagctgaacagccggctgagcagtgacaccaccctgatgagcaactggctgcccctgaatgccaacgtgctgctgcggagcctggtgaaggtggtgggcctgtatggcttcatgctgagcatcagcccccggctgaccctgctgagcctgctgcacatgcccttcaccatcgctgctgagaaggtgtacaacaccaggcaccaggaggtgctgcgggagatccaggatgctgtggcccgggccggccaggtggtgcgggaggccgtgggcggcctgcagacagtgcgcagctttggagctgaggagcacgaggtgtgccgctacaaggaggccctggagcagtgccggcagctgtactggaggcgggacctggagcgggccctgtacctgctggtgcggcgggtgctgcacctgggcgtgcagatgctgatgctgagctgtggcctgcagcagatgcaggatggagagctgacccagggcagcctgctgtccttcatgatctaccaggagagcgtgggcagctatgtgcagaccctggtgtacatctacggggacatgctgagcaatgtgggcgctgctgagaaggtgttctcctacatggaccggcagcccaacctgcccagccctggcaccctggcccccaccaccctgcagggcgtggtgaagttccaggatgtgtcctttgcctaccccaacagaccagacaggcctgtgctgaagggcctgaccttcaccctgcggcctggagaggtgacagccctggtgggccccaatggaagtggcaagagcacagtggccgccctgctgcagaacctgtaccagcccactggaggccaggtgctgctggatgagaagcccatcagccagtatgagcactgctacctgcacagccaggtggtgtctgtgggccaggagcctgtgctcttcagcggctctgtgaggaacaacatcgcctacggcctgcagagctgtgaagatgacaaggtgatggctgctgcccaggccgcccatgctgatgacttcatccaggagatggagcacggcatctacacagatgtgggggagaagggcagccagctggccgccggccagaagcagaggctggccatcgcccgggccctggtgcgggacccccgggtgctgatcctggatgaggccaccagcgccctggatgtgcagtgtgagcaggccctgcaggactggaacagcagaggagacagaacagtgctggtgattgcccaccggctgcaggccgtgcagagggcccaccagatcctggtgctgcaggagggcaagctgcagaagctggcccagctgcaggagggccaggacctgtacagccggctggtgcagcagaggctgatggactag

SEQ ID NO: 174087 - DNA, 2112 bp, synthetic construct; identical to SEQ ID NO: 174086
  misc_feature 1..2112: note = Description of Artificial Sequence: Synthetic coding sequence
  source 1..2112: mol_type = other DNA

SEQ ID NO: 174088 - DNA, 2112 bp, synthetic construct; identical to SEQ ID NO: 174086
  misc_feature 1..2112: note = Description of Artificial Sequence: Synthetic coding sequence
  source 1..2112: mol_type = other DNA

SEQ ID NO: 174089 - DNA, 2310 bp, synthetic construct
  misc_feature 1..2310: note = Description of Artificial Sequence: Synthetic coding sequence
  source 1..2310: mol_type = other DNA
atgaggctgcctgacctgcggccctggaccagcctgctgctggtggatgctgccctgctgtggctgctgcagggccccctgggcaccctgctgccccagggcctgcccggcctgtggctggagggcaccctgcggctgggcggcctgtggggcctgctgaagctgcggggcctgctgggctttgtgggcaccctgctgctgcccctgtgcctggccacccccctgactgtgtccctgcgggccctggtggccggggccagccgggcccccccagcccgggtggccagcgccccctggagctggctgctggtgggctacggggctgctggcctgtcctggagcctgtgggccgtgctgagccccccaggggcccaggagaaggagcaggaccaggtgaacaacaaggtgctgatgtggaggctgctgaagctgagcaggccagacctgcccctgctggtggccgccttcttcttcctggtgctggccgtgctgggggagaccctcatcccccactacagcggccgggtgattgacatcctgggcggggactttgacccccacgcctttgccagcgccatcttcttcatgtgcctcttctcctttggcagcagcctgtctgctggctgccggggcggctgcttcacctacaccatgagccgcatcaacctgcgcatccgggagcagctgttcagcagcctgctgcggcaggacctgggcttcttccaggagaccaagacaggagagctgaacagccggctgagcagtgacaccaccctgatgagcaactggctgcccctgaatgccaacgtgctgctgcggagcctggtgaaggtggtgggcctgtatggcttcatgctgagcatcagcccccggctgaccctgctgagcctgctgcacatgcccttcaccatcgctgctgagaaggtgtacaacaccaggcaccaggaggtgctgcgggagatccaggatgctgtggcccgggccggccaggtggtgcgggaggccgtgggcggcctgcagacagtgcgcagctttggagctgaggagcacgaggtgtgccgctacaaggaggccctggagcagtgccggcagctgtactggaggcgggacctggagcgggccctgtacctgctggtgcggcgggtgctgcacctgggcgtgcagatgctgatgctgagctgtggcctgcagcagatgcaggatggagagctgacccagggcagcctgctgtccttcatgatctaccaggagagcgtgggcagctatgtgcagaccctggtgtacatctacggggacatgctgagcaatgtgggcgctgctgagaaggtgttctcctacatggaccggcagcccaacctgcccagccctggcaccctggcccccaccaccctgcagggcgtggtgaagttccaggatgtgtcctttgcctaccccaacagaccagacaggcctgtgctgaagggcctgaccttcaccctgcggcctggagaggtgacagccctggtgggccccaatggaagtggcaagagcacagtggccgccctgctgcagaacctgtaccagcccactggaggccaggtgctgctggatgagaagcccatcagccagtatgagcactgctacctgcacagccaggtggtgtctgtgggccaggagcctgtgctcttcagcggctctgtgaggaacaacatcgcctacggcctgcagagctgtgaagatgacaaggtgatggctgctgcccaggccgcccatgctgatgacttcatccaggagatggagcacggcatctacacagatgtgggggagaagggcagccagctggccgccggccagaagcagaggctggccatcgcccgggccctggtgcgggacccccgggtgctgatcctggatgaggccaccagcgccctggatgtgcagtgtgagcaggccaacggcttctgggtgggccccctgggcggcggcagcgccagcgagagtgaccccaccggcttcctgcatgacagccgccaccggctgagcagtgatgtgggcatgtttgtggccctgaccaagctgggccagccagatgctgagcagtggaacagccggctggacctgctggagaggagccggcaggccgtggatggagtgtgccgccacaactaccgcctgggcgcccccttcaccgtgggcaggaaggtgcagcctgaggtgacagtgtacccagagaggacccccctgctgcaccagcacaacctgctgcactgcagcgtgacaggcttctacccaggggacatcaagatcaagtggttcctgaatggccagtag

SEQ ID NO: 174090 - DNA, 2310 bp, synthetic construct; identical to SEQ ID NO: 174089
  misc_feature 1..2310: note = Description of Artificial Sequence: Synthetic coding sequence
  source 1..2310: mol_type = other DNA

SEQ ID NO: 174091 - DNA, 2310 bp, synthetic construct; identical to SEQ ID NO: 174089
  misc_feature 1..2310: note = Description of Artificial Sequence: Synthetic coding sequence
  source 1..2310: mol_type = other DNA

SEQ ID NO: 174092 - DNA, 2310 bp, synthetic construct
  misc_feature 1..2310: note = Description of Artificial Sequence: Synthetic coding sequence
  source 1..2310: mol_type = other DNA
atgaggctgcctgacctgcggccctggaccagcctgctgctggtggatgctgccctgctgtggctgctgcagggccccctgggcaccctgctgccccagggcctgcccggcctgtggctggagggcaccctgcggctgggcggcctgtggggcctgctgaagctgcggggcctgctgggctttgtgggcaccctgctgctgcccctgtgcctggccacccccctgactgtgtccctgcgggccctggtggccggggccagccgggcccccccagcccgggtggccagcgccccctggagctggctgctggtgggctacggggctgctggcctgtcctggagcctgtgggccgtgctgagccccccaggggcccaggagaaggagcaggaccaggtgaacaacaaggtgctgatgtggaggctgctgaagctgagcaggccagacctgcccctgctggtggccgccttcttcttcctggtgctggccgtgctgggggagaccctcatcccccactacagcggccgggtgattgacatcctgggcggggactttgacccccacgcctttgccagcgccatcttcttcatgtgcctcttctcctttggcagcagcctgtctgctggctgccggggcggctgcttcacctacaccatgagccgcatcaacctgcgcatccgggagcagctgttcagcagcctgctgcggcaggacctgggcttcttccaggagaccaagacaggagagctgaacagccggctgagcagtgacaccaccctgatgagcaactggctgcccctgaatgccaacgtgctgctgcggagcctggtgaaggtggtgggcctgtatggcttcatgctgagcatcagcccccggctgaccctgctgagcctgctgcacatgcccttcaccatcgctgctgagaaggtgtacaacaccaggcaccaggaggtgctgcgggagatccaggatgctgtggcccgggccggccaggtggtgcgggaggccgtgggcggcctgcagacagtgcgcagctttggagctgaggagcacgaggtgtgccgctacaaggaggccctggagcagtgccggcagctgtactggaggcgggacctggagcgggccctgtacctgctgatccggcgggtgctgcacctgggcgtgcagatgctgatgctgagctgtggcctgcagcagatgcaggatggagagctgacccagggcagcctgctgtccttcatgatctaccaggagagcgtgggcagctatgtgcagaccctggtgtacatctacggggacatgctgagcaatgtgggcgctgctgagaaggtgttctcctacatggaccggcagcccaacctgcccagccctggcaccctggcccccaccaccctgcagggcgtggtgaagttccaggatgtgtcctttgcctaccccaacagaccagacaggcctgtgctgaagggcctgaccttcaccctgcggcctggagaggtgacagccctggtgggccccaatggaagtggcaagagcacagtggccgccctgctgcagaacctgtaccagcccactggaggccaggtgctgctggatgagaagcccatcagccagtatgagcactgctacctgcacagccaggtggtgtctgtgggccaggagcctgtgctcttcagcggctctgtgaggaacaacatcacctacggcctgcagagctgtgaagatgacaaggtgatggctgctgcccaggccgcccatgctgatgacttcatccaggagatggagcacggcatctacacagatgtgggggagaagggcagccagctggccgccggccagaagcagaggctggccatcgcccgggccctggtgcgggacccccgggtgctgatcctggatgaggccaccagcgccctggatgtgcagtgtgagcaggccaacggcttctgggtgggccccctgggcggcggcagcgccagcgagagtgaccccaccggcttcctgcatgacagccgccaccggctgagcagtgatgtgggcatgtttgtggccctgaccaagctgggccagccagatgctgagcagtggaacagccggctggacctgctggagaggagccggcaggccgtggatggagtgtgccgccacaactaccgcctgggcgcccccttcaccgtgggcaggaaggtgcagcctgaggtgacagtgtacccagagaggacccccctgctgcaccagcacaacctgctgcactgcagcgtgacaggcttctacccaggggacatcaagatcaagtggttcctgaatggccagtag

SEQ ID NO: 174093 - DNA, 2310 bp, synthetic construct; identical to SEQ ID NO: 174089
  misc_feature 1..2310: note = Description of Artificial Sequence: Synthetic coding sequence
  source 1..2310: mol_type = other DNA

SEQ ID NO: 174094 - DNA, 2310 bp, synthetic construct; identical to SEQ ID NO: 174089
  misc_feature 1..2310: note = Description of Artificial Sequence: Synthetic coding sequence
  source 1..2310: mol_type = other DNA

SEQ ID NO: 174095 - DNA, 2697 bp, synthetic construct
  misc_feature 1..2697: note = Description of Artificial Sequence: Synthetic coding sequence
  source 1..2697: mol_type = other DNA
atggtgtgggaccggcagaccaagatggagtatgagtggaagccagatgagcagggcctgcagcagatcctgcagctgctgaaggagagccagagcccagacaccaccatccagaggacagtgcagcagaagctggagcagctgaaccagtacccagacttcaacaactacctgatctttgtgctgaccaagctgaagtcagaagatgagcccaccaggagcctgagcggcctcatcctgaagaacaacgtgaaggcccacttccagaacttccccaatggagtgacagacttcatcaagtctgagtgcctgaacaacattggagacagcagccccctcatccgggccaccgtgggcatcctgatcaccaccatcgccagcaagggggagctgcagaactggccagacctgctgcccaagctgtgcagcctgctggacagcgaggactacaacacctgtgagggcgcctttggagccctgcagaagatctgtgaagattctgctgagatcctggacagtgatgtgctggaccggcccctgaacatcatgatccccaagttcctgcagttcttcaagcacagcagccccaagatccgcagccatgctgtggcctgtgtgaaccagttcatcatcagcaggacccaggccctgatgctgcacatcgacagcttcatcgagaacctgtttgccctggccggagatgaggagcctgaggtgaggaagaatgtgtgccgggccctggtgatgctgctggaggtgaggatggaccggctgctgccccacatgcacaacatcgtggagtacatgctgcagaggacccaggaccaggatgaaaatgtggccctggaggcctgtgagttctggctgaccctggccgagcagcccatctgcaaggatgtgctggtgcgccacctgcccaagctgatccctgtgctggtgaatggcatgaagtacagcgacatcgacatcatcctgctgaagggagatgtggaggaggatgagaccatcccagattctgagcaggacatccggccccgcttccacaggagcaggacagtggcccagcagcatgatgaagatggcatcgaggaggaggatgatgatgatgatgaaattgatgatgatgacaccatcagtgactggaacctgaggaaatgttctgctgctgccctggatgtgctggccaacgtgtacagagatgagctgctgccccacatcctgcccctgctgaaggagctgctcttccaccacgagtgggtggtgaaggagagcggcatcctggtgctgggcgccatcgccgagggctgcatgcagggcatgatcccctacctgcctgagctgatcccccacctgatccagtgcctgagtgacaagaaggccctggtgcgcagcatcacctgctggaccctgagccgctatgcccactgggtggtgtcccagcccccagacacctacctgaagcccctgatgacagagctgctgaagaggatcctggacagcaacaagagggtgcaggaggccgcctgcagcgcctttgccaccctggaggaggaggcctgcacagagctggtgccctacctggcctacatcctggacaccctggtgtttgccttcagcaagtaccagcacaagaacctgctgatcctgtatgatgccatcggcaccctggccgacagcgtgggccaccacctgaacaagccagagtacatccagatgctgatgcctcctctcatccagaagtggaacatgctgaaggatgaggacaaggacctcttccccctgctggagtgcctgagctctgtggccacagccctgcagagcggcttcctgccctactgtgagcctgtgtaccagagatgtgtgaacctggtgcagaagaccctggcccaggccatgctgaacaatgcccagcctgaccagtatgaggccccagacaaggacttcatgattgtggccctggacctgctgagcggcctggccgagggcctgggcggcaacatcgagcagctggtggcccggagcaacatcctgaccctgatgtaccagtgcatgcaggacaagatgcctgaggtgcggcagagcagctttgccctgctgggggacctgaccaaggcctgcttccagcacgtgaagccctgcatcgctgacttcatgcccatcctgggcaccaacctgaaccctgagttcatctctgtgtgcaacaatgccacctgggccatcggggagatcagcatccagatgggcatcgagatgcagccctacatccccatggtgctgcaccagctggtggagatcatcaaccggcccaacacccccaagaccctgctggagaacacagccatcaccatcggccgcctgggctacgtgtgcccccaggaggtggcccccatgctgcagcagttcatccggccctggtgcaccagcctgaggaacatccgggacaatgaggagaaggacagcgccttccggggcatctgcaccatgatctctgtgaaccccagcggggtcatccaggacttcatcttcttctgtgatgctgtggcctcctggatcaaccccaaggatgacctgcgggacatgttctgcaagatcctgcacggcttcaagaaccaggtgggagatgagaactggaggcgcttcagtgaccagttccccctgcccctgaaggagcggctggccgccttctacggcgtgtag

SEQ ID NO: 174096 - DNA, 387 bp, synthetic construct
  misc_feature 1..387: note = Description of Artificial Sequence: Synthetic coding sequence
  source 1..387: mol_type = other DNA
atggagtatgagtggaagccagatgagcagggcctgcagcagatcctgcagctgctgaaggagagccagagcccagacaccaccatccagaggacagtgcagcagaagctggagcagctgaaccagtacccagacttcaacaactacctgatctttgtgctgaccaagctgaagtcagaagatgagcccaccaggagcctgagcggcctcatcctgaagaacaacgtgaaggcccacttccagaacttccccaatggagtgacagacttcatcaagtctgagtgcctgaacaacattggagacagcagccccctcatccgggccaccgtgggcctgaccctgctgcacgtgtccatcagcctgagctctgtgggcctgaagctgtag

SEQ ID NO: 174097 - DNA, 2547 bp, synthetic construct
  misc_feature 1..2547: note = Description of Artificial Sequence: Synthetic coding sequence
  source 1..2547: mol_type = other DNA
atggtgtgggaccggcagaccaagatggagtatgagtggaagccagatgagcagggcctgcagcagatcctgcagctgctgaaggagagccagagcccagacaccaccatccagaggacagtgcagcagaagctggagcagctgaaccagtacccagacttcaacaactacctgatctttgtgctgaccaagctgaagtctgagggcatcctgatcaccaccatcgccagcaagggggagctgcagaactggccagacctgctgcccaagctgtgcagcctgctggacagcgaggactacaacacctgtgagggcgcctttggagccctgcagaagatctgtgaagattctgctgagatcctggacagtgatgtgctggaccggcccctgaacatcatgatccccaagttcctgcagttcttcaagcacagcagccccaagatccgcagccatgctgtggcctgtgtgaaccagttcatcatcagcaggacccaggccctgatgctgcacatcgacagcttcatcgagaacctgtttgccctggccggagatgaggagcctgaggtgaggaagaatgtgtgccgggccctggtgatgctgctggaggtgaggatggaccggctgctgccccacatgcacaacatcgtggagtacatgctgcagaggacccaggaccaggatgaaaatgtggccctggaggcctgtgagttctggctgaccctggccgagcagcccatctgcaaggatgtgctggtgcgccacctgcccaagctgatccctgtgctggtgaatggcatgaagtacagcgacatcgacatcatcctgctgaagggagatgtggaggaggatgagaccatcccagattctgagcaggacatccggccccgcttccacaggagcaggacagtggcccagcagcatgatgaagatggcatcgaggaggaggatgatgatgatgatgaaattgatgatgatgacaccatcagtgactggaacctgaggaaatgttctgctgctgccctggatgtgctggccaacgtgtacagagatgagctgctgccccacatcctgcccctgctgaaggagctgctcttccaccacgagtgggtggtgaaggagagcggcatcctggtgctgggcgccatcgccgagggctgcatgcagggcatgatcccctacctgcctgagctgatcccccacctgatccagtgcctgagtgacaagaaggccctggtgcgcagcatcacctgctggaccctgagccgctatgcccactgggtggtgtcccagcccccagacacctacctgaagcccctgatgacagagctgctgaagaggatcctggacagcaacaagagggtgcaggaggccgcctgcagcgcctttgccaccctggaggaggaggcctgcacagagctggtgccctacctggcctacatcctggacaccctggtgtttgccttcagcaagtaccagcacaagaacctgctgatcctgtatgatgccatcggcaccctggccgacagcgtgggccaccacctgaacaagccagagtacatccagatgctgatgcctcctctcatccagaagtggaacatgctgaaggatgaggacaaggacctcttccccctgctggagtgcctgagctctgtggccacagccctgcagagcggcttcctgccctactgtgagcctgtgtaccagagatgtgtgaacctggtgcagaagaccctggcccaggccatgctgaacaatgcccagcctgaccagtatgaggccccagacaaggacttcatgattgtggccctggacctgctgagcggcctggccgagggcctgggcggcaacatcgagcagctggtggcccggagcaacatcctgaccctgatgtaccagtgcatgcaggacaagatgcctgaggtgcggcagagcagctttgccctgctgggggacctgaccaaggcctgcttccagcacgtgaagccctgcatcgctgacttcatgcccatcctgggcaccaacctgaaccctgagttcatctctgtgtgcaacaatgccacctgggccatcggggagatcagcatccagatgggcatcgagatgcagccctacatccccatggtgctgcaccagctggtggagatcatcaaccggcccaacacccccaagaccctgctggagaacacagccatcaccatcggccgcctgggctacgtgtgcccccaggaggtggcccccatgctgcagcagttcatccggccctggtgcaccagcctgaggaacatccgggacaatgaggagaaggacagcgccttccggggcatctgcaccatgatctctgtgaaccccagcggggtcatccaggacttcatcttcttctgtgatgctgtggcctcctggatcaaccccaaggatgacctgcgggacatgttctgcaagatcctgcacggcttcaagaaccaggtgggagatgagaactggaggcgcttcagtgaccagttccccctgcccctgaaggagcggctggccgccttctacggcgtgtag

SEQ ID NO: 174098 - DNA, 2673 bp, synthetic construct
  misc_feature 1..2673: note = Description of Artificial Sequence: Synthetic coding sequence
  source 1..2673: mol_type = other DNA
atggagtatgagtggaagccagatgagcagggcctgcagcagatcctgcagctgctgaaggagagccagagcccagacaccaccatccagaggacagtgcagcagaagctggagcagctgaaccagtacccagacttcaacaactacctgatctttgtgctgaccaagctgaagtcagaagatgagcccaccaggagcctgagcggcctcatcctgaagaacaacgtgaaggcccacttccagaacttccccaatggagtgacagacttcatcaagtctgagtgcctgaacaacattggagacagcagccccctcatccgggccaccgtgggcatcctgatcaccaccatcgccagcaagggggagctgcagaactggccagacctgctgcccaagctgtgcagcctgctggacagcgaggactacaacacctgtgagggcgcctttggagccctgcagaagatctgtgaagattctgctgagatcctggacagtgatgtgctggaccggcccctgaacatcatgatccccaagttcctgcagttcttcaagcacagcagccccaagatccgcagccatgctgtggcctgtgtgaaccagttcatcatcagcaggacccaggccctgatgctgcacatcgacagcttcatcgagaacctgtttgccctggccggagatgaggagcctgaggtgaggaagaatgtgtgccgggccctggtgatgctgctggaggtgaggatggaccggctgctgccccacatgcacaacatcgtggagtacatgctgcagaggacccaggaccaggatgaaaatgtggccctggaggcctgtgagttctggctgaccctggccgagcagcccatctgcaaggatgtgctggtgcgccacctgcccaagctgatccctgtgctggtgaatggcatgaagtacagcgacatcgacatcatcctgctgaagggagatgtggaggaggatgagaccatcccagattctgagcaggacatccggccccgcttccacaggagcaggacagtggcccagcagcatgatgaagatggcatcgaggaggaggatgatgatgatgatgaaattgatgatgatgacaccatcagtgactggaacctgaggaaatgttctgctgctgccctggatgtgctggccaacgtgtacagagatgagctgctgccccacatcctgcccctgctgaaggagctgctcttccaccacgagtgggtggtgaaggagagcggcatcctggtgctgggcgccatcgccgagggctgcatgcagggcatgatcccctacctgcctgagctgatcccccacctgatccagtgcctgagtgacaagaaggccctggtgcgcagcatcacctgctggaccctgagccgctatgcccactgggtggtgtcccagcccccagacacctacctgaagcccctgatgacagagctgctgaagaggatcctggacagcaacaagagggtgcaggaggccgcctgcagcgcctttgccaccctggaggaggaggcctgcacagagctggtgccctacctggcctacatcctggacaccctggtgtttgccttcagcaagtaccagcacaagaacctgctgatcctgtatgatgccatcggcaccctggccgacagcgtgggccaccacctgaacaagccagagtacatccagatgctgatgcctcctctcatccagaagtggaacatgctgaaggatgaggacaaggacctcttccccctgctggagtgcctgagctctgtggccacagccctgcagagcggcttcctgccctactgtgagcctgtgtaccagagatgtgtgaacctggtgcagaagaccctggcccaggccatgctgaacaatgcccagcctgaccagtatgaggccccagacaaggacttcatgattgtggccctggacctgctgagcggcctggccgagggcctgggcggcaacatcgagcagctggtggcccggagcaacatcctgaccctgatgtaccagtgcatgcaggacaagatgcctgaggtgcggcagagcagctttgccctgctgggggacctgaccaaggcctgcttccagcacgtgaagccctgcatcgctgacttcatgcccatcctgggcaccaacctgaaccctgagttcatctctgtgtgcaacaatgccacctgggccatcggggagatcagcatccagatgggcatcgagatgcagccctacatccccatggtgctgcaccagctggtggagatcatcaaccggcccaacacccccaagaccctgctggagaacacagccatcaccatcggccgcctgggctacgtgtgcccccaggaggtggcccccatgctgcagcagttcatccggccctggtgcaccagcctgaggaacatccgggacaatgaggagaaggacagcgccttccggggcatctgcaccatgatctctgtgaaccccagcggggtcatccaggacttcatcttcttctgtgatgctgtggcctcctggatcaaccccaaggatgacctgcgggacatgttctgcaagatcctgcacggcttcaagaaccaggtgggagatgagaactggaggcgcttcagtgaccagttccccctgcccctgaaggagcggctggccgccttctacggcgtgtag

SEQ ID NO: 174099 - DNA, 2664 bp, synthetic construct
  misc_feature 1..2664: note = Description of Artificial Sequence: Synthetic coding sequence
  source 1..2664: mol_type = other DNA
atggactggcagccagatgagcagggcctgcagcaggtgctgcagctgctgaaggacagccagagccccaacacagccacccagagaattgtgcaggacaagctgaagcagctgaaccagttcccagacttcaacaactacctgatctttgtgctgacccggctgaagtcagaagatgagcccaccaggagcctgagcggcctcatcctgaagaacaacgtgaaggcccactaccagagcttccccccacctgtggccgacttcatcaagcaggagtgcctgaacaacattggagatgccagcagcctcatccgggccaccatcggcatcctgatcaccaccatcgccagcaagggggagctgcagatgtggccagagctgctgccccagctgtgcaacctgctgaacagcgaggactacaacacctgtgagggcgcctttggagccctgcagaagatctgtgaggacagcagcgagctgctggacagtgatgccctgaaccggcccctgaacatcatgatccccaagttcctgcagttcttcaagcactgcagccccaagatccgcagccacgccatcgcctgtgtgaaccagttcatcatggaccgggcccaggccctgatggacaacatcgacaccttcatcgagcacctgtttgccctggccgtggatgatgatcctgaggtgaggaagaatgtgtgccgggccctggtgatgctgctggaggtgagaattgacaggctcatcccccacatgcacagcatcatccagtacatgctgcagaggacccaggaccatgatgaaaatgtggccctggaggcctgtgagttctggctgaccctggccgagcagcccatctgcaaggaggtgctggccagccacctggtgcagctgatccccatcctggtgaatggcatgaagtacagcgagattgacatcatcctgctgaagggagatgtggaggaggatgaagctgtgcctgattctgagcaggacatcaagccccgcttccacaagagcaggacagtgaccctgccccatgaagctgagaggccagatggctctgaagatgctgaagatgatgatgatgatgatgccctgagtgactggaacctgaggaagtgcagcgctgctgccctggatgtgctggccaacgtgttccgggaggagctgctgccccacctgctgcccctgctgaagggcctgctcttccaccctgagtgggtggtgaaggagagcggcatcctggtgctgggcgccatcgccgagggctgcatgcagggcatggtgccctacctgcctgagctgatcccccacctgatccagtgcctgagtgacaagaaggccctggtgcgcagcatcgcctgctggaccctgagccgctatgcccactgggtggtgtcccagcccccagacatgcacctgaagcccctgatgacagagctgctgaagaggatcctggatggcaacaagagggtgcaggaggccgcctgcagcgcctttgccaccctggaggaggaggcctgcacagagctggtgccctacctgagctacatcctggacaccctggtgtttgccttcggcaagtaccagcacaagaacctgctgatcctgtatgatgccatcggcaccctggccgacagcgtgggccaccacctgaaccagcctgagtacatccagaagctgatgccacccctcatccagaagtggaatgagctgaaggatgaggacaaggacctcttccccctgctggagtgcctgagctctgtggccacagccctgcagagcggcttcctgccctactgtgagcctgtgtaccagagatgtgtgaccctggtgcagaagaccctggcccaggccatgatgtacacccagcaccctgagcagtatgaggccccagacaaggacttcatgattgtggccctggacctgctgagcggcctggccgagggcctgggcggccacgtggagcagctggtggcccggagcaacatcatgaccctgctcttccagtgcatgcaggacagcatgcctgaggtgcggcagagcagctttgccctgctgggggacctgaccaaggcctgcttcatccacgtgaagccctgcatcgccgagttcatgcccatcctgggcaccaacctgaaccctgagttcatctctgtgtgcaacaatgccacctgggccatcggggagatctgcatgcagatgggcgctgagatgcagccctacgtgcagatggtgctgaacaacctggtggagatcatcaaccggcccaacacccccaagaccctgctggagaacacagccatcaccatcggccgcctgggctacgtgtgcccccaggaggtggcccccatgctgcagcagttcatccggccctggtgcaccagcctgaggaacatccgggacaatgaggagaaggacagcgccttccggggcatctgcatgatgattggagtgaaccctgggggcgtggtgcaggacttcatcttcttctgtgatgctgtggcctcctgggtgagccccaaggatgacctgcgggacatgttctacaagatcctgcacggcttcaaggaccaggtgggggaggacaactggcagcagttcagcgagcagttcccccccctgctgaaggagcggctggccgccttctatggagtgtag

SEQ ID NO: 174100 - DNA, 2100 bp, synthetic construct
  misc_feature 1..2100: note = Description of Artificial Sequence: Synthetic coding sequence
  source 1..2100: mol_type = other DNA
atggactggcagccagatgagcagggcctgcagcaggtgctgcagctgctgaaggacagccagagccccaacacagccacccagagaattgtgcaggacaagctgaagcagctgaaccagttcccagacttcaacaactacctgatctttgtgctgacccggctgaagtcagaagatgagcccaccaggagcctgagcggcctcatcctgaagaacaacgtgaaggcccactaccagagcttccccccacctgtggccgacttcatcaagcaggagtgcctgaacaacattggagatgccagcagcctcatccgggccaccatcggcatcctgatcaccaccatcgccagcaagggggagctgcagatgtggccagagctgctgccccagctgtgcaacctgctgaacagcgaggactacaacacctgtgagggcgcctttggagccctgcagaagatctgtgaggacagcagcgagctgctggacagtgatgccctgaaccggcccctgaacatcatgatccccaagttcctgcagttcttcaagcactgcagccccaagatccgcagccacgccatcgcctgtgtgaaccagttcatcatggaccgggcccaggccctgatggacaacatcgacaccttcatcgagcacctgtttgccctggccgtggatgatgatcctgaggtgaggaagaatgtgtgccgggccctggtgatgctgctggaggtgagaattgacaggctcatcccccacatgcacagcatcatccagtacatgctgcagaggacccaggaccatgatgaaaatgtggccctggaggcctgtgagttctggctgaccctggccgagcagcccatctgcaaggaggtgctggccagccacctggtgcagctgatccccatcctggtgaatggcatgaagtacagcgagattgacatcatcctgctgaagggagatgtggaggaggatgaagctgtgcctgattctgagcaggacatcaagccccgcttccacaagagcaggacagtgaccctgccccatgaagctgagaggccagatggctctgaagatgctgaagatgatgatgatgatgatgccctgagtgactggaacctgaggaagtgcagcgctgctgccctggatgtgctggccaacgtgttccgggaggagctgctgccccacctgctgcccctgctgaagggcctgctcttccaccctgagtgggtggtgaaggagagcggcatcctggtgctgggcgccatcgccgagggctgcatgcagggcatggtgccctacctgcctgagctgatcccccacctgatccagtgcctgagtgacaagaaggccctggtgcgcagcatcgcctgctggaccctgagccgctatgcccactgggtggtgtcccagcccccagacatgcacctgaagcccctgatgacagagctgctgaagaggatcctggatggcaacaagagggtgcaggaggccgcctgcagcgcctttgccaccctggaggaggaggcctgcacagagctggtgccctacctgagctacatcctggacaccctggtgtttgccttcggcaagtaccagcacaagaacctgctgatcctgtatgatgccatcggcaccctggccgacagcgtgggccaccacctgaaccagcctgagtacatccagaagctgatgccacccctcatccagaagtggaatgagctgaaggatgaggacaaggacctcttccccctgctggagtgcctgagctctgtggccacagccctgcagagcggcttcctgccctactgtgagcctgtgtaccagagatgtgtgaccctggtgcagaagaccctggcccaggccatgatgtacacccagcaccctgagcagtatgaggccccagacaaggacttcatgattgtggccctggacctgctgagcggcctggccgagggcctgggcggccacgtggagcagctggtggcccacagccccagcttccccccccaccccctgcccccagctggcagccgggtgtgcccctttgtgacagtgctgtgctggggcctggccccccgctggagggagatccccctggtgtag

SEQ ID NO: 174101 - DNA, 2694 bp, synthetic construct
  misc_feature 1..2694: note = Description of Artificial Sequence: Synthetic coding sequence
  source 1..2694: mol_type = other DNA
atggactggcagccagatgagcagggcctgcagcaggtgctgcagctgctgaaggacagccagagccccaacacagccacccagagaattgtgcaggacaagctgaagcagctgaaccagttcccagacttcaacaactacctgatctttgtgctgacccggctgaagtcagaagatgagcccaccaggagcctgagcggcctcatcctgaagaacaacgtgaaggcccactaccagagcttccccccacctgtggccgacttcatcaagcaggagtgcctgaacaacattggagatgccagcagcctcatccgggccaccatcggcatcctgatcaccaccatcgccagcaagggggagctgcagatgtggccagagctgctgccccagctgtgcaacctgctgaacagcgaggactacaacacctgtgagggcgcctttggagccctgcagaagatctgtgaggacagcagcgagctgctggacagtgatgccctgaaccggcccctgaacatcatgatccccaagttcctgcagttcttcaagcactgcagccccaagatccgcagccacgccatcgcctgtgtgaaccagttcatcatggaccgggcccaggccctgatggacaacatcgacaccttcatcgagcacctgtttgccctggccgtggatgatgatcctgaggtgaggaagaatgtgtgccgggccctggtgatgctgctggaggtgagaattgacaggctcatcccccacatgcacagcatcatccagtacatgctgcagaggacccaggaccatgatgaaaatgtggccctggaggcctgtgagttctggctgaccctggccgagcagcccatctgcaaggaggtgctggccagccacctggtgcagctgatccccatcctggtgaatggcatgaagtacagcgagattgacatcatcctgctgaagggagatgtggaggaggatgaagctgtgcctgattctgagcaggacatcaagccccgcttccacaagagcaggacagtgaccctgccccatgaagctgagaggccagatggctctgaagatgctgaagatgatgatgatgatgatgccctgagtgactggaacctgaggaagtgcagcgctgctgccctggatgtgctggccaacgtgttccgggaggagctgctgccccacctgctgcccctgctgaagggcctgctcttccaccctgagtgggtggtgaaggagagcggcatcctggtgctgggcgccatcgccgagggctgcatgcagggcatggtgccctacctgcctgagctgatcccccacctgatccagtgcctgagtgacaagaaggccctggtgcgcagcatcgcctgctggaccctgagccgctatgcccactgggtggtgtcccagcccccagacatgcacctgaagcccctgatgacagagctgctgaagaggatcctggatggcaacaagagggtgcaggaggccgcctgcagcgcctttgccaccctggaggaggaggcctgcacagagctggtgccctacctgagctacatcctggacaccctggtgtttgccttcggcaagtaccagcacaagaacctgctgatcctgtatgatgccatcggcaccctggccgacagcgtgggccaccacctgaaccagcctgagtacatccagaagctgatgccacccctcatccagaagtggaatgagctgaaggatgaggacaaggacctcttccccctgctggagtgcctgagctctgtggccacagccctgcagagcggcttcctgccctactgtgagcctgtgtaccagagatgtgtgaccctggtgcagaagaccctggcccaggccatgatgtacacccagcaccctgagcagtatgaggccccagacaaggacttcatgattgtggccctggacctgctgagcggcctggccgagggcctgggcggccacgtggagcagctggtggcccggagcaacatcatgaccctgctcttccagtgcatgcaggacagcatgcctgaggtgcggcagagcagctttgccctgctgggggacctgaccaaggcctgcttcatccacgtgaagccctgcatcgccgagttcatgcccatcctgggcaccaacctgaaccctgagttcatctctgtgtgcaacaatgccacctgggccatcggggagatctgcatgcagatgggcgctgagatgcagccctacgtgcagatggtgctgaacaacctggtggagatcatcaaccggcccaacacccccaagaccctgctggagaacacaggccgcctgaccagccccagcgccatcccagccatcaccatcggccgcctgggctacgtgtgcccccaggaggtggcccccatgctgcagcagttcatccggccctggtgcaccagcctgaggaacatccgggacaatgaggagaaggacagcgccttccggggcatctgcatgatgattggagtgaaccctgggggcgtggtgcaggacttcatcttcttctgtgatgctgtggcctcctgggtgagccccaaggatgacctgcgggacatgttctacaagatcctgcacggcttcaaggaccaggtgggggaggacaactggcagcagttcagcgagcagttcccccccctgctgaaggagcggctggccgccttctatggagtgtag

SEQ ID NO: 174102 - DNA, 2664 bp, synthetic construct; identical to SEQ ID NO: 174099
  misc_feature 1..2664: note = Description of Artificial Sequence: Synthetic coding sequence
  source 1..2664: mol_type = other DNA

SEQ ID NO: 174103 - DNA, 2694 bp, synthetic construct; identical to SEQ ID NO: 174101
  misc_feature 1..2694: note = Description of Artificial Sequence: Synthetic coding sequence
  source 1..2694: mol_type = other DNA

SEQ ID NO: 174104 - DNA, 3156 bp, synthetic construct
  misc_feature 1..3156: note = Description of Artificial Sequence: Synthetic coding sequence
  source 1..3156: mol_type = other DNA
ggccagagcgtgggcggccggggcctcttccgggactgtgcctgcatcgaggagaccaccggggccggggccctgagccgcagcggggccggccccctggatgtggaggccgccggccccagccccagccgctgtgagggcggcggcagcctgcgggcccggagccggggccagagacatggccccccctgggatgagggcagcagcctgggccccatgaggatccggcgggcccctcctcctcctcctgtggcccgcttccacatccccccaccagccctgcccagcccccggctgcggggccggggctggaggtcctggaggggccccaggacctgggccggcgtggaccggcggcccccacctgtgcggcggggccgcagcagaagacatgctgccacagctgccagcggggcccctcctggcagccacacagagccccagaggccttctgctgaccccggcccctacctgcggagcctgccctgtgccatggactggcagccagatgagcagggcctgcagcaggtgctgcagctgctgaaggacagccagagccccaacacagccacccagagaattgtgcaggacaagctgaagcagctgaaccagttcccagacttcaacaactacctgatctttgtgctgacccggctgaagtcagaagatgagcccaccaggagcctgagcggcctcatcctgaagaacaacgtgaaggcccactaccagagcttccccccacctgtggccgacttcatcaagcaggagtgcctgaacaacattggagatgccagcagcctcatccgggccaccatcggcatcctgatcaccaccatcgccagcaagggggagctgcagatgtggccagagctgctgccccagctgtgcaacctgctgaacagcgaggactacaacacctgtgagggcgcctttggagccctgcagaagatctgtgaggacagcagcgagctgctggacagtgatgccctgaaccggcccctgaacatcatgatccccaagttcctgcagttcttcaagcactgcagccccaagatccgcagccacgccatcgcctgtgtgaaccagttcatcatggaccgggcccaggccctgatggacaacatcgacaccttcatcgagcacctgtttgccctggccgtggatgatgatcctgaggtgaggaagaatgtgtgccgggccctggtgatgctgctggaggtgagaattgacaggctcatcccccacatgcacagcatcatccagtacatgctgcagaggacccaggaccatgatgaaaatgtggccctggaggcctgtgagttctggctgaccctggccgagcagcccatctgcaaggaggtgctggccagccacctggtgcagctgatccccatcctggtgaatggcatgaagtacagcgagattgacatcatcctgctgaagggagatgtggaggaggatgaagctgtgcctgattctgagcaggacatcaagccccgcttccacaagagcaggacagtgaccctgccccatgaagctgagaggccagatggctctgaagatgctgaagatgatgatgatgatgatgccctgagtgactggaacctgaggaagtgcagcgctgctgccctggatgtgctggccaacgtgttccgggaggagctgctgccccacctgctgcccctgctgaagggcctgctcttccaccctgagtgggtggtgaaggagagcggcatcctggtgctgggcgccatcgccgagggctgcatgcagggcatggtgccctacctgcctgagctgatcccccacctgatccagtgcctgagtgacaagaaggccctggtgcgcagcatcgcctgctggaccctgagccgctatgcccactgggtggtgtcccagcccccagacatgcacctgaagcccctgatgacagagctgctgaagaggatcctggatggcaacaagagggtgcaggaggccgcctgcagcgcctttgccaccctggaggaggaggcctgcacagagctggtgccctacctgagctacatcctggacaccctggtgtttgccttcggcaagtaccagcacaagaacctgctgatcctgtatgatgccatcggcaccctggccgacagcgtgggccaccacctgaaccagcctgagtacatccagaagctgatgccacccctcatccagaagtggaatgagctgaaggatgaggacaaggacctcttccccctgctggagtgcctgagctctgtggccacagccctgcagagcggcttcctgccctactgtgagcctgtgtaccagagatgtgtgaccctggtgcagaagaccctggcccaggccatgatgtacacccagcaccctgagcagtatgaggccccagacaaggacttcatgattgtggccctggacctgctgagcggcctggccgagggcctgggcggccacgtggagcagctggtggcccggagcaacatcatgaccctgctcttccagtgcatgcaggacagcatgcctgaggtgcggcagagcagctttgccctgctgggggacctgaccaaggcctgcttcatccacgtgaagccctgcatcgccgagttcatgcccatcctgggcaccaacctgaaccctgagttcatctctgtgtgcaacaatgccacctgggccatcggggagatctgcatgcagatgggcgctgagatgcagccctacgtgcagatggtgctgaacaacctggtggagatcatcaaccggcccaacacccccaagaccctgctggagaacacagccatcaccatcggccgcctgggctacgtgtgcccccaggaggtggcccccatgctgcagcagttcatccggccctggtgcaccagcctgaggaacatccgggacaatgaggagaaggacagcgccttccggggcatctgcatgatgattggagtgaaccctgggggcgtggtgcaggacttcatcttcttctgtgatgctgtggcctcctgggtgagccccaaggatgacctgcgggacatgttctacaagatcctgcacggcttcaaggaccaggtgggggaggacaactggcagcagttcagcgagcagttcccccccctgctgaaggagcggctggccgccttctatggagtgtag

SEQ ID NO: 174105 - DNA, 2316 bp, synthetic construct
  misc_feature 1..2316: note = Description of Artificial Sequence: Synthetic coding sequence
  source 1..2316: mol_type = other DNA
atggactggcagccagatgagcagggcctgcagcaggtgctgcagctgctgaaggacagccagagccccaacacagccacccagagaattgtgcaggacaagctgaagcagctgaaccagttcccagacttcaacaactacctgatctttgtgctgacccggctgaagtcagaagatgagcccaccaggagcctgagcggcctcatcctgaagaacaacgtgaaggcccactaccagagcttccccccacctgtggccgacttcatcaagcaggagtgcctgaacaacattggagatgccagcagcctcatccgggccaccatcggcatcctgatcaccaccatcgccagcaagggggagctgcagatgtggccagagctgctgccccagctgtgcaacctgctgaacagcgaggactacaacacctgtgagggcgcctttggagccctgcagaagatctgtgaggacagcagcgagctgctggacagtgatgccctgaaccggcccctgaacatcatgatccccaagttcctgcagttcttcaagcactgcagccccaagatccgcagccacgccatcgcctgtgtgaaccagttcatcatggaccgggcccaggccctgatggacaacatcgacaccttcatcgagcacctgtttgccctggccgtggatgatgatcctgaggtgaggaagaatgtgtgccgggccctggtgatgctgctggaggtgagaattgacaggctcatcccccacatgcacagcatcatccagtacatgctgcagaggacccaggaccatgatgaaaatgtggccctggaggcctgtgagttctggctgaccctggccgagcagcccatctgcaaggaggtgctggccagccacctggtgcagctgatccccatcctggtgaatggcatgaagtacagcgagattgacatcatcctgctgaagggagatgtggaggaggatgaagctgtgcctgattctgagcaggacatcaagccccgcttccacaagagcaggacagtgaccctgccccatgaagctgagaggccagatggctctgaagatgctgaagatgatgatgatgatgatgccctgagtgactggaacctgaggaagtgcagcgctgctgccctggatgtgctggccaacgtgttccgggaggagctgctgccccacctgctgcccctgctgaagggcctgctcttccaccctgagtgggtggtgaaggagagcggcatcctggtgctgggcgccatcgccgagggctgcatgcagggcatggtgccctacctgcctgagctgatcccccacctgatccagtgcctgagtgacaagaaggccctggtgcgcagcatcgcctgctggaccctgagccgctatgcccactgggtggtgtcccagcccccagacatgcacctgaagcccctgatgacagagctgctgaagaggatcctggatggcaacaagagggtgcaggaggccgcctgcagcgcctttgccaccctggaggaggaggcctgcacagagctggtgccctacctgagctacatcctggacaccctggtgtttgccttcggcaagtaccagcacaagaacctgctgatcctgtatgatgccatcggcaccctggccgacagcgtgggccaccacctgaaccagcctgagtacatccagaagctgatgccacccctcatccagaagtggaatgagctgaaggatgaggacaaggacctcttccccctgctggagtgcctgagctctgtggccacagccctgcagagcggcttcctgccctactgtgagcctgtgtaccagagatgtgtgaccctggtgcagaagaccctggcccaggccatgatgtacacccagcaccctgagcagtatgaggccccagacaaggacttcatgattgtggccctggacctgctgagcggcctggccgagggcctgggcggccacgtggagcagctggtggcccggagcaacatcatgaccctgctcttccagtgcatgcaggacagcatgcctgaggtgcggcagagcagctttgccctgctgggggacctgaccaaggcctgcttcatccacgtgaagccctgcatcgccgagttcatgcccatcctgggcaccaacctgaaccctgagttcatctctgtgtgcaacaatgccacctgggccatcggggagatctgcatgcagatgggcgctgagatgcagccctacgtgcagatggtgctgaacaacctggtggagatcatcaaccggcccacccccagccagaagcagaacaagaccaagaagaacaagtag

SEQ ID NO: 174106 - DNA, 2772 bp, synthetic construct
  misc_feature 1..2772: note = Description of Artificial Sequence: Synthetic coding sequence
  source 1..2772: mol_type = other DNA
atggagggcgccaagcccaccctgcagctggtgtaccaggccgtgcaggccctgtaccatgaccctgaccccagcggcaaggagcgggccagcttctggctgggggagctgcagaggtctgtgcacgcctgggagatcagtgaccagctgctgcagatccggcaggatgtggagagctgctactttgctgcccagaccatgaagatgaagatccagaccagcttctatgagctgcccacagacagccacgccagcctgcgggacagcctgctgacccacatccagaacctgaaggacctgagccctgtgattgtgacccagctggccctggccatcgctgacctggccctgcagatgcccagctggaagggctgtgtgcagaccctggtggagaagtacagcaatgatgtgaccagcctgcccttcctgctggagatcctgactgtgctgcctgaggaggtgcacagccgcagcctgagaattggagccaacagaagaacagagatcatcgaggacctggccttctacagcagcacagtggtgtccctgctgatgacctgtgtggagaaggccggcacagatgagaagatgctgatgaaggtgttccgctgcctgggctcctggttcaacctgggcgtgctggacagcaacttcatggccaacaacaagctgctggccctgctgtttgaggtgctgcagcaggacaagaccagcagcaacctgcacgaggccgccagtgactgtgtgtgcagcgccctgtatgccattgaaaatgtggagaccaacctgcccctggccatgcagctgttccagggcgtgctgaccctggagacagcctaccacatggctgtggcccgggaggacctggacaaggtgctgaactactgccgcatcttcacagagctgtgtgagaccttcctggagaagatcgtgtgcaccccaggccagggcctgggggacctgcggaccctggagctgctgctgatctgtgccggccacccccagtatgaggtggtggagatctccttcaacttctggtaccgcctgggggagcacctgtacaagaccaatgatgaggtgatccacggcatcttcaaggcctacatccagaggctgctgcacgccctggcccggcactgccagctggagccagaccacgagggcgtgcctgaggagacagatgactttggagagttcaggatgagggtgtctgacctggtgaaggacctgatcttcctgattggctccatggagtgctttgcccagctgtacagcaccctgaaggagggcaaccccccctgggaggtgacagaagctgtgctcttcatcatggccgccatcgccaagtctgtggaccctgagaacaaccccaccctggtggaggtgctggagggcgtggtgcggctgcctgagaccgtgcacacagctgtgcgctacaccagcattgagctggtgggggagatgtctgaggtggtggacaggaacccccagttcctggaccctgtgctgggctacctgatgaagggcctgtgtgagaagcccctggccagcgctgctgccaaggccatccacaacatctgcagcgtgtgccgggaccacatggcccagcacttcaacggcctgctggagatcgcccggagcctggacagcttcctgctgagccctgaggccgctgtgggcctgctgaagggcacagccctggtgctggcccggctgcccctggacaagatcacagaatgtctgtctgagctgtgcagcgtgcaggtgatggccctgaagaagctgctgagccaggagcccagcaatggcatcagcagtgaccccaccgtcttcctggaccggctggccgtcatcttccgccacaccaaccccatcgtggagaatggccagacccacccctgccagaaggtgatccaggagatctggcctgtgctgtctgagaccctgaacaagcacagagctgacaaccgcatcgtggagcgctgctgccgctgcctgcgctttgctgtgcgctgtgtgggcaaaggatctgctgccctgctgcagcccctggtgacccagatggtgaatgtgtaccacgtgcaccagcacagctgcttcctgtacctgggcagcatcctggtggatgaatatggcatggaggagggctgccggcagggcctgctggacatgctgcaggccctgtgcatccccaccttccagctgctggagcagcagaatggcctgcagaaccacccagacacagtggatgacctcttccggctggccacccgcttcatccagaggagccctgtgaccctgctgcggagccaggtggtgatccccatcctgcagtgggccatcgccagcaccaccctggaccacagagatgccaactgcagcgtgatgaggttcctgcgggacctgatccacactggagtggccaatgaccatgaagaagattttgagctgaggaaggagctgattggccaggtgatgaaccagctgggccagcagctggtgtcccagctgctgcacacctgctgcttctgcctgcccccctacaccctgcctgatgtggccgaggtgctgtgggagatcatgcaggtggaccggcccaccttctgccgctggctggagaacagcctgaagggcctgcccaaggagaccaccgtgggcgctgtgacagtgacccacaagcagctgacagacttccacaagcaggtgaccagcgctgaggagtgcaagcaggtgtgctgggccctgcgggacttcaccaggctcttcagatag

SEQ ID NO: 174107 - DNA, 2874 bp, synthetic construct
  misc_feature 1..2874: note = Description of Artificial Sequence: Synthetic coding sequence
  source 1..2874: mol_type = other DNA
atggagggcgccaagcccaccctgcagctggtgtaccaggccgtgcaggccctgtaccatgaccctgaccccagcggcaaggagcgggccagcttctggctgggggagctgcagaggtctgtgcacgcctgggagatcagtgaccagctgctgcagatccggcaggatgtggagagctgctactttgctgcccagaccatgaagatgaagatccagaccagcttctatgagctgcccacagacagccacgccagcctgcgggacagcctgctgacccacatccagaacctgaaggacctgagccctgtgattgtgacccagctggccctggccatcgctgacctggccctgcagatgcccagctggaagggctgtgtgcagaccctggtggagaagtacagcaatgatgtgaccagcctgcccttcctgctggagatcctgactgtgctgcctgaggaggtgcacagccgcagcctgagaattggagccaacagaagaacagagatcatcgaggacctggccttctacagcagcacagtggtgtccctgctgatgacctgtgtggagaaggccggcacagatgagaagatgctgatgaaggtgttccgctgcctgggctcctggttcaacctgggcgtgctggacagcaacttcatggccaacaacaagctgctggccctgctgtttgaggtgctgcagcaggacaagaccagcagcaacctgcacgaggccgccagtgactgtgtgtgcagcgccctgtatgccattgaaaatgtggagaccaacctgcccctggccatgcagctgttccagggcgtgctgaccctggagacagcctaccacatggctgtggcccgggaggacctggacaaggtgctgaactactgccgcatcttcacagagctgtgtgagaccttcctggagaagatcgtgtgcaccccaggccagggcctgggggacctgcggaccctggagctgctgctgatctgtgccggccacccccagtatgaggtggtggagatctccttcaacttctggtaccgcctgggggagcacctgtacaagaccaatgatgaggtgatccacggcatcttcaaggcctacatccagaggctgctgcacgccctggcccggcactgccagctggagccagaccacgagggcgtgcctgaggagacagatgactttggagagttcaggatgagggtgtctgacctggtgaaggacctgatcttcctgattggctccatggagtgctttgcccagctgtacagcaccctgaaggagggcaaccccccctgggaggtgacagaagctgtgctcttcatcatggccgccatcgccaagtctgtggaccccaagaagcccttcagcaatgctgtgtgccgccacagcctgctgtttggccagaacatcaccagcgagatcagcaactgtgagtacctgccccctgtgctgcgggagaacaaccccaccctggtggaggtgctggagggcgtggtgcggctgcctgagaccgtgcacacagctgtgcgctacaccagcattgagctggtgggggagatgtctgaggtggtggacaggaacccccagttcctggaccctgtgctgggctacctgatgaagggcctgtgtgagaagcccctggccagcgctgctgccaaggccatccacaacatctgcagcgtgtgccgggaccacatggcccagcacttcaacggcctgctggagatcgcccggagcctggacagcttcctgctgagccctgaggccgctgtgggcctgctgaagggcacagccctggtgctggcccggctgcccctggacaagatcacagaatgtctgtctgagctgtgcagcgtgcaggtgatggccctgaagaagctgctgagccaggagcccagcaatggcatcagcagtgaccccaccgtcttcctggaccggctggccgtcatcttccgccacaccaaccccatcgtggagaatggccagacccacccctgccagaaggtgatccaggagatctggcctgtgctgtctgagaccctgaacaagcacagagctgacaaccgcatcgtggagcgctgctgccgctgcctgcgctttgctgtgcgctgtgtgggcaaaggatctgctgccctgctgcagcccctggtgacccagatggtgaatgtgtaccacgtgcaccagcacagctgcttcctgtacctgggcagcatcctggtggatgaatatggcatggaggagggctgccggcagggcctgctggacatgctgcaggccctgtgcatccccaccttccagctgctggagcagcagaatggcctgcagaaccacccagacacagtggatgacctcttccggctggccacccgcttcatccagaggagccctgtgaccctgctgcggagccaggtggtgatccccatcctgcagtgggccatcgccagcaccaccctggaccacagagatgccaactgcagcgtgatgaggttcctgcgggacctgatccacactggagtggccaatgaccatgaagaagattttgagctgaggaaggagctgattggccaggtgatgaaccagctgggccagcagctggtgtcccagctgctgcacacctgctgcttctgcctgcccccctacaccctgcctgatgtggccgaggtgctgtgggagatcatgcaggtggaccggcccaccttctgccgctggctggagaacagcctgaagggcctgcccaaggagaccaccgtgggcgctgtgacagtgacccacaagcagctgacagacttccacaagcaggtgaccagcgctgaggagtgcaagcaggtgtgctgggccctgcgggacttcaccaggctcttcagatag

SEQ ID NO: 174108 - DNA, 2874 bp, synthetic construct; identical to SEQ ID NO: 174107
  misc_feature 1..2874: note = Description of Artificial Sequence: Synthetic coding sequence
  source 1..2874: mol_type = other DNA

SEQ ID NO: 174109 - DNA, 2580 bp, synthetic construct
  misc_feature 1..2580: note = Description of Artificial Sequence: Synthetic coding sequence
  source 1..2580: mol_type = other DNA
atggagggcgccaagcccaccctgcagctggtgtaccaggccgtgcaggccctgtaccatgaccctgaccccagcggcaaggagcgggccagcttctggctgggggagctgcagaggtctgtgcacgcctgggagatcagtgaccagctgctgcagatccggcaggatgtggagagctgctactttgctgcccagaccatgaagatgaagatccagaccagcttctatgagctgcccacagacagccacgccagcctgcgggacagcctgctgacccacatccagaacctgaaggacctgagccctgtgattgtgacccagctggccctggccatcgctgacctggccctgcagatgcccagctggaagggctgtgtgcagaccctggtggagaagtacagcaatgatgtgaccagcctgcccttcctgctggagatcctgactgtgctgcctgaggaggtgcacagccgcagcctgagaattggagccaacagaagaacagagatcatcgaggacctggccttctacagcagcacagtggtgtccctgctgatgacctgtgtggagaaggccggcacagatgagaagatgctgatgaaggtgttccgctgcctgggctcctggttcaacctgggcgtgctggacagcaacttcatggccaacaacaagctgctggccctgctgtttgaggtgctgcagcaggacaagaccagcagcaacctgcacgaggccgccagtgactgtgtgtgcagcgccctgtatgccattgaaaatgtggagaccaacctgcccctggccatgcagctgttccagggcgtgctgaccctggagacagcctaccacatggctgtggcccgggaggacctggacaaggtgctgaactactgccgcatcttcacagagctgtgtgagaccttcctggagaagatcgtgtgcaccccaggccagggcctgggggacctgcggaccctggagctgctgctgatctgtgccggccacccccagtatgaggtggtggagatctccttcaacttctggtaccgcctgggggagcacctgtacaagaccaatgatgaggtgatccacggcatcttcaaggcctacatccagaggctgctgcacgccctggcccggcactgccagctggagccagaccacgagggcgtgcctgaggagacagatgactttggagagttcaggatgagggtgtctgacctggtgaaggacctgatcttcctgattggctccatggagtgctttgcccagctgtacagcaccctgaaggagggcaaccccccctgggaggtgacagaagctgtgctcttcatcatggccgccatcgccaagtctgtggaccctgagaacaaccccaccctggtggaggtgctggagggcgtggtgcggctgcctgagaccgtgcacacagctgtgcgctacaccagcattgagctggtgggggagatgtctgaggtggtggacaggaacccccagttcctgggcacagccctggtgctggcccggctgcccctggacaagatcacagaatgtctgtctgagctgtgcagcgtgcaggtgatggccctgaagaagctgctgagccaggagcccagcaatggcatcagcagtgaccccaccgtcttcctggaccggctggccgtcatcttccgccacaccaaccccatcgtggagaatggccagacccacccctgccagaaggtgatccaggagatctggcctgtgctgtctgagaccctgaacaagcacagagctgacaaccgcatcgtggagcgctgctgccgctgcctgcgctttgctgtgcgctgtgtgggcaaaggatctgctgccctgctgcagcccctggtgacccagatggtgaatgtgtaccacgtgcaccagcacagctgcttcctgtacctgggcagcatcctggtggatgaatatggcatggaggagggctgccggcagggcctgctggacatgctgcaggccctgtgcatccccaccttccagctgctggagcagcagaatggcctgcagaaccacccagacacagtggatgacctcttccggctggccacccgcttcatccagaggagccctgtgaccctgctgcggagccaggtggtgatccccatcctgcagtgggccatcgccagcaccaccctggaccacagagatgccaactgcagcgtgatgaggttcctgcgggacctgatccacactggagtggccaatgaccatgaagaagattttgagctgaggaaggagctgattggccaggtgatgaaccagctgggccagcagctggtgtcccagctgctgcacacctgctgcttctgcctgcccccctacaccctgcctgatgtggccgaggtgctgtgggagatcatgcaggtggaccggcccaccttctgccgctggctggagaacagcctgaagggcctgcccaaggagaccaccgtgggcgctgtgacagtgacccacaagcagctgacagacttccacaagcaggtgaccagcgctgaggagtgcaagcaggtgtgctgggccctgcgggacttcaccaggctcttcagatag

SEQ ID NO: 174110 - DNA, 4236 bp, synthetic construct
  misc_feature 1..4236: note = Description of Artificial Sequence: Synthetic coding sequence
  source 1..4236: mol_type = other DNA
atggccgaggccaggaagagaagagagctgctgcccctcatctaccaccacctgctgcgggccggctacgtgcgggccgcccgggaggtgaaggagcagagcggccagaagtgcttcctggcccagcctgtgaccctgctggacatctacacccactggcagcagaccagcgagctgggcaggaagaggaaggccgaggaggatgctgccctgcaggccaagaagaccagggtgtctgaccccatcagcaccagcgagagcagcgaggaggaggaggaggccgaggccgagacagccaaggccaccccccggctggccagcaccaacagctctgtgctgggcgctgacctgcccagctccatgaaggagaaggccaaggccgagacagagaaggccggcaagacaggcaacagcatgccccacccagccaccgggaagacagtggccaacctgctgagcggcaagagccccaggaagtctgctgagcccagcgccaacaccaccctggtgtctgaaacagaggaggagggctctgtgcctgccttcggggctgctgccaagccaggcatggtgtctgctggccaggccgacagcagcagcgaggacaccagcagcagcagtgatgaaacagatgtggaggtgaaggccagcgagaagatcctgcaggtgcgggccgccagcgccccagccaagggcacccctgggaagggggccaccccagcccctcctgggaaggccggggctgtggccagccagaccaaggccggcaagccagaggaggacagcgagagcagcagcgaggagagcagtgacagcgaggaggagaccccagctgccaaggccctgctgcaggccaaggccagcggcaagaccagccaggtgggcgccgccagcgccccagccaaggagagccccaggaaaggagctgccccagcccctcctgggaagacaggccctgctgtggccaaggcccaggccggcaagcgggaggaggacagccagagcagcagcgaggagagtgacagcgaggaggaggccccagcccaggccaagcccagcggcaaggccccccaggtgcgggccgccagcgccccagccaaggagagccccaggaagggggccgccccagccccacccaggaagacaggccctgctgctgcccaggtgcaggtgggcaagcaggaggaggacagccgcagcagcagcgaggagagtgacagcgaccgggaggccctggccgccatgaatgctgcccaggtgaagcccctgggcaagagcccccaggtgaagccagccagcaccatgggcatgggccccctgggcaagggggccggccctgtgcccccaggcaaggtgggccctgccacccccagcgcccaggtgggcaagtgggaggaggacagcgagagcagcagcgaggagagcagtgacagcagtgatggagaggtgcccacagctgtggccccagcccaggagaagagcctgggcaacatcctgcaggccaagcccaccagcagccctgccaagggccccccccagaaggccggccctgtggccgtgcaggtgaaggccgagaagcccatggacaacagcgagagcagcgaggagagcagtgacagcgctgacagcgaggaggccccagctgccatgacagctgcccaggccaagccagccctgaagatcccccagaccaaggcctgccccaagaagaccaacaccacagccagcgccaaggtggcccctgtgcgggtgggcacccaggcccccaggaaggccggcacagccaccagccctgctggcagcagccctgctgtggccggcggcacccagaggcctgctgaggacagcagcagcagcgaggagagtgacagcgaggaggagaagacaggcctggccgtgacagtgggccaggccaagtctgtgggcaagggcctgcaggtgaaggccgcctctgtgcctgtgaagggcagcctgggccagggcacagcccctgtgctgcccgggaagacaggccccaccgtgacccaggtgaaggccgagaagcaggaggacagcgagagcagcgaggaggagagtgacagcgaggaggccgccgccagccctgcccaggtgaagacctctgtgaagaagacccaggccaaggccaacccagctgctgcccgggcccccagcgccaagggcaccatcagcgcccctgggaaggtggtgacagctgctgcccaggccaagcagaggagccccagcaaggtgaagccccctgtgaggaacccccagaacagcacagtgctggcccggggccctgcctctgtgcccagcgtgggcaaggctgtggccacagctgcccaggcccagacaggcccagaagaagattctggcagcagcgaggaggagagtgacagcgaggaggaggccgagaccctggcccaggtgaagcccagcggcaagacccaccagatccgggccgccctggccccagccaaggagagccccaggaagggggccgcccccaccccacctgggaagacaggccccagcgctgcccaggccggcaagcaggatgattctggcagcagcagcgaggagagtgacagtgatggagaggccccagctgctgtgaccagcgcccaggtgatcaagccacccctcatctttgtggaccccaacagaagccctgctggccctgctgccaccccagcccaggcccaggccgccagcacccccaggaaggcccgggccagcgagagcacagcccggagcagcagcagcgagagtgaagatgaagatgtgatcccagccacccagtgcctgaccccaggcatccgcaccaacgtggtgaccatgcccacagcccacccccgcatcgcccccaaggcctccatggccggggccagcagcagcaaggagagcagccgcatcagtgatggcaagaagcaggagggccctgccacccaggtgtccaagaagaacccagccagcctgcccctgacccaggccgccctgaaggtgctggcccagaaggccagcgaggcccagccccctgtggcccggacccagcccagcagtggagtggacagcgctgtgggcaccctgcctgccaccagcccccagagcacctctgtgcaggccaagggcaccaacaagctgaggaagcccaagctgcctgaggtgcagcaggccaccaaggcccctgagagcagtgatgattctgaggacagcagtgacagcagcagcggctctgaagaagatggagagggcccccagggcgccaagagcgcccacaccctgggccccacccccagcaggacagagaccctggtggaggagacagctgctgagagcagtgaagatgatgtggtggcccccagccagagcctgctgagcggctacatgaccccaggcctgaccccagccaacagccaggccagcaaggccacccccaagctggacagcagccccagcgtgagcagcaccctggccgccaaggatgatcctgatggcaagcaggaggccaagccccagcaggccgccggcatgctgagccccaagacaggaggcaaggaggccgccagcggcaccaccccccagaagagcaggaagcccaagaagggggccggcaacccccaggccagcaccctggccctgcagagcaacatcacccagtgcctgctgggccagccctggcccctgaatgaggcccaggtgcaggcctctgtggtgaaggtgctgacagagctgctggagcaggagaggaagaaggtggtggacaccaccaaggagagcagcaggaagggctgggagagcaggaagaggaagctgagcggggaccagcctgctgcccggacccccaggagcaagaagaagaagaagctgggcgctggggagggcggggaggcctctgtgtccccagagaagaccagcaccaccagcaagggcaaggccaagagggacaaggccagcggagatgtgaaggagaagaagggcaagggcagcctgggcagccagggcgccaaggatgagcctgaggaggagctgcagaagggcatgggcaccgtggagggcggggaccagagcaaccccaagagcaagaaggagaagaagaagagtgacaagaggaagaaggacaaggagaagaaggagaagaagaagaaggccaagaaggccagcaccaaggacagcgagagccccagccagaagaagaagaagaagaagaagaagacagctgagcagacagtgtag

SEQ ID NO: 174111 - DNA, 4470 bp, synthetic construct
  misc_feature 1..4470: note = Description of Artificial Sequence: Synthetic coding sequence
  source 1..4470: mol_type = other DNA
atggccgaggccaggaagagaagagagctgctgcccctcatctaccaccacctgctgcgggccggctacgtgcgggccgcccgggaggtgaaggagcagagcggccagaagtgcttcctggcccagcctgtgaccctgctggacatctacacccactggcagcagaccagcgagctgggcaggaagaggaaggccgaggaggatgctgccctgcaggccaagaagaccagggtgtctgaccccatcagcaccagcgagagcagcgaggaggaggaggaggccgaggccgagacagccaaggccaccccccggctggccagcaccaacagctctgtgctgggcgctgacctgcccagctccatgaaggagaaggccaaggccgagacagagaaggccggcaagacaggcaacagcatgccccacccagccaccgggaagacagtggccaacctgctgagcggcaagagccccaggaagtctgctgagcccagcgccaacaccaccctggtgtctgaaacagaggaggagggctctgtgcctgccttcggggctgctgccaagccaggcatggtgtctgctggccaggccgacagcagcagcgaggacaccagcagcagcagtgatgaaacagatgtggagggcaagcccagcgtgaagccagcccaggtgaaggccagctctgtgtccaccaaggagagccctgccaggaaggccgccccagcccctgggaaggtgggagatgtgaccccccaggtgaagggcggggccctgcccccagccaagagggccaagaagccagaggaggagagcgagagcagcgaggagggcagcgagagcgaggaggaggccccagctggcaccaggagccaggtgaaggccagcgagaagatcctgcaggtgcgggccgccagcgccccagccaagggcaccccaggaaaaggagccaccccagcccctcctgggaaggccggggctgtggccagccagaccaaggccggcaagccagaagaagattctgagagcagcagcgaggagagcagtgacagcgaggaggagaccccagctgccaaggccctgctgcaggccaaggccagcggcaagaccagccaggtgggcgccgccagcgccccagccaaggagagccccaggaagggggccgccccagcccctcctgggaagacaggccctgctgtggccaaggcccaggccggcaagcgggaggaggacagccagagcagcagcgaggagagtgacagcgaggaggaggccccagcccaggccaagcccagcggcaaggccccccaggtgcgggccgccagcgccccagccaaggagagccccaggaaaggagctgccccagccccacccaggaagacaggccctgctgctgcccaggtgcaggtgggcaagcaggaggaggacagccgcagcagcagcgaggagagtgacagcgaccgggaggccctggccgccatgaatgctgcccaggtgaagcccctgggcaagagcccccaggtgaagccagccagcaccatgggcatgggccccctgggcaaaggagctggccctgtgcccccaggcaaggtgggccctgccaccccatctgcccaggtgggcaagtgggaggaggacagcgagagcagcagcgaggagagcagtgacagcagtgatggagaggtgcccacagctgtggccccagcccaggagaagagcctgggcaacatcctgcaggccaagcccaccagcagccctgccaagggccccccccagaaggccggccctgtggccgtgcaggtgaaggccgagaagcccatggacaacagcgagagcagcgaggagagcagtgacagcgctgacagcgaggaggccccagctgccatgacagctgcccaggccaagccagccctgaagatcccccagaccaaggcctgccccaagaagaccaacaccacagccagcgccaaggtggcccctgtgcgggtgggcacccaggcccccaggaaggccggcacagccaccagccctgctggcagcagccctgctgtggccggcggcacccagaggcctgctgaggacagcagcagcagcgaggagagtgacagcgaggaggagaagacaggcctggccgtgacagtgggccaggccaagtctgtgggcaagggcctgcaggtgaaggccgcctctgtgcctgtgaagggcagcctgggccagggcacagcccctgtgctgcccgggaagacaggccccaccgtgacccaggtgaaggccgagaagcaggaggacagcgagagcagcgaggaggagagtgacagcgaggaggccgccgccagccctgcccaggtgaagacctctgtgaagaagacccaggccaaggccaacccagctgctgcccgggcccccagcgccaagggcaccatcagcgcccctgggaaggtggtgacagctgctgcccaggccaagcagaggagccccagcaaggtgaagccccctgtgaggaacccccagaacagcacagtgctggcccggggccctgcctctgtgcccagcgtgggcaaggctgtggccacagctgcccaggcccagacaggccctgaggaggacagcggcagcagcgaggaggagagtgacagcgaggaggaggccgagaccctggcccaggtgaagcccagcggcaagacccaccagatccgggccgccctggccccagccaaggagagccccaggaaaggagctgcccccaccccacctgggaagacaggccccagcgctgcccaggccggcaagcaggatgacagcggcagcagcagcgaggagagtgacagtgatggagaggccccagctgctgtgaccagcgcccaggtgatcaagcccccactcatctttgtggaccccaacagaagccctgctggccctgctgccaccccagcccaggcccaggccgccagcacccccaggaaggcccgggccagcgagagcacagcccggagcagcagcagcgagagtgaagatgaagatgtgatcccagccacccagtgcctgaccccaggcatccgcaccaacgtggtgaccatgcccacagcccaccccagaattgcccccaaggcctccatggccggggccagcagcagcaaggagagcagccgcatcagtgatggcaagaagcaggagggccctgccacccaggtgtccaagaagaacccagccagcctgcccctgacccaggccgccctgaaggtgctggcccagaaggccagcgaggcccagccccctgtggcccggacccagcccagcagcggcgtggacagcgctgtgggcaccctgcctgccaccagcccccagagcacctctgtgcaggccaagggcaccaacaagctgaggaagcccaagctgcctgaggtgcagcaggccaccaaggcccctgagagcagtgatgacagcgaggacagcagtgacagcagcagcggcagcgaggaggatggagagggcccccagggcgccaagagcgcccacaccctggtgggccccacccccagcaggacagagaccctggtggaggagacagctgctgagagcagtgaagatgatgtggtggcccccagccagagcctgctgagcggctacatgaccccaggcctgaccccagccaacagccaggccagcaaggccacccccaagctggacagcagccccagcgtgagcagcaccctggccgccaaggatgatcctgatggcaagcaggaggccaagccccagcaggccgccggcatgctgagccccaagacaggaggcaaggaggccgccagcggcaccaccccccagaagagcaggaagcccaagaagggggccggcaacccccaggccagcaccctggccctgcagagcaacatcacccagtgcctgctgggccagccctggcccctgaatgaggcccaggtgcaggcctctgtggtgaaggtgctgacagagctgctggagcaggagaggaagaaggtggtggacaccaccaaggagagcagcaggaagggctgggagagcaggaagaggaagctgagcggggaccagcctgctgcccggacccccaggagcaagaagaagaagaagctgggcgctggggagggcggggaggcctctgtgtccccagagaagaccagcaccaccagcaagggcaaggccaagagggacaaggccagcggagatgtgaaggagaagaagggcaagggcagcctgggcagccagggcgccaaggatgagcctgaggaggagctgcagaagggcatgggcaccgtggagggcggggaccagagcaaccccaagagcaagaaggagaagaagaagagtgacaagaggaagaaggacaaggagaagaaggagaagaagaagaaggccaagaaggccagcaccaaggacagcgagagccccagccagaagaagaagaagaagaagaagaagacagctgagcagacagtgtag

SEQ ID NO: 174112 - DNA, 2877 bp, synthetic construct
  misc_feature 1..2877: note = Description of Artificial Sequence: Synthetic coding sequence
  source 1..2877: mol_type = other DNA
atggccgaggccaggaagagaagagagctgctgcccctcatctaccaccacctgctgcgggccggctacgtgcgggccgcccgggaggtgaaggagcagagcggccagaagtgcttcctggcccagcctgtgaccctgctggacatctacacccactggcagcagaccagcgagctgggcaggaagaggaaggccgaggaggatgctgccctgcaggccaagaagaccagggtgtctgaccccatcagcaccagcgagagcagcgaggaggaggaggaggccgaggccgagacagccaaggccaccccccggctggccagcaccaacagctctgtgctgggcgctgacctgcccagctccatgaaggagaaggccaaggccgagacagagaaggccggcaagacaggcaacagcatgccccacccagccaccgggaagacagtggccaacctgctgagcggcaagagccccaggaagtctgctgagcccagcgccaacaccaccctggtgtctgaaacagaggaggagggctctgtgcctgccttcggggctgctgccaagccaggcatggtgtctgctggccaggccgacagcagcagcgaggacaccagcagcagcagtgatgaaacagatgtggagggcaagcccagcgtgaagccagcccaggtgaaggccagctctgtgtccaccaaggagagccctgccaggaaggccgccccagcccctgggaaggtgggagatgtgaccccccaggtgaagggcggggccctgcccccagccaagagggccaagaagccagaggaggagagcgagagcagcgaggagggcagcgagagcgaggaggaggccccagctggcaccaggagccaggtgaaggccagcgagaagatcctgcaggtgcgggccgccagcgccccagccaagggcaccccaggaaaaggagccaccccagcccctcctgggaaggccggggctgtggccagccagaccaaggccggcaagccagaagaagattctgagagcagcagcgaggagagcagtgacagcgaggaggagaccccagctgccaaggccctgctgcaggccaaggccagcggcaagaccagccaggtgggcgccgccagcgccccagccaaggagagccccaggaagggggccgccccagcccctcctgggaagacaggccctgctgtggccaaggcccaggccggcaagcgggaggaggacagccagagcagcagcgaggagagtgacagcgaggaggaggccccagcccaggccaagcccagcggcaaggccccccaggtgcgggccgccagcgccccagccaaggagagccccaggaaaggagctgccccagccccacccaggaagacaggccctgctgctgcccaggtgcaggtgggcaagcaggaggaggacagccgcagcagcagcgaggagagtgacagcgaccgggaggccctggccgccatgaatgctgcccaggtgaagcccctgggcaagagcccccaggtgaagccagccagcaccatgggcatgggccccctgggcaaaggagctggccctgtgcccccaggcaaggtgggccctgccaccccatctgcccaggtgggcaagtgggaggaggacagcgagagcagcagcgaggagagcagtgacagcagtgatggagaggtgcccacagctgtggccccagcccaggagaagagcctgggcaacatcctgcaggccaagcccaccagcagccctgccaagggccccccccagaaggccggccctgtggccgtgcaggtgaaggccgagaagcccatggacaacagcgagagcagcgaggagagcagtgacagcgctgacagcgaggaggccccagctgccatgacagctgcccaggccaagccagccctgaagatcccccagaccaaggcctgccccaagaagaccaacaccacagccagcgccaaggtggcccctgtgcgggtgggcacccaggcccccaggaaggccggcacagccaccagccctgctggcagcagccctgctgtggccggcggcacccagaggcctgctgaggacagcagcagcagcgaggagagtgacagcgaggaggagaagacaggcctggccgtgacagtgggccaggccaagtctgtgggcaagggcctgcaggtgaaggccgcctctgtgcctgtgaagggcagcctgggccagggcacagcccctgtgctgcccgggaagacaggccccaccgtgacccaggtgaaggccgagaagcaggaggacagcgagagcagcgaggaggagagtgacagcgaggaggccgccgccagccctgcccaggtgaagacctctgtgaagaagacccaggccaaggccaacccagctgctgcccgggcccccagcgccaagggcaccatcagcgcccctgggaaggtggtgacagctgctgcccaggccaagcagaggagccccagcaaggtgaagccccctgtgaggaacccccagaacagcacagtgctggcccggggccctgcctctgtgcccagcgtgggcaaggctgtggccacagctgcccaggcccagacaggccctgaggaggacagcggcagcagcgaggaggagagtgacagcgaggaggaggccgagaccctggcccaggtgaagcccagcggcaagacccaccagatccgggccgccctggccccagccaaggagagccccaggaaaggagctgcccccaccccacctgggaagacaggccccagcgctgcccaggccggcaagcaggatgacagcggcagcagcagcgaggagagtgacagtgatggagaggccccagctgctgtgaccagcgcccaggaccaggagagcagctag

SEQ ID NO: 174113 - DNA, 4245 bp, synthetic construct
  misc_feature 1..4245: note = Description of Artificial Sequence: Synthetic coding sequence
  source 1..4245: mol_type = other DNA
atggccgaggccaggaagagaagagagctgctgcccctcatctaccaccacctgctgcgggccggctacgtgcgggccgcccgggaggtgaaggagcagagcggccagaagtgcttcctggcccagcctgtgaccctgctggacatctacacccactggcagcagaccagcgagctgggcaggaagaggaaggccgaggaggatgctgccctgcaggccaagaagaccagggtgtctgaccccatcagcaccagcgagagcagcgaggaggaggaggaggccgaggccgagacagccaaggccaccccccggctggccagcaccaacagctctgtgctgggcgctgacctgcccagctccatgaaggagaaggccaaggccgagacagagaaggccggcaagacaggcaacagcatgccccacccagccaccgggaagacagtggccaacctgctgagcggcaagagccccaggaagtctgctgagcccagcgccaacaccaccctggtgtctgaaacagaggaggagggctctgtgcctgccttcggggctgctgccaagccaggcatggtgtctgctggccaggccgacagcagcagcgaggacaccagcagcagcagtgatgaaacagatgtggagggcaagcccagcgtgaagccagcccaggtgaaggccagctctgtgtccaccaaggagagccctgccaggaaggccgccccagcccctgggaaggtgggagatgtgaccccccaggtgaagggcggggccctgcccccagccaagagggccaagaagccagaggaggagagcgagagcagcgaggagggcagcgagagcgaggaggaggccccagctggcaccaggagccaggtgaaggccagcgagaagatcctgcaggtgcgggccgccagcgccccagccaagggcaccccaggaaaaggagccaccccagcccctcctgggaaggccggggctgtggccagccagaccaaggccggcaagccagaagaagattctgagagcagcagcgaggagagcagtgacagcgaggaggagaccccagctgccaaggccctgctgcaggccaaggccagcggcaagaccagccaggtgggcgccgccagcgccccagccaaggagagccccaggaagggggccgccccagcccctcctgggaagacaggccctgctgtggccaaggcccaggccggcaagcgggaggaggacagccagagcagcagcgaggagagtgacagcgaggaggaggccccagcccaggccaagcccagcggcaaggccccccaggtgcgggccgccagcgccccagccaaggagagccccaggaaaggagctgccccagccccacccaggaagacaggccctgctgctgcccaggtgcaggtgggcaagcaggaggaggacagccgcagcagcagcgaggagagtgacagcgaccgggaggccctggccgccatgaatgctgcccaggtgaagcccctgggcaagagcccccaggtgaagccagccagcaccatgggcatgggccccctgggcaaaggagctggccctgtgcccccaggcaaggtgggccctgccaccccatctgcccaggtgggcaagtgggaggaggacagcgagagcagcagcgaggagagcagtgacagcagtgatggagaggtgcccacagctgtggccccagcccaggagaagagcctgggcaacatcctgcaggccaagcccaccagcagccctgccaagggccccccccagaaggccggccctgtggccgtgcaggtgaaggccgagaagcccatggacaacagcgagagcagcgaggagagcagtgacagcgctgacagcgaggaggccccagctgccatgacagctgcccaggccaagccagccctgaagatcccccagaccaaggcctgccccaagaagaccaacaccacagccagcgccaaggtggcccctgtgcgggtgggcacccaggcccccaggaaggccggcacagccaccagccctgctggcagcagccctgctgtggccggcggcacccagaggcctgctgaggacagcagcagcagcgaggagagtgacagcgaggaggagaagacaggcctggccgtgacagtgggccaggccaagtctgtgggcaagggcctgcaggtgaaggccgcctctgtgcctgtgaagggcagcctgggccagggcacagcccctgtgctgcccgggaagacaggccccaccgtgacccaggtgaaggccgagaagcaggaggacagcgagagcagcgaggaggagagtgacagcgaggaggccgccgccagccctgcccaggtgaagacctctgtgaagaagacccaggccaaggccaacccagctgctgcccgggcccccagcgccaagggcaccatcagcgcccctgggaaggtggtgacagctgctgcccaggccaagcagaggagccccagcaaggtgaagccccctgtgaggaacccccagaacagcacagtgctggcccggggccctgcctctgtgcccagcgtgggcaaggctgtggccacagctgcccaggcccagacaggccctgaggaggacagcggcagcagcgaggaggagagtgacagcgaggaggaggccgagaccctggcccaggtgaagcccagcggcaagacccaccagatccgggccgccctggccccagccaaggagagccccaggaaaggagctgcccccaccccacctgggaagacaggccccagcgctgcccaggccggcaagcaggatgacagcggcagcagcagcgaggagagtgacagtgatggagaggccccagctgctgtgaccagcgcccaggtgatcaagcccccactcatctttgtggaccccaacagaagccctgctggccctgctgccaccccagcccaggcccaggccgccagcacccccaggaaggcccgggccagcgagagcacagcccggagcagcagcagcgagagtgaagatgaagatgtgatcccagccacccagtgcctgaccccaggcatccgcaccaacgtggtgaccatgcccacagcccaccccagaattgcccccaaggcctccatggccggggccagcagcagcaaggagagcagccgcatcagtgatggcaagaagcaggagggccctgccacccaggtggacagcgctgtgggcaccctgcctgccaccagcccccagagcacctctgtgcaggccaagggcaccaacaagctgaggaagcccaagctgcctgaggtgcagcaggccaccaaggcccctgagagcagtgatgacagcgaggacagcagtgacagcagcagcggcagcgaggaggatggagagggcccccagggcgccaagagcgcccacaccctgggccccacccccagcaggacagagaccctggtggaggagacagctgctgagagcagtgaagatgatgtggtggcccccagccagagcctgctgagcggctacatgaccccaggcctgaccccagccaacagccaggccagcaaggccacccccaagctggacagcagccccagcgtgagcagcaccctggccgccaaggatgatcctgatggcaagcaggaggccaagccccagcaggccgccggcatgctgagccccaagacaggaggcaaggaggccgccagcggcaccaccccccagaagagcaggaagcccaagaagggagctggcaacccccaggccagcaccctggccctgcagagcaacatcacccagtgcctgctgggccagccctggcccctgaatgaggcccaggtgcaggcctctgtggtgaaggtgctgacagagctgctggagcaggagaggaagaaggtggtggacaccaccaaggagagcagcaggaagggctgggagagcaggaagaggaagctgagcggggaccagcctgctgcccggacccccaggagcaagaagaagaagaagctgggcgctggggagggcggggaggcctctgtgtccccagagaagaccagcaccaccagcaagggcaaggccaagagggacaaggccagcggagatgtgaaggagaagaagggcaagggcagcctgggcagccagggcgccaaggatgagcctgaggaggagctgcagaagggcatgggcaccgtggagggcggggaccagagcaaccccaagagcaagaaggagaagaagaagagtgacaagaggaagaaggacaagtag

SEQ ID NO: 174114 - DNA, 4356 bp, synthetic construct
  misc_feature 1..4356: note = Description of Artificial Sequence: Synthetic coding sequence
  source 1..4356: mol_type = other DNA
atggccgaggccaggaagagaagagagctgctgcccctcatctaccaccacctgctgcgggccggctacgtgcgggccgcccgggaggtgaaggagcagagcggccagaagtgcttcctggcccagcctgtgaccctgctggacatctacacccactggcagcagaccagcgagctgggcaggaagaggaaggccgaggaggatgctgccctgcaggccaagaagaccagggtgtctgaccccatcagcaccagcgagagcagcgaggaggaggaggaggccgaggccgagacagccaaggccaccccccggctggccagcaccaacagctctgtgctgggcgctgacctgcccagctccatgaaggagaaggccaaggccgagacagagaaggccggcaagacaggcaacagcatgccccacccagccaccgggaagacagtggccaacctgctgagcggcaagagccccaggaagtctgctgagcccagcgccaacaccaccctggtgtctgaaacagaggaggagggctctgtgcctgccttcggggctgctgccaagccaggcatggtgtctgctggccaggccgacagcagcagcgaggacaccagcagcagcagtgatgaaacagatgtggagggcaagcccagcgtgaagccagcccaggtgaaggccagctctgtgtccaccaaggagagccctgccaggaaggccgccccagcccctgggaaggtgggagatgtgaccccccaggtgaagggcggggccctgcccccagccaagagggccaagaagccagaggaggagagcgagagcagcgaggagggcagcgagagcgaggaggaggccccagctggcaccaggagccaggtgaaggccagcgagaagatcctgcaggtgcgggccgccagcgccccagccaagggcaccccaggaaaaggagccaccccagcccctcctgggaaggccggggctgtggccagccagaccaaggccggcaagccagaagaagattctgagagcagcagcgaggagagcagtgacagcgaggaggagaccccagctgccaaggccctgctgcaggccaaggccagcggcaagaccagccaggtgggcgccgccagcgccccagccaaggagagccccaggaagggggccgccccagcccctcctgggaagacaggccctgctgtggccaaggcccaggccggcaagcgggaggaggacagccagagcagcagcgaggagagtgacagcgaggaggaggccccagcccaggccaagcccagcggcaaggccccccaggtgcgggccgccagcgccccagccaaggagagccccaggaaaggagctgccccagccccacccaggaagacaggccctgctgctgcccaggtgcaggtgggcaagcaggaggaggacagccgcagcagcagcgaggagagtgacagcgaccgggaggccctggccgccatgaatgctgcccaggtgaagcccctgggcaagagcccccaggtgaagccagccagcaccatgggcatgggccccctgggcaaaggagctggccctgtgcccccaggcaaggtgggccctgccaccccatctgcccaggtgggcaagtgggaggaggacagcgagagcagcagcgaggagagcagtgacagcagtgatggagaggtgcccacagctgtggccccagcccaggagaagagcctgggcaacatcctgcaggccaagcccaccagcagccctgccaagggccccccccagaaggccggccctgtggccgtgcaggtgaaggccgagaagcccatggacaacagcgagagcagcgaggagagcagtgacagcgctgacagcgaggaggccccagctgccatgacagctgcccaggccaagccagccctgaagatcccccagaccaaggcctgccccaagaagaccaacaccacagccagcgccaaggtggcccctgtgcgggtgggcacccaggcccccaggaaggccggcacagccaccagccctgctggcagcagccctgctgtggccggcggcacccagaggcctgctgaggacagcagcagcagcgaggagagtgacagcgaggaggagaagacaggcctggccgtgacagtgggccaggccaagtctgtgggcaagggcctgcaggtgaaggccgcctctgtgcctgtgaagggcagcctgggccagggcacagcccctgtgctgcccgggaagacaggccccaccgtgacccaggtgaaggccgagaagcaggaggacagcgagagcagcgaggaggagagtgacagcgaggaggccgccgccagccctgcccaggtgaagacctctgtgaagaagacccaggccaaggccaacccagctgctgcccgggcccccagcgccaagggcaccatcagcgcccctgggaaggtggtgacagctgctgcccaggccaagcagaggagccccagcaaggtgaagccccctgtgaggaacccccagaacagcacagtgctggcccggggccctgcctctgtgcccagcgtgggcaaggctgtggccacagctgcccaggcccagacaggccctgaggaggacagcggcagcagcgaggaggagagtgacagcgaggaggaggccgagaccctggcccaggtgaagcccagcggcaagacccaccagatccgggccgccctggccccagccaaggagagccccaggaaaggagctgcccccaccccacctgggaagacaggccccagcgctgcccaggccggcaagcaggatgacagcggcagcagcagcgaggagagtgacagtgatggagaggccccagctgctgtgaccagcgcccaggtgatcaagcccccactcatctttgtggaccccaacagaagccctgctggccctgctgccaccccagcccaggcccaggccgccagcacccccaggaaggcccgggccagcgagagcacagcccggagcagcagcagcgagagtgaagatgaagatgtgatcccagccacccagtgcctgaccccaggcatccgcaccaacgtggtgaccatgcccacagcccaccccagaattgcccccaaggcctccatggccggggccagcagcagcaaggagagcagccgcatcagtgatggcaagaagcaggagggccctgccacccaggtggacagcgctgtgggcaccctgcctgccaccagcccccagagcacctctgtgcaggccaagggcaccaacaagctgaggaagcccaagctgcctgaggtgcagcaggccaccaaggcccctgagagcagtgatgacagcgaggacagcagtgacagcagcagcggcagcgaggaggatggagagggcccccagggcgccaagagcgcccacaccctggtgggccccacccccagcaggacagagaccctggtggaggagacagctgctgagagcagtgaagatgatgtggtggcccccagccagagcctgctgagcggctacatgaccccaggcctgaccccagccaacagccaggccagcaaggccacccccaagctggacagcagccccagcgtgagcagcaccctggccgccaaggatgatcctgatggcaagcaggaggccaagccccagcaggccgccggcatgctgagccccaagacaggaggcaaggaggccgccagcggcaccaccccccagaagagcaggaagcccaagaagggggccggcaacccccaggccagcaccctggccctgcagagcaacatcacccagtgcctgctgggccagccctggcccctgaatgaggcccaggtgcaggcctctgtggtgaaggtgctgacagagctgctggagcaggagaggaagaaggtggtggacaccaccaaggagagcagcaggaagggctgggagagcaggaagaggaagctgagcggggaccagcctgctgcccggacccccaggagcaagaagaagaagaagctgggcgctggggagggcggggaggcctctgtgtccccagagaagaccagcaccaccagcaagggcaaggccaagagggacaaggccagcggagatgtgaaggagaagaagggcaagggcagcctgggcagccagggcgccaaggatgagcctgaggaggagctgcagaagggcatgggcaccgtggagggcggggaccagagcaaccccaagagcaagaaggagaagaagaagagtgacaagaggaagaaggacaaggagaagaaggagaagaagaagaaggccaagaaggccagcaccaaggacagcgagagccccagccagaagaagaagaagaagaagaagaagacagctgagcagacagtgtag

SEQ ID NO: 174115 - DNA, 4239 bp, synthetic construct
  misc_feature 1..4239: note = Description of Artificial Sequence: Synthetic coding sequence
  source 1..4239: mol_type = other DNA
atggccgaggccaggaagagaagagagctgctgcccctcatctaccaccacctgctgcgggccggctacgtgcgggccgcccgggaggtgaaggagcagagcggccagaagtgcttcctggcccagcctgtgaccctgctggacatctacacccactggcagcagaccagcgagctgggcaggaagaggaaggccgaggaggatgctgccctgcaggccaagaagaccagggtgtctgaccccatcagcaccagcgagagcagcgaggaggaggaggaggccgaggccgagacagccaaggccaccccccggctggccagcaccaacagctctgtgctgggcgctgacctgcccagctccatgaaggagaaggccaaggccgagacagagaaggccggcaagacaggcaacagcatgccccacccagccaccgggaagacagtggccaacctgctgagcggcaagagccccaggaagtctgctgagcccagcgccaacaccaccctggtgtctgaaacagaggaggagggctctgtgcctgccttcggggctgctgccaagccaggcatggtgtctgctggccaggccgacagcagcagcgaggacaccagcagcagcagtgatgaaacagatgtggaggtgaaggccagcgagaagatcctgcaggtgcgggccgccagcgccccagccaagggcacccctgggaagggggccaccccagcccctcctgggaaggccggggctgtggccagccagaccaaggccggcaagccagaggaggacagcgagagcagcagcgaggagagcagtgacagcgaggaggagaccccagctgccaaggccctgctgcaggccaaggccagcggcaagaccagccaggtgggcgccgccagcgccccagccaaggagagccccaggaaaggagctgccccagcccctcctgggaagacaggccctgctgtggccaaggcccaggccggcaagcgggaggaggacagccagagcagcagcgaggagagtgacagcgaggaggaggccccagcccaggccaagcccagcggcaaggccccccaggtgcgggccgccagcgccccagccaaggagagccccaggaagggggccgccccagccccacccaggaagacaggccctgctgctgcccaggtgcaggtgggcaagcaggaggaggacagccgcagcagcagcgaggagagtgacagcgaccgggaggccctggccgccatgaatgctgcccaggtgaagcccctgggcaagagcccccaggtgaagccagccagcaccatgggcatgggccccctgggcaagggggccggccctgtgcccccaggcaaggtgggccctgccacccccagcgcccaggtgggcaagtgggaggaggacagcgagagcagcagcgaggagagcagtgacagcagtgatggagaggtgcccacagctgtggccccagcccaggagaagagcctgggcaacatcctgcaggccaagcccaccagcagccctgccaagggccccccccagaaggccggccctgtggccgtgcaggtgaaggccgagaagcccatggacaacagcgagagcagcgaggagagcagtgacagcgctgacagcgaggaggccccagctgccatgacagctgcccaggccaagccagccctgaagatcccccagaccaaggcctgccccaagaagaccaacaccacagccagcgccaaggtggcccctgtgcgggtgggcacccaggcccccaggaaggccggcacagccaccagccctgctggcagcagccctgctgtggccggcggcacccagaggcctgctgaggacagcagcagcagcgaggagagtgacagcgaggaggagaagacaggcctggccgtgacagtgggccaggccaagtctgtgggcaagggcctgcaggtgaaggccgcctctgtgcctgtgaagggcagcctgggccagggcacagcccctgtgctgcccgggaagacaggccccaccgtgacccaggtgaaggccgagaagcaggaggacagcgagagcagcgaggaggagagtgacagcgaggaggccgccgccagccctgcccaggtgaagacctctgtgaagaagacccaggccaaggccaacccagctgctgcccgggcccccagcgccaagggcaccatcagcgcccctgggaaggtggtgacagctgctgcccaggccaagcagaggagccccagcaaggtgaagccccctgtgaggaacccccagaacagcacagtgctggcccggggccctgcctctgtgcccagcgtgggcaaggctgtggccacagctgcccaggcccagacaggcccagaagaagattctggcagcagcgaggaggagagtgacagcgaggaggaggccgagaccctggcccaggtgaagcccagcggcaagacccaccagatccgggccgccctggccccagccaaggagagccccaggaagggggccgcccccaccccacctgggaagacaggccccagcgctgcccaggccggcaagcaggatgattctggcagcagcagcgaggagagtgacagtgatggagaggccccagctgctgtgaccagcgcccaggtgatcaagccacccctcatctttgtggaccccaacagaagccctgctggccctgctgccaccccagcccaggcccaggccgccagcacccccaggaaggcccgggccagcgagagcacagcccggagcagcagcagcgagagtgaagatgaagatgtgatcccagccacccagtgcctgaccccaggcatccgcaccaacgtggtgaccatgcccacagcccacccccgcatcgcccccaaggcctccatggccggggccagcagcagcaaggagagcagccgcatcagtgatggcaagaagcaggagggccctgccacccaggtgtccaagaagaacccagccagcctgcccctgacccaggccgccctgaaggtgctggcccagaaggccagcgaggcccagccccctgtggcccggacccagcccagcagtggagtggacagcgctgtgggcaccctgcctgccaccagcccccagagcacctctgtgcaggccaagggcaccaacaagctgaggaagcccaagctgcctgaggtgcagcaggccaccaaggcccctgagagcagtgatgattctgaggacagcagtgacagcagcagcggctctgaagaagatggagagggcccccagggcgccaagagcgcccacaccctggtgggccccacccccagcaggacagagaccctggtggaggagacagctgctgagagcagtgaagatgatgtggtggcccccagccagagcctgctgagcggctacatgaccccaggcctgaccccagccaacagccaggccagcaaggccacccccaagctggacagcagccccagcgtgagcagcaccctggccgccaaggatgatcctgatggcaagcaggaggccaagccccagcaggccgccggcatgctgagccccaagacaggaggcaaggaggccgccagcggcaccaccccccagaagagcaggaagcccaagaagggagctggcaacccccaggccagcaccctggccctgcagagcaacatcacccagtgcctgctgggccagccctggcccctgaatgaggcccaggtgcaggcctctgtggtgaaggtgctgacagagctgctggagcaggagaggaagaaggtggtggacaccaccaaggagagcagcaggaagggctgggagagcaggaagaggaagctgagcggggaccagcctgctgcccggacccccaggagcaagaagaagaagaagctgggcgctggggagggcggggaggcctctgtgtccccagagaagaccagcaccaccagcaagggcaaggccaagagggacaaggccagcggagatgtgaaggagaagaagggcaagggcagcctgggcagccagggcgccaaggatgagcctgaggaggagctgcagaagggcatgggcaccgtggagggcggggaccagagcaaccccaagagcaagaaggagaagaagaagagtgacaagaggaagaaggacaaggagaagaaggagaagaagaagaaggccaagaaggccagcaccaaggacagcgagagccccagccagaagaagaagaagaagaagaagaagacagctgagcagacagtgtag

SEQ ID NO: 174116 - DNA, 4578 bp, synthetic construct
  misc_feature 1..4578: note = Description of Artificial Sequence: Synthetic coding sequence
  source 1..4578: mol_type = other DNA
atggccgaggccaggaagagaagagagctgctgcccctcatctaccaccacctgctgcgggccggctacgtgcgggccgcccgggaggtgaaggagcagagcggccagaagtgcttcctggcccagcctgtgaccctgctggacatctacacccactggcagcagaccagcgagctgggcaggaagaggaaggccgaggaggatgctgccctgcaggccaagaagaccagggtgtctgaccccatcagcaccagcgagagcagcgaggaggaggaggaggccgaggccgagacagccaaggccaccccccggctggccagcaccaacagctctgtgctgggcgctgacctgcccagctccatgaaggagaaggccaaggccgagacagagaaggccggcaagacaggcaacagcatgccccacccagccaccgggaagacagtggccaacctgctgagcggcaagagccccaggaagtctgctgagcccagcgccaacaccaccctggtgtctgaaacagaggaggagggctctgtgcctgccttcggggctgctgccaagccaggcatggtgtctgctggccaggccgacagcagcagcgaggacaccagcagcagcagtgatgaaacagatgtggagggcaagcccagcgtgaagccagcccaggtgaaggccagctctgtgtccaccaaggagagccctgccaggaaggccgccccagcccctgggaaggtgggagatgtgaccccccaggtgaagggcggggccctgcccccagccaagagggccaagaagccagaggaggagagcgagagcagcgaggagggcagcgagagcgaggaggaggccccagctggcaccaggagccaggtgaaggccagcgagaagatcctgcaggtgcgggccgccagcgccccagccaagggcaccccaggaaaaggagccaccccagcccctcctgggaaggccggggctgtggccagccagaccaaggccggcaagccagaagaagattctgagagcagcagcgaggagagcagtgacagcgaggaggagaccccagctgccaaggccctgctgcaggccaaggccagcggcaagaccagccaggtgggcgccgccagcgccccagccaaggagagccccaggaagggggccgccccagcccctcctgggaagacaggccctgctgtggccaaggcccaggccggcaagcgggaggaggacagccagagcagcagcgaggagagtgacagcgaggaggaggccccagcccaggccaagcccagcggcaaggccccccaggtgcgggccgccagcgccccagccaaggagagccccaggaaaggagctgccccagccccacccaggaagacaggccctgctgctgcccaggtgcaggtgggcaagcaggaggaggacagccgcagcagcagcgaggagagtgacagcgaccgggaggccctggccgccatgaatgctgcccaggtgaagcccctgggcaagagcccccaggtgaagccagccagcaccatgggcatgggccccctgggcaaaggagctggccctgtgcccccaggcaaggtgggccctgccaccccatctgcccaggtgggcaagtgggaggaggacagcgagagcagcagcgaggagagcagtgacagcagtgatggagaggtgcccacagctgtggccccagcccaggagaagagcctgggcaacatcctgcaggccaagcccaccagcagccctgccaagggccccccccagaaggccggccctgtggccgtgcaggtgaaggccgagaagcccatggacaacagcgagagcagcgaggagagcagtgacagcgctgacagcgaggaggccccagctgccatgacagctgcccaggccaagccagccctgaagatcccccagaccaaggcctgccccaagaagaccaacaccacagccagcgccaaggtggcccctgtgcgggtgggcacccaggcccccaggaaggccggcacagccaccagccctgctggcagcagccctgctgtggccggcggcacccagaggcctgctgaggacagcagcagcagcgaggagagtgacagcgaggaggagaagacaggcctggccgtgacagtgggccaggccaagtctgtgggcaagggcctgcaggtgaaggccgcctctgtgcctgtgaagggcagcctgggccagggcacagcccctgtgctgcccgggaagacaggccccaccgtgacccaggtgaaggccgagaagcaggaggacagcgagagcagcgaggaggagagtgacagcgaggaggccgccgccagccctgcccaggtgaagacctctgtgaagaagacccaggccaaggccaacccagctgctgcccgggcccccagcgccaagggcaccatcagcgcccctgggaaggtggtgacagctgctgcccaggccaagcagaggagccccagcaaggtgaagccccctgtgaggaacccccagaacagcacagtgctggcccggggccctgcctctgtgcccagcgtgggcaaggctgtggccacagctgcccaggcccagacaggccctgaggaggacagcggcagcagcgaggaggagagtgacagcgaggaggaggccgagaccctggcccaggtgaagcccagcggcaagacccaccagatccgggccgccctggccccagccaaggagagccccaggaaaggagctgcccccaccccacctgggaagacaggccccagcgctgcccaggccggcaagcaggatgacagcggcagcagcagcgaggagagtgacagtgatggagaggccccagctgctgtgaccagcgcccagaaggacagcaacagcaagccagcccggagcaagaccctggccccagcccctcctgagaggaacacagagggcagcagcgagagcagcgaggaggagctgcccctgacccaggtgatcaagccacccctcatctttgtggaccccaacagaagccctgctggccctgctgccaccccagcccaggcccaggccgccagcacccccaggaaggcccgggccagcgagagcacagcccggagcagcagcagcgagagtgaagatgaagatgtgatcccagccacccagtgcctgaccccaggcatccgcaccaacgtggtgaccatgcccacagcccacccccgcatcgcccccaaggcctccatggccggggccagcagcagcaaggagagcagccgcatcagtgatggcaagaagcaggagggccctgccacccaggtgtccaagaagaacccagccagcctgcccctgacccaggccgccctgaaggtgctggcccagaaggccagcgaggcccagccccctgtggcccggacccagcccagcagtggagtggacagcgctgtgggcaccctgcctgccaccagcccccagagcacctctgtgcaggccaagggcaccaacaagctgaggaagcccaagctgcctgaggtgcagcaggccaccaaggcccctgagagcagtgatgattctgaggacagcagtgacagcagcagcggctctgaagaagatggagagggcccccagggcgccaagagcgcccacaccctgggccccacccccagcaggacagagaccctggtggaggagacagctgctgagagcagtgaagatgatgtggtggcccccagccagagcctgctgagcggctacatgaccccaggcctgaccccagccaacagccaggccagcaaggccacccccaagctggacagcagccccagcgtgagcagcaccctggccgccaaggatgatcctgatggcaagcaggaggccaagccccagcaggccgccggcatgctgagccccaagacaggaggcaaggaggccgccagcggcaccaccccccagaagagcaggaagcccaagaagggggccggcaacccccaggccagcaccctggccctgcagagcaacatcacccagtgcctgctgggccagccctggcccctgaatgaggcccaggtgcaggcctctgtggtgaaggtgctgacagagctgctggagcaggagaggaagaaggtggtggacaccaccaaggagagcagcaggaagggctgggagagcaggaagaggaagctgagcggggaccagcctgctgcccggacccccaggagcaagaagaagaagaagctgggcgctggggagggcggggaggcctctgtgtccccagagaagaccagcaccaccagcaagggcaaggccaagagggacaaggccagcggagatgtgaaggagaagaagggcaagggcagcctgggcagccagggcgccaaggatgagcctgaggaggagctgcagaagggcatgggcaccgtggagggcggggaccagagcaaccccaagagcaagaaggagaagaagaagagtgacaagaggaagaaggacaaggagaagaaggagaagaagaagaaggccaagaaggccagcaccaaggacagcgagagccccagccagaagaagaagaagaagaagaagaagacagctgagcagacagtgtag

SEQ ID NO: 174117 - DNA, 4467 bp, synthetic construct
  misc_feature 1..4467: note = Description of Artificial Sequence: Synthetic coding sequence
  source 1..4467: mol_type = other DNA
atggccgaggccaggaagagaagagagctgctgcccctcatctaccaccacctgctgcgggccggctacgtgcgggccgcccgggaggtgaaggagcagagcggccagaagtgcttcctggcccagcctgtgaccctgctggacatctacacccactggcagcagaccagcgagctgggcaggaagaggaaggccgaggaggatgctgccctgcaggccaagaagaccagggtgtctgaccccatcagcaccagcgagagcagcgaggaggaggaggaggccgaggccgagacagccaaggccaccccccggctggccagcaccaacagctctgtgctgggcgctgacctgcccagctccatgaaggagaaggccaaggccgagacagagaaggccggcaagacaggcaacagcatgccccacccagccaccgggaagacagtggccaacctgctgagcggcaagagccccaggaagtctgctgagcccagcgccaacaccaccctggtgtctgaaacagaggaggagggctctgtgcctgccttcggggctgctgccaagccaggcatggtgtctgctggccaggccgacagcagcagcgaggacaccagcagcagcagtgatgaaacagatgtggagggcaagcccagcgtgaagccagcccaggtgaaggccagctctgtgtccaccaaggagagccctgccaggaaggccgccccagcccctgggaaggtgggagatgtgaccccccaggtgaagggcggggccctgcccccagccaagagggccaagaagccagaggaggagagcgagagcagcgaggagggcagcgagagcgaggaggaggccccagctggcaccaggagccaggtgaaggccagcgagaagatcctgcaggtgcgggccgccagcgccccagccaagggcaccccaggaaaaggagccaccccagcccctcctgggaaggccggggctgtggccagccagaccaaggccggcaagccagaagaagattctgagagcagcagcgaggagagcagtgacagcgaggaggagaccccagctgccaaggccctgctgcaggccaaggccagcggcaagaccagccaggtgggcgccgccagcgccccagccaaggagagccccaggaagggggccgccccagcccctcctgggaagacaggccctgctgtggccaaggcccaggccggcaagcgggaggaggacagccagagcagcagcgaggagagtgacagcgaggaggaggccccagcccaggccaagcccagcggcaaggccccccaggtgcgggccgccagcgccccagccaaggagagccccaggaaaggagctgccccagccccacccaggaagacaggccctgctgctgcccaggtgcaggtgggcaagcaggaggaggacagccgcagcagcagcgaggagagtgacagcgaccgggaggccctggccgccatgaatgctgcccaggtgaagcccctgggcaagagcccccaggtgaagccagccagcaccatgggcatgggccccctgggcaaaggagctggccctgtgcccccaggcaaggtgggccctgccaccccatctgcccaggtgggcaagtgggaggaggacagcgagagcagcagcgaggagagcagtgacagcagtgatggagaggtgcccacagctgtggccccagcccaggagaagagcctgggcaacatcctgcaggccaagcccaccagcagccctgccaagggccccccccagaaggccggccctgtggccgtgcaggtgaaggccgagaagcccatggacaacagcgagagcagcgaggagagcagtgacagcgctgacagcgaggaggccccagctgccatgacagctgcccaggccaagccagccctgaagatcccccagaccaaggcctgccccaagaagaccaacaccacagccagcgccaaggtggcccctgtgcgggtgggcacccaggcccccaggaaggccggcacagccaccagccctgctggcagcagccctgctgtggccggcggcacccagaggcctgctgaggacagcagcagcagcgaggagagtgacagcgaggaggagaagacaggcctggccgtgacagtgggccaggccaagtctgtgggcaagggcctgcaggtgaaggccgcctctgtgcctgtgaagggcagcctgggccagggcacagcccctgtgctgcccgggaagacaggccccaccgtgacccaggtgaaggccgagaagcaggaggacagcgagagcagcgaggaggagagtgacagcgaggaggccgccgccagccctgcccaggtgaagacctctgtgaagaagacccaggccaaggccaacccagctgctgcccgggcccccagcgccaagggcaccatcagcgcccctgggaaggtggtgacagctgctgcccaggccaagcagaggagccccagcaaggtgaagccccctgtgaggaacccccagaacagcacagtgctggcccggggccctgcctctgtgcccagcgtgggcaaggctgtggccacagctgcccaggcccagacaggccctgaggaggacagcggcagcagcgaggaggagagtgacagcgaggaggaggccgagaccctggcccaggtgaagcccagcggcaagacccaccagatccgggccgccctggccccagccaaggagagccccaggaaaggagctgcccccaccccacctgggaagacaggccccagcgctgcccaggccggcaagcaggatgacagcggcagcagcagcgaggagagtgacagtgatggagaggccccagctgctgtgaccagcgcccaggtgatcaagcccccactcatctttgtggaccccaacagaagccctgctggccctgctgccaccccagcccaggcccaggccgccagcacccccaggaaggcccgggccagcgagagcacagcccggagcagcagcagcgagagtgaagatgaagatgtgatcccagccacccagtgcctgaccccaggcatccgcaccaacgtggtgaccatgcccacagcccaccccagaattgcccccaaggcctccatggccggggccagcagcagcaaggagagcagccgcatcagtgatggcaagaagcaggagggccctgccacccaggtgtccaagaagaacccagccagcctgcccctgacccaggccgccctgaaggtgctggcccagaaggccagcgaggcccagccccctgtggcccggacccagcccagcagcggcgtggacagcgctgtgggcaccctgcctgccaccagcccccagagcacctctgtgcaggccaagggcaccaacaagctgaggaagcccaagctgcctgaggtgcagcaggccaccaaggcccctgagagcagtgatgacagcgaggacagcagtgacagcagcagcggcagcgaggaggatggagagggcccccagggcgccaagagcgcccacaccctgggccccacccccagcaggacagagaccctggtggaggagacagctgctgagagcagtgaagatgatgtggtggcccccagccagagcctgctgagcggctacatgaccccaggcctgaccccagccaacagccaggccagcaaggccacccccaagctggacagcagccccagcgtgagcagcaccctggccgccaaggatgatcctgatggcaagcaggaggccaagccccagcaggccgccggcatgctgagccccaagacaggaggcaaggaggccgccagcggcaccaccccccagaagagcaggaagcccaagaagggagctggcaacccccaggccagcaccctggccctgcagagcaacatcacccagtgcctgctgggccagccctggcccctgaatgaggcccaggtgcaggcctctgtggtgaaggtgctgacagagctgctggagcaggagaggaagaaggtggtggacaccaccaaggagagcagcaggaagggctgggagagcaggaagaggaagctgagcggggaccagcctgctgcccggacccccaggagcaagaagaagaagaagctgggcgctggggagggcggggaggcctctgtgtccccagagaagaccagcaccaccagcaagggcaaggccaagagggacaaggccagcggagatgtgaaggagaagaagggcaagggcagcctgggcagccagggcgccaaggatgagcctgaggaggagctgcagaagggcatgggcaccgtggagggcggggaccagagcaaccccaagagcaagaaggagaagaagaagagtgacaagaggaagaaggacaaggagaagaaggagaagaagaagaaggccaagaaggccagcaccaaggacagcgagagccccagccagaagaagaagaagaagaagaagaagacagctgagcagacagtgtag

SEQ ID NO: 174118 - DNA, 255 bp, synthetic construct
  misc_feature 1..255: note = Description of Artificial Sequence: Synthetic coding sequence
  source 1..255: mol_type = other DNA
atggccaccatggagaacaaggtgatctgtgccctggtgctggtgtccatgctggccctgggcaccctggccgaggcccagacagagacctgcaccgtggccccccgggagcggcagaactgtggcttccctggggtgacccccagccagtgtgccaacaagggctgctgctttgatgacacagtgcggggcgtgccctggtgcttctaccccaacaccattgatgtgcccccagaggaggagtgtgagttctag

SEQ ID NO: 174119 - DNA, 390 bp, synthetic construct
  misc_feature 1..390: note = Description of Artificial Sequence: Synthetic coding sequence
  source 1..390: mol_type = other DNA
atgggcagaagagatgcccagctgctggccgccctgctggtgctgggcctgtgtgccctggccggcagcgagaagcccagcccctgccagtgcagccggctgagcccccacaacagaaccaactgtggcttccctggcatcaccagtgaccagtgctttgacaatggctgctgctttgacagctctgtgactggagtgccctggtgcttccaccccctgcccaagcaggagagtgaccagtgtgtgatggaggtgtctgacagaagaaactgtggctacccaggcatcagccctgaggagtgtgccagcaggaagtgctgcttcagcaacttcatctttgaggtgccctggtgcttcttccccaagtctgtggaggactgccactactag

SEQ ID NO: 174120 - DNA, 1749 bp, synthetic construct
  misc_feature 1..1749: note = Description of Artificial Sequence: Synthetic coding sequence
  source 1..1749: mol_type = other DNA
atgcctggccgcacctgggagctgtgcctgctgctgctgctgggcctgggcctgggcagccaggaggccctgcccccaccctgtgagagcgagatctactgccacggggagctgctgaaccaggtgcagatggccaagctgtaccaggatgacaagcagtttgtggacatgcccctgagcatcgcccctgagcaggtgctgcagaccttcacagagctgagccgggaccacaaccacagcatcccccgggagcagctgcaggcctttgtgcatgagcacttccaggccaagggccaggagctgcagccctggaccccagctgactggaaggacagcccccagttcctgcagaagatcagtgatgccaagctgcgggcctgggccggccagctgcaccagctgtggaagaagctgggcaagaagatgaagccagaggtgctgagccaccctgagcgcttcagcctcatctacagcgagcaccccttcatcgtgcctgggggccgctttgtggagttctactactgggacagctactgggtgatggagggcctgctgctgtctgagatggccgagaccgtgaagggcatgctgcagaacttcctggacctggtgaagacctacggccacgtgcccaacggcggccgggtgtactacctgcagaggagccagccccccctgctgaccctgatgatggactgctacctgacccacaccaatgacacagccttcctgcaggagaacatcgagaccctggccctggagctggacttctggaccaagaacagaacagtgtctgtgtccctggagggcaagaactacctgctgaaccgctactacgtgccctacggcggccccaggcctgagagctacagcaaggatgtggagctggccgacaccctgcctgagggggaccgggaggccctgtgggccgagctgaaggccggggctgagagcggctgggacttcagcagccgctggctgattggaggccccaaccccaacagcctgagcggcatccgcaccagcaagctggtgcctgtggacctgaatgccttcctgtgccaggccgaggagctgatgagcaacttctacagccggctgggcaatgacagccaggccaccaagtaccgcatcctgcggagccagaggctggccgccctgaacacagtgctgtgggatgagcagacaggagcctggtttgattatgacctggagaagaagaagaagaaccgggagttctaccccagcaacctgacccccctgtgggccggctgcttcagtgaccccggggtggccgacaaggccctgaagtacctggaggacaaccgcatcctgacctaccagtatggcatccccaccagcctgcagaagacaggccagcagtgggacttccccaatgcctgggcccccctgcaggacctggtgatccggggcctggccaaggcccccctgcggcgggcccaggaggtggccttccagctggcccagaactggatccgcaccaactttgatgtgtacagccagaagagcgccatgtatgagaagtatgatgtgtccaatggaggccagcccggcggcggcggggagtatgaggtgcaggagggcttcggctggaccaacggggtggtgctgatgctgctggaccgctacggggaccggctgaccagcggccccaagctgcccttcctggagccccactgcctggccaccctgctgcccagcctgctgctgagcctgctgccctggtag

SEQ ID NO: 174121 - DNA, 1656 bp, synthetic construct
  misc_feature 1..1656: note = Description of Artificial Sequence: Synthetic coding sequence
  source 1..1656: mol_type = other DNA
atgcctggccgcacctgggagctgtgcctgctgctgctgctgggcctgggcctgggcagccaggaggccctgcccccaccctgtgagagcgagatctactgccacggggagctgctgaaccaggtgcagatggccaagctgtaccaggatgacaagcagtttgtggacatgcccctgagcatcgcccctgagcaggtgctgcagaccttcacagagctgagccgggaccacaaccacagcatcccccgggagcagctgcaggcctttgtgcatgagcacttccaggccaagggccaggagctgcagccctggaccccagctgactggaaggacagcccccagttcctgcagaagatcagtgatgccaagctgcgggcctgggccggccagctgcaccagctgtggaagaagctgggcaagaagatgaagccagaggtgctgagccaccctgagcgcttcagcctcatctacagcgagcaccccttcatcgtgcctgggggccgctttgtggagttctactactgctacggccacgtgcccaatggaggccgggtgtactacctgcagaggagccagccccccctgctgaccctgatgatggactgctacctgacccacaccaatgacacagccttcctgcaggagaacatcgagaccctggccctggagctggacttctggaccaagaacagaacagtgtctgtgtccctggagggcaagaactacctgctgaaccgctactacgtgccctatggaggccccaggcctgagagctacagcaaggatgtggagctggccgacaccctgcctgagggggaccgggaggccctgtgggccgagctgaaggccggggctgagagcggctgggacttcagcagccgctggctgattggaggccccaaccccaacagcctgagcggcatccgcaccagcaagctggtgcctgtggacctgaatgccttcctgtgccaggccgaggagctgatgagcaacttctacagccggctgggcaatgacagccaggccaccaagtaccgcatcctgcggagccagaggctggccgccctgaacacagtgctgtgggatgagcagacaggagcctggtttgattatgacctggagaagaagaagaagaaccgggagttctaccccagcaacctgacccccctgtgggccggctgcttcagtgaccccggggtggccgacaaggccctgaagtacctggaggacaaccgcatcctgacctaccagtatggcatccccaccagcctgcagaagacaggccagcagtgggacttccccaatgcctgggcccccctgcaggacctggtgatccggggcctggccaaggcccccctgcggcgggcccaggaggtggccttccagctggcccagaactggatccgcaccaactttgatgtgtacagccagaagagcgccatgtatgagaagtatgatgtgtccaatggaggccagcccggcggcggcggggagtatgaggtgcaggagggcttcggctggaccaatggagtggtgctgatgctgctggacagatatggagaccggctgaccagcggccccaagctgcccttcctggagccccactgcctggccaccctgctgcccagcctgctgctgagcctgctgccctggtag

SEQ ID NO: 174122 - DNA, 1380 bp, synthetic construct
  misc_feature 1..1380: note = Description of Artificial Sequence: Synthetic coding sequence
  source 1..1380: mol_type = other DNA
atgcccaactgtgtgcccggccagggcagctgcatcagcagcggccgctcctggggccgccgctaccagaggcctggccctgcccagggcctgaccaagggcacagaggagagaaatgtgcctggggcccacagcgtgtttggagcccagatccgggacagctactgggtgatggagggcctgctgctgtctgagatggccgagaccgtgaagggcatgctgcagaacttcctggacctggtgaagacctacggccacgtgcccaatggaggccgggtgtactacctgcagaggagccagccccccctgctgaccctgatgatggactgctacctgacccacaccaatgacacagccttcctgcaggagaacatcgagaccctggccctggagctggacttctggaccaagaacagaacagtgtctgtgtccctggagggcaagaactacctgctgaaccgctactacgtgccctatggaggccccaggcctgagagctacagcaaggatgtggagctggccgacaccctgcctgagggggaccgggaggccctgtgggccgagctgaaggccggggctgagagcggctgggacttcagcagccgctggctgattggaggccccaaccccaacagcctgagcggcatccgcaccagcaagctggtgcctgtggacctgaatgccttcctgtgccaggccgaggagctgatgagcaacttctacagccggctgggcaatgacagccaggccaccaagtaccgcatcctgcggagccagaggctggccgccctgaacacagtgctgtgggatgagcagacaggagcctggtttgattatgacctggagaagaagaagaagaaccgggagttctaccccagcaacctgacccccctgtgggccggctgcttcagtgaccccggggtggccgacaaggccctgaagtacctggaggacaaccgcatcctgacctaccagtatggcatccccaccagcctgcagaagacaggccagcagtgggacttccccaatgcctgggcccccctgcaggacctggtgatccggggcctggccaaggcccccctgcggcgggcccaggaggtggccttccagctggcccagaactggatccgcaccaactttgatgtgtacagccagaagagcgccatgtatgagaagtatgatgtgtccaatggaggccagcccggcggcggcggggagtatgaggtgcaggagggcttcggctggaccaatggagtggtgctgatgctgctggacagatatggagaccggctgaccagcggccccaagctgcccttcctggagccccactgcctggccaccctgctgcccagcctgctgctgagcctgctgccctggtag

SEQ ID NO: 174123 - DNA, 1641 bp, synthetic construct
  misc_feature 1..1641: note = Description of Artificial Sequence: Synthetic coding sequence
  source 1..1641: mol_type = other DNA
atgcctggccgcacctgggagctgtgcctgctgctgctgctgggcctgggcctgggcagccaggaggccctgcccccaccctgtgagagcgagatctactgccacggggagctgctgaaccaggtgcagatggccaagctgtaccaggatgacaagcagtttgtggacatgcccctgagcatcgcccctgagcaggtgctgcagaccttcacagagctgagccgggaccacaaccacagcatcccccgggagcagctgcaggcctttgtgcatgagcacttccaggccaagggccaggagctgcagccctggaccccagctgactggaaggacagcccccagttcctgcagaagatcagtgatgccaagctgcgggcctgggccggccagctgcaccagctgtggaagaagctgggcaagaagatgaagccagaggtgctgagccaccctgagcgcttcagcctcatctacagcgagcaccccttcatcgtgcctgggggccgctttgtggagttctactactgctacggccacgtgcccaatggaggccgggtgtactacctgcagaggagccagccccccctgctgaccctgatgatggactgctacctgacccacaccaatgacacagccttcctgcaggagaacatcgagaccctggccctggagctggacttctggaccaagaacagaacagtgtctgtgtccctggagggcaagaactacctgctgaaccgctactacgtgccctatggaggccccaggcctgagagctacagcaaggatgtggagctggccgacaccctgcctgagggggaccgggaggccctgtgggccgagctgaaggccggggctgagagcggctgggacttcagcagccgctggctgattggaggccccaaccccaacagcctgagcggcatccgcaccagcaagctggtgcctgtggacctgaatgccttcctgtgccaggccgaggagctgatgagcaacttctacagccggctgggcaatgacagccaggccaccaagtaccgcatcctgcggagccagaggctggccgccctgaacacagtgctgtgggatgagcagacaggagcctggtttgattatgacctggagaagaagaagaagaaccgggagttctaccccagcaacctgacccccctgtgggccggctgcttcagtgaccccggggtggccgacaaggccctgaagtacctggaggacaaccgcatcctgacctaccagtatggcatccccaccagcctgcagaagacaggccagcagtgggacttccccaatgcctgggcccccctgcaggacctggtgatccggggcctggccaaggcccccctgcggcgggcccaggaggtggccttccagctggcccagaactggatccgcaccaactttgatgtgtacagccagaagagcgccatgtatgagaagtatgatgtgtccaatggaggccagcccggcggcggcggggagtatgaggtgcaggagggcttcggctggaccaatggagtggtgctgatgctgctggacagatatggagaccggctgaccagcggccccaagctgcccttcctggagccccactgcctgggcccccccttctgcccagccagctgctag

SEQ ID NO: 174124 - DNA, 1734 bp, synthetic construct
  misc_feature 1..1734: note = Description of Artificial Sequence: Synthetic coding sequence
  source 1..1734: mol_type = other DNA
atgcctggccgcacctgggagctgtgcctgctgctgctgctgggcctgggcctgggcagccaggaggccctgcccccaccctgtgagagcgagatctactgccacggggagctgctgaaccaggtgcagatggccaagctgtaccaggatgacaagcagtttgtggacatgcccctgagcatcgcccctgagcaggtgctgcagaccttcacagagctgagccgggaccacaaccacagcatcccccgggagcagctgcaggcctttgtgcatgagcacttccaggccaagggccaggagctgcagccctggaccccagctgactggaaggacagcccccagttcctgcagaagatcagtgatgccaagctgcgggcctgggccggccagctgcaccagctgtggaagaagctgggcaagaagatgaagccagaggtgctgagccaccctgagcgcttcagcctcatctacagcgagcaccccttcatcgtgcctgggggccgctttgtggagttctactactgggacagctactgggtgatggagggcctgctgctgtctgagatggccgagaccgtgaagggcatgctgcagaacttcctggacctggtgaagacctacggccacgtgcccaacggcggccgggtgtactacctgcagaggagccagccccccctgctgaccctgatgatggactgctacctgacccacaccaatgacacagccttcctgcaggagaacatcgagaccctggccctggagctggacttctggaccaagaacagaacagtgtctgtgtccctggagggcaagaactacctgctgaaccgctactacgtgccctacggcggccccaggcctgagagctacagcaaggatgtggagctggccgacaccctgcctgagggggaccgggaggccctgtgggccgagctgaaggccggggctgagagcggctgggacttcagcagccgctggctgattggaggccccaaccccaacagcctgagcggcatccgcaccagcaagctggtgcctgtggacctgaatgccttcctgtgccaggccgaggagctgatgagcaacttctacagccggctgggcaatgacagccaggccaccaagtaccgcatcctgcggagccagaggctggccgccctgaacacagtgctgtgggatgagcagacaggagcctggtttgattatgacctggagaagaagaagaagaaccgggagttctaccccagcaacctgacccccctgtgggccggctgcttcagtgaccccggggtggccgacaaggccctgaagtacctggaggacaaccgcatcctgacctaccagtatggcatccccaccagcctgcagaagacaggccagcagtgggacttccccaatgcctgggcccccctgcaggacctggtgatccggggcctggccaaggcccccctgcggcgggcccaggaggtggccttccagctggcccagaactggatccgcaccaactttgatgtgtacagccagaagagcgccatgtatgagaagtatgatgtgtccaatggaggccagcccggcggcggcggggagtatgaggtgcaggagggcttcggctggaccaacggggtggtgctgatgctgctggaccgctacggggaccggctgaccagcggccccaagctgcccttcctggagccccactgcctgggcccccccttctgcccagccagctgctag

SEQ ID NO: 174125 - DNA, 273 bp, synthetic construct
  misc_feature 1..273: note = Description of Artificial Sequence: Synthetic coding sequence
  source 1..273: mol_type = other DNA
atggaggagaccacagactggatctacggcttcttcagcctgctgagtgacatcatcagcagtgaagatgaagaagatgatgatggagatgaggacacagacaagggggagattgatgagccccccctgaggaagaaggagatccacaaggacaagacagagaagcaggagaagccagagaggaagatccagaccaaggactggagcgccaacagcagcaccatccgcaccctgaagctgacccagctgaagcccatctacatctgcacctag

SEQ ID NO: 174126 - DNA, 654 bp, synthetic construct
  misc_feature 1..654: note = Description of Artificial Sequence: Synthetic coding sequence
  source 1..654: mol_type = other DNA
atggaggagaccacagactggatctacggcttcttcagcctgctgagtgacatcatcagcagtgaagatgaagaagatgatgatggagatgaggacacagacaagggggagattgatgagccccccctgaggaagaaggagatccacaaggacaagacagagaagcaggagaagccagagaggaagatccagaccaaggtgacccacaaggagaaggagaagggcaaggagaaggtgcgggagaaggagaagccagagaagaaggccacccacaaggagaagattgagaagaaggagaagccagagaccaagaccctggccaaggagcagaagaaggccaagacagctgagaagtctgaggagaagaccaagaaggaggtgaagggcggcaagcaggagaaggtgaagcagacagctgccaaggtgaaggaggtgcagaagacccccagcaagcccaaggagaaggaggacaaggagaaggctgctgtgtccaagcatgagcagaagggcttccctggccctggcatccggaacagcagctactactgccagtacatcaagggccagatcaatgcctggaatgacctgcggaccagcctgctgcccatcccctacctgagctgtgggaagatgtgcagcaacttcaacaactag

SEQ ID NO: 174127 - DNA, 2166 bp, synthetic construct
  misc_feature 1..2166: note = Description of Artificial Sequence: Synthetic coding sequence
  source 1..2166: mol_type = other DNA
atgacagagatcacagctgagggcaatgccagcaccaccaccaccgtgattgacagcaagaatggatctgtgcccaagagccctgggaaggtgctgaagaggacagtgacagaggacatcgtgaccaccttcagcagccctgctgcctggctgctggtgattgccctgatcatcacctggagcgctgtggccatcgtgatgtttgacctggtggactacaagaacttcagcgccagcagcatcgccaagattggaagtgaccccctgaagctggtgagagatgccatggaggagaccacagactggatctacggcttcttcagcctgctgagtgacatcatcagcagtgaagatgaggaggatgatgatggagatgaggacacagacaagggggagattgatgagccccccctgaggaagaaggagatccacaaggacaagacagagaagcaggagaagccagagaggaagatccagaccaaggtgacccacaaggagaaggagaagggcaaggagaaggtgcgggagaaggagaagccagagaagaaggccacccacaaggagaagattgagaagaaggagaagccagagaccaagaccctggccaaggagcagaagaaggccaagacagctgagaagtctgaggagaagaccaagaaggaggtgaagggcggcaagcaggagaaggtgaagcagacagctgccaaggtgaaggaggtgcagaagacccccagcaagcccaaggagaaggaggacaaggagaaggctgctgtgtccaagcatgagcagaaggaccagtatgccttctgccgctacatgattgacatctttgtgcatggagacctgaagccaggccagagccctgccatccccccacccctgcccacagagcaggccagccggcccaccccagccagccctgccctggaggagaaggagggggagaagaagaaggccgagaagaaggtgaccagcgagaccaagaagaaggagaaggaggacatcaagaagaagtctgagaaggagacagccattgatgtggagaagaaggagcccgggaaggccagcgagaccaagcagggcaccgtgaagattgctgcccaggccgccgccaagaaggatgagaagaaggaggacagcaagaagaccaagaagccagctgaggtggagcagcccaagggcaagaagcaggagaagaaggagaagcacgtggagcccgccaagagccccaagaaggagcacagcgtgcccagcgacaagcaggtgaaggccaagacagagcgggccaaggaggagattggagctgtgtccatcaagaaggctgtgcctgggaagaaggaggagaagaccaccaagacagtggagcaggagatcaggaaggagaagagcggcaagaccagcagcatcctgaaggacaaggagcccatcaagggcaaggaggagaaggtgcctgccagcctgaaggagaaggagcctgagaccaagaaggatgagaagatgagcaaggccggcaaggaggtgaagcccaagccaccccagctgcagggcaagaaggaggagaagccagagccccagatcaagaaggaggccaagccagccatcagcgagaaggtgcagatccacaagcaggacatcgtgaagccagagaagacagtgagccacggcaagccagaggagaaggtgctgaagcaggtgaaggctgtgaccatcgagaagacagccaagcccaagcccaccaagaaggccgagcaccgggagcgggagcccccatccatcaagacagacaagcccaagcccacccccaagggcaccagcgaggtgacagagagcggcaagaagaagacagagatcagcgagaaggagagcaaggagaaggctgacatgaagcacctgcgggaggagaaggtgtccaccaggaaggagagcctgcagctgcacaacgtgaccaaggaggatgtggaggatgtgcctgccagcaagaaggccaaggagggcacagaagatgtgagccccaccaagcagaagagccccatctccttcttccagtgtgtgtacctggatggctacaacggctacggcttccagttccccttcaccccagctgacaggcctggagagagcagcggccaggccaacagccctggccagaagcagcagggccagtag

SEQ ID NO: 174128 - DNA, 81 bp, synthetic construct
  misc_feature 1..81: note = Description of Artificial Sequence: Synthetic coding sequence
  source 1..81: mol_type = other DNA
tgaatccacaaggacaagacagagaagcaggagaagccagagaggaagatccagaccaaggaggtgggccacagcagctag

SEQ ID NO: 174129 - DNA, 456 bp, synthetic construct
  misc_feature 1..456: note = Description of Artificial Sequence: Synthetic coding sequence
  source 1..456: mol_type = other DNA
tgaacccacaaggagaaggagaagggcaaggagaaggtgcgggagaaggagaagccagagaagaaggccacccacaaggagaagattgagaagaaggagaagccagagaccaagaccctggccaaggagcagaagaaggccaagacagctgagaagtctgaggagaagaccaagaaggaggtgaagggcggcaagcaggagaaggtgaagcagacagctgccaaggtgaaggaggtgcagaagacccccagcaagcccaaggagaaggaggacaaggagaaggctgctgtgtccaagcatgagcagaagggcttccctggccctggcatccggaacagcagctactactgccagtacatcaagggccagatcaatgcctggaatgacctgcggaccagcctgctgcccatcccctacctgagctgtgggaagatgtgcagcaacttcaacaactag

SEQ ID NO: 174130 - DNA, 2196 bp, synthetic construct
  misc_feature 1..2196: note = Description of Artificial Sequence: Synthetic coding sequence
  source 1..2196: mol_type = other DNA
attgtggagatctacccccagggcaatgccagcaccaccaccaccgtgattgacagcaagaatggatctgtgcccaagagccctgggaaggtgctgaagaggacagtgacagaggacatcgtgaccaccttcagcagccctgctgcctggctgctggtgattgccctgatcatcacctggagcgctgtggccatcgtgatgtttgacctggtggactacaagaacttcagcgccagcagcatcgccaagattggaagtgaccccctgaagctggtgagagatgccatggaggagaccacagactggatctacggcttcttcagcctgctgagtgacatcatcagcagtgaagatgaggaggatgatgatggagatgaggacacagacaagggggagattgatgagccccccctgaggaagaaggagatccacaaggacaagacagagaagcaggagaagccagagaggaagatccagaccaaggtgacccacaaggagaaggagaagggcaaggagaaggtgcgggagaaggagaagccagagaagaaggccacccacaaggagaagattgagaagaaggagaagccagagaccaagaccctggccaaggagcagaagaaggccaagacagctgagaagtctgaggagaagaccaagaaggaggtgaagggcggcaagcaggagaaggtgaagcagacagctgccaaggtgaaggaggtgcagaagacccccagcaagcccaaggagaaggaggacaaggagaaggctgctgtgtccaagcatgagcagaaggaccagtatgccttctgccgctacatgattgacatctttgtgcatggagacctgaagccaggccagagccctgccatccccccacccctgcccacagagcaggccagccggcccaccccagccagccctgccctggaggagaaggagggggagaagaagaaggccgagaagaaggtgaccagcgagaccaagaagaaggagaaggaggacatcaagaagaagtctgagaaggagacagccattgatgtggagaagaaggtgcaggagcccgggaaggccagcgagaccaagcagggcaccgtgaagattgctgcccaggccgccgccaagaaggatgagaagaaggaggacagcaagaagaccaagaagccagctgaggtggagcagcccaagggcaagaagcaggagaagaaggagaagcacgtggagcccgccaagagccccaagaaggagcacagcgtgcccagcgacaagcaggtgaaggccaagacagagcgggccaaggaggagattggagctgtgtccatcaagaaggctgtgcctgggaagaaggaggagaagaccaccaagacagtggagcaggagatcaggaaggagaagagcggcaagaccagcagcatcctgaaggacaaggagcccatcaagggcaaggaggagaaggtgcctgccagcctgaaggagaaggagcctgagaccaagaaggatgagaagatgagcaaggccggcaaggaggtgaagcccaagccaccccagctgcagggcaagaaggaggagaagccagagccccagatcaagaaggaggccaagccagccatcagcgagaaggtgcagatccacaagcaggacatcgtgaagccagagaagacagtgagccacggcaagccagaggagaaggtgctgaagcaggtgaaggctgtgaccatcgagaagacagccaagcccaagcccaccaagaaggccgagcaccgggagcgggagcccccatccatcaagacagacaagcccaagcccacccccaagggcaccagcgaggtgacagagagcggcaagaagaagacagagatcagcgagaaggagagcaaggagaaggctgacatgaagcacctgcgggaggagaaggtgtccaccaggaaggagagcctgcagctgcacaacgtgaccaaggccgaggaggtggacagcaccctggaggatgtggaggatgtgcctgccagcaagaaggccaaggagggcacagaagatgtgagccccaccaagcagaagagccccatctccttcttccagtgtgtgtacctggatggctacaacggctacggcttccagttccccttcaccccagctgacaggcctggagagagcagcggccaggccaacagccctggccagaagcagcagggccagtag

SEQ ID NO: 174131 - DNA, 2190 bp, synthetic construct
  misc_feature 1..2190: note = Description of Artificial Sequence: Synthetic coding sequence
  source 1..2190: mol_type = other DNA
atgacagagatcacagctgagggcaatgccagcaccaccaccaccgtgattgacagcaagaatggatctgtgcccaagagccctgggaaggtgctgaagaggacagtgacagaggacatcgtgaccaccttcagcagccctgctgcctggctgctggtgattgccctgatcatcacctggagcgctgtggccatcgtgatgtttgacctggtggactacaagaacttcagcgccagcagcatcgccaagattggaagtgaccccctgaagctggtgagagatgccatggaggagaccacagactggatctacggcttcttcagcctgctgagtgacatcatcagcagtgaagatgaggaggatgatgatggagatgaggacacagacaagggggagattgatgagccccccctgaggaagaaggagatccacaaggacaagacagagaagcaggagaagccagagaggaagatccagaccaaggtgacccacaaggagaaggagaagggcaaggagaaggtgcgggagaaggagaagccagagaagaaggccacccacaaggagaagattgagaagaaggagaagccagagaccaagaccctggccaaggagcagaagaaggccaagacagctgagaagtctgaggagaagaccaagaaggaggtgaagggcggcaagcaggagaaggtgaagcagacagctgccaaggtgaaggaggtgcagaagacccccagcaagcccaaggagaaggaggacaaggagaaggctgctgtgtccaagcatgagcagaaggaccagtatgccttctgccgctacatgattgacatctttgtgcatggagacctgaagccaggccagagccctgccatccccccacccctgcccacagagcaggccagccggcccaccccagccagccctgccctggaggagaaggagggggagaagaagaaggccgagaagaaggtgaccagcgagaccaagaagaaggagaaggaggacatcaagaagaagtctgagaaggagacagccattgatgtggagaagaaggagcccgggaaggccagcgagaccaagcagggcaccgtgaagattgctgcccaggccgccgccaagaaggatgagaagaaggaggacagcaagaagaccaagaagccagctgaggtggagcagcccaagggcaagaagcaggagaagaaggagaagcacgtggagcccgccaagagccccaagaaggagcacagcgtgcccagcgacaagcaggtgaaggccaagacagagcgggccaaggaggagattggagctgtgtccatcaagaaggctgtgcctgggaagaaggaggagaagaccaccaagacagtggagcaggagatcaggaaggagaagagcggcaagaccagcagcatcctgaaggacaaggagcccatcaagggcaaggaggagaaggtgcctgccagcctgaaggagaaggagcctgagaccaagaaggatgagaagatgagcaaggccggcaaggaggtgaagcccaagccaccccagctgcagggcaagaaggaggagaagccagagccccagatcaagaaggaggccaagccagccatcagcgagaaggtgcagatccacaagcaggacatcgtgaagccagagaagacagtgagccacggcaagccagaggagaaggtgctgaagcaggtgaaggctgtgaccatcgagaagacagccaagcccaagcccaccaagaaggccgagcaccgggagcgggagcccccatccatcaagacagacaagcccaagcccacccccaagggcaccagcgaggtgacagagagcggcaagaagaagacagagatcagcgagaaggagagcaaggagaaggctgacatgaagcacctgcgggaggagaaggtgtccaccaggaaggagagcctgcagctgcacaacgtgaccaaggccgagaagccagcccgggtgtccaaggatgtggaggatgtgcctgccagcaagaaggccaaggagggcacagaagatgtgagccccaccaagcagaagagccccatctccttcttccagtgtgtgtacctggatggctacaacggctacggcttccagttccccttcaccccagctgacaggcctggagagagcagcggccaggccaacagccctggccagaagcagcagggccagtag

SEQ ID NO: 174132 - DNA, 135 bp, synthetic construct
  misc_feature 1..135: note = Description of Artificial Sequence: Synthetic coding sequence
  source 1..135: mol_type = other DNA
tgaatccacaaggacaagacagagaagcaggagaagccagagaggaagatccagaccaaggactggagcgccaacagcagcaccatccgcaccctgaagctgacccagctgaagcccatctacatctgcacctag

SEQ ID NO: 174133 - DNA, 1038 bp, synthetic construct
  misc_feature 1..1038: note = Description of Artificial Sequence: Synthetic coding sequence
  source 1..1038: mol_type = other DNA
attgtggagatctacccccagggcaatgccagcaccaccaccaccgtgattgacagcaagaatggatctgtgcccaagagccctgggaaggtgctgaagaggacagtgacagaggacatcgtgaccaccttcagcagccctgctgcctggctgctggtgattgccctgatcatcacctggagcgctgtggccatcgtgatgtttgacctggtggactacaagaacttcagcgccagcagcatcgccaagattggaagtgaccccctgaagctggtgagagatgccatggaggagaccacagactggatctacggcttcttcagcctgctgagtgacatcatcagcagtgaagatgaggaggatgatgatggagatgaggacacagacaagggggagattgatgagccccccctgaggaagaaggagatccacaaggacaagacagagaagcaggagaagccagagaggaagatccagaccaaggtgacccacaaggagaaggagaagggcaaggagaaggtgcgggagaaggagaagccagagaagaaggccacccacaaggagaagattgagaagaaggagaagccagagaccaagaccctggccaaggagcagaagaaggccaagacagctgagaagtctgaggagaagaccaagaaggaggtgaagggcggcaagcaggagaaggtgaagcagacagctgccaaggtgaaggaggtgcagaagacccccagcaagcccaaggagaaggaggacaaggagaaggctgctgtgtccaagcatgagcagaaggaccagtatgccttctgccgctacatgattgacatctttgtgcatggagacctgaagccaggccagagccctgccatccccccacccctgcccacagagcaggccagccggcccaccccagccagccctgccctggaggagaaggagggggagaagaagaaggccgagaagaaggtgaccagcgagaccaagaagaaggagaaggaggacatcaagaagaagaagaagaagaagaagaagaagtag

SEQ ID NO: 174134 - DNA, 504 bp, synthetic construct
  misc_feature 1..504: note = Description of Artificial Sequence: Synthetic coding sequence
  source 1..504: mol_type = other DNA
atgacagagatcacagctgagggcaatgccagcaccaccaccaccgtgattgacagcaagaatggatctgtgcccaagagccctgggaaggtgctgaagaggacagtgacagaggacatcgtgaccaccttcagcagccctgctgcctggctgctggtgattgccctgatcatcacctggagcgctgtggccatcgtgatgtttgacctggtggactacaagaacttcagcgccagcagcatcgccaagattggaagtgaccccctgaagctggtgagagatgccatggaggagaccacagactggatctacggcttcttcagcctgctgagtgacatcatcagcagtgaagatgaggaggatgatgatggagatgaggacacagacaagggggagattgatgagccccccctgaggaagaaggagatccacaaggacaagacagagaagcaggagaagccagagaggaagatccagaccaaggaggtgggccacagcagctag

SEQ ID NO: 174135 - DNA, 987 bp, synthetic construct
  misc_feature 1..987: note = Description of Artificial Sequence: Synthetic coding sequence
  source 1..987: mol_type = other DNA
atgacagagatcacagctgagggcaatgccagcaccaccaccaccgtgattgacagcaagaatggatctgtgcccaagagccctgggaaggtgctgaagaggacagtgacagaggacatcgtgaccaccttcagcagccctgctgcctggctgctggtgattgccctgatcatcacctggagcgctgtggccatcgtgatgtttgacctggtggactacaagaacttcagcgccagcagcatcgccaagattggaagtgaccccctgaagctggtgagagatgccatggaggagaccacagactggatctacggcttcttcagcctgctgagtgacatcatcagcagtgaagatgaggaggatgatgatggagatgaggacacagacaagggggagattgatgagccccccctgaggaagaaggagatccacaaggacaagacagagaagcaggagaagccagagaggaagatccagaccaaggtgacccacaaggagaaggagaagggcaaggagaaggtgcgggagaaggagaagccagagaagaaggccacccacaaggagaagattgagaagaaggagaagccagagaccaagaccctggccaaggagcagaagaaggccaagacagctgagaagtctgaggagaagaccaagaaggaggtgaagggcggcaagcaggagaaggtgaagcagacagctgccaaggtgaaggaggtgcagaagacccccagcaagcccaaggagaaggaggacaaggagaaggctgctgtgtccaagcatgagcagaaggaccagtatgccttctgccgctacatgattgacatctttgtgcatggagacctgaagccaggccagagccctgccatccccccacccctgcccacagagcaggccagccggcccaccccagccagccctgccctggagggggacaaggccagcaaggagaagaagaggaagatgaagaggatgtctgagaagtag

SEQ ID NO: 174136 - DNA, 894 bp, synthetic construct
  misc_feature 1..894: note = Description of Artificial Sequence: Synthetic coding sequence
  source 1..894: mol_type = other DNA
atgacagagatcacagctgagggcaatgccagcaccaccaccaccgtgattgacagcaagaatggatctgtgcccaagagccctgggaaggtgctgaagaggacagtgacagaggacatcgtgaccaccttcagcagccctgctgcctggctgctggtgattgccctgatcatcacctggagcgctgtggccatcgtgatgtttgacctggtggactacaagaacttcagcgccagcagcatcgccaagattggaagtgaccccctgaagctggtgagagatgccatggaggagaccacagactggatctacggcttcttcagcctgctgagtgacatcatcagcagtgaagatgaggaggatgatgatggagatgaggacacagacaagggggagattgatgagccccccctgaggaagaaggagatccacaaggacaagacagagaagcaggagaagccagagaggaagatccagaccaaggtgacccacaaggagaaggagaagggcaaggagaaggtgcgggagaaggagaagccagagaagaaggccacccacaaggagaagattgagaagaaggagaagccagagaccaagaccctggccaaggagcagaagaaggccaagacagctgagaagtctgaggagaagaccaagaaggaggtgaagggcggcaagcaggagaaggtgaagcagacagctgccaaggtgaaggaggtgcagaagacccccagcaagcccaaggagaaggaggacaaggagaaggctgctgtgtccaagcatgagcagaagggccagagccctgccatccccccacccctgcccacagagcaggccagccggcccaccccagccagccctgccctggagggcaagtacttcttcttctcctag

SEQ ID NO: 174137 - DNA, 5832 bp, synthetic construct
  misc_feature 1..5832: note = Description of Artificial Sequence: Synthetic coding sequence
  source 1..5832: mol_type = other DNA
atgagccccctgctgcggagcatctgtgacatcacagagatcttcaaccagtatgtgtcccatgactgtgatggagctgccctgaccaagaaggacctgaagaacctgctggagcgggagtttggagctgtgctgcggcggccccatgaccccaagacagtggacctgatcctggagctgctggacctggacagcaatggccgggtggacttcaatgagttcctgctcttcatcttcaaggtggcccaggcctgctactatgccctgggccaggccaccggcctggatgaggagaagagggcccgctgtgatggcaaggagagcctgctgcaggaccggcggcaggaggaggaccagaggagatttgagccccgggaccggcagctggaggaggagcccggccagaggcggcggcagaagaggcaggagcaggagcgggagctggccgagggggaggagcagagcgagaagcaggagcggctggagcagagggaccggcagaggagagatgaggagctgtggaggcagaggcaggagtggcaggagcgggaggagcggcgggcagaggaggagcagctgcagagctgcaagggccatgaaacagaggagttcccagatgaggagcagctgcggcggcgggagctgctggagctgcggaggaagggccgggaggagaagcagcagcagaggcgggagcggcaggacagagtcttccaggaggaggaggagaaggagtggaggaagcgggagaccgtgctgaggaaggaggaggagaagctgcaggaggaggagccccagaggcagcgggagctgcaggaggaggaggagcagctgaggaagctggagcggcaggagctgcggcgggagcggcaggaggaggagcagcagcagcagaggctgcggcgggagcagcagctgcggaggaagcaggaggaggagcggcgggagcagcaggaggagcggcgggagcagcaggagcggcgggagcagcaggaggagcggcgggagcagcagctgcggcgggagcaggaggagcggcgggagcagcagctgcggcgggagcaggaggaggagcggcgggagcagcagctgcggcgggagcaggaggaggagcggcgggagcagcagctgcggcgggagcagcagctgcggcgggagcagcagctgcggcgggagcagcagctgcggcgggagcagcagctgcggcgggagcagcagctgcggcgggagcagcagctgcggcgggagcagcagctgcggcgggagcagcagctgcggcgggagcaggaggaggagagacatgagcagaagcatgagcaggagcggcgggagcagaggctgaagcgggagcaggaggagcggcgggactggctgaagcgggaggaggagacagaaagacatgagcaggagaggaggaagcagcagctgaagagggaccaggaggaggagcggcgggagcgctggctgaagctggaggaggaggagcggcgggagcagcaggagcggcgggagcagcagctgcggcgggagcaggaggagcggcgggagcagaggctgaagaggcaggaggaggaggagcggctgcagcagaggctgcggtctgagcagcagctgcggcgggagcaggaggagcggcgggagcagctgctgaagcgggaggaggagaagaggctggagcaggagcggcgggagcagaggctgaagcgggagcaggaggagcggcgggaccagctgctgaagcgggaggaggagcggcggcagcagaggctgaagcgggagcaggaggagcggctggagcagaggctgaagcgggaggaggtggagcggctggagcaggaggagcggcgggagcagaggctgaagcgggaggagcctgaggaggagcggcggcagcagctgctgaagtctgaggagcaggaggagcggcggcagcagcagctgcggcgggagcagcaggagcggcgggagcagaggctgaagcgggaggaggaggaggagcggctggagcagaggctgaagcgggagcacgaggaggagcggcgggagcaggagctggccgaggaggagcaggagcaggcccgggagcgcatcaagagccgcatccccaagtggcagtggcagctggagagcgaggctgatgcccggcagagcaaggtgtacagccggcccaggaagcaggagggccagaggcggcggcaggagcaggaggagaagagaagaagaagagagagcgagctgcagtggcaggaggaggagcgggcccaccggcagcagcaggaggaggagcagaggcgggacttcacctggcagtggcaggccgaggagaagtctgagcggggccggcagaggctgagcgcccggccccccctgcgggagcagcgggagcggcagctgcgggcagaggagcggcagcagcgggagcagcgcttcctgcctgaggaggaggagaaggagcagaggcggcggcagaggcgggagcgggagaaggagctgcagttcctggaggaggaggagcagctgcagaggcgggagcgggcccagcagctgcaggaggaggaggatggcctgcaggaggaccaggagaggagaagaagccaggagcagaggcgggaccagaagtggcgctggcagctggaggaggagaggaagagaagaagacacaccctgtatgccaagccagccctgcaggagcagctgaggaaggagcagcagctgctgcaggaggaggaggaggagctgcagcgggaggagcgggagaagagaagacggcaggagcaggagcggcagtaccgggaggaggagcagctgcagcaggaggaggagcagctgctgcgggaggagcgggagaagagaagacggcaggagcgggagcggcagtacaggaaggacaagaagctgcagcagaaggaggagcagctgctgggggaggagcctgagaagagaagacggcaggagcgggagaagaagtaccgggaggaggaggagctgcagcaggaggaggagcagctgctgcgggaggagcgggagaagagaagacggcaggagtgggagcggcagtacaggaagaaggatgagctgcagcaggaggaggagcagctgctgcgggaggagcgggagaagaggcggctgcaggagcgggagcggcagtaccgggaggaggaggagctgcagcaggaggaggagcagctgctgggggaggagcgggagacccggcggcggcaggagctggagcggcagtacaggaaggaggaggagctgcagcaggaggaggagcagctgctgcgggaggagcctgagaagagaagacggcaggagcgggagcggcagtgccgggaggaggaggagctgcagcaggaggaggagcagctgctgcgggaggagcgggagaagagaagacggcaggagctggagcggcagtaccgggaggaggaggaggtgcagcaggaggaggagcagctgctgcgggaggagcctgagaagagaagacggcaggagctggagcggcagtaccgggaggaggaggagctgcagcaggaggaggagcagctgctgcgggaggagcaggagaagaggcggcaggagcgggagcggcagtaccgggaggaggaggagctgcagaggcagaagaggaagcagcgctacagagatgaggaccagaggagtgacctgaagtggcagtgggagcctgagaaggaaaatgctgtgcgggacaacaaggtgtactgcaagggccgggagaatgagcagttccggcagctggaggacagccagctgcgggaccggcagagccagcaggacctgcagcacctgctgggggagcagcaggagcgggaccgggagcaggagcggcggcgctggcagcagagggacagacacttccctgaggaggagcagctggagcgggaggagcagaaggaggccaagagaagagacaggaagagccaggaggagaagcagctgctgcgggaggagcgggaggagaagagaagacggcaggagacagacaggaagttccgggaggaggagcagctgctgcaggagcgggaggagcagcccctgcggcggcaggagcgggacaggaagttccgggaggaggagctgcggcaccaggagcagggcaggaagttcctggaggaggagcagaggctgcggcggcaggagcgggagaggaagttcctgaaggaggagcagcagctgcgctgccaggagcgggagcagcagctgcggcaggaccgggacaggaagttccgggaggaggagcagcagctgagccggcaggagcgggacaggaagttccgggaggaggagcagcaggtgcggcggcaggagcgggagaggaagttcctggaggaggagcagcagctgcggcaggagcggcacaggaagttccgggaggaggagcagctgctgcaggagcgggaggagcagcagctgcaccggcaggagcgggacaggaagttcctggaggaggagcagcagctgcggcggcaggagcgggacaggaagttccgggagcaggagctgcggagccaggagcctgagaggaagttcctggaggaggagcagcagctgcaccggcagcagaggcagaggaagttcctgcaggaggagcagcagctgcggcggcaggagcggggccagcagaggcggcaggaccgggacaggaagttccgggaggaggagcagctgcggcaggagcgggaggagcagcagctgagccggcaggagcgggacaggaagttccggctggaggagcagaaggtgcggcggcaggagcaggagaggaagttcatggaggatgagcagcagctgcggcggcaggagggccagcagcagctgcggcaggagcgggacaggaagttcagagaagatgagcagctgctgcaggagcgggaggagcagcagctgcaccggcaggagcgggacaggaagttcctggaggaggagccccagctgcggcggcaggagcgggagcagcagctgcggcatgaccgggacaggaagttccgggaggaggagcagctgctgcaggagggggaggagcagcagctgcggcggcaggagcgggacaggaagttccgggaggaggagcagcagctgcggcggcaggagcgggagaggaagttcctgcaggaggagcagcagctgcggcggcaggagctggagaggaagttccgggaggaggagcagctgcggcaggagacagagcaggagcagctgcggcggcaggagcgctacaggaagatcctggaggaggagcagctgcggcctgagcgggaggagcagcagctgcggcggcaggagcgggacaggaagttccgggaggaggagcagctgcggcaggagcgggaggagcagcagctgcggagccaggagagtgacaggaagttccgggaggaggagcagctgcggcaggagcgggaggagcagcagctgcggccccagcagagagatggcaagtaccgctgggaggaggagcagctgcagctggaggagcaggagcagaggctgcggcaggagcgggaccggcagtacagagctgaggagcagtttgccacccaggagaagagccggcgggaggagcaggagctgtggcaggaggaggagcagaagaggcggcaggagcgggagaggaagctgcgggaggagcacatccggcggcagcagaaggaggagcagaggcaccggcaggtgggggagatcaagagccaggagggcaaaggacatggccgcctgctggagcccggcacccaccagtttgcctctgtgcctgtgcgcagcagccccctgtatgagtacatccaggagcagaggagccagtaccggccctag

SEQ ID NO: 174138 - DNA, 540 bp, synthetic construct
  misc_feature 1..540: note = Description of Artificial Sequence: Synthetic coding sequence
  source 1..540: mol_type = other DNA
atggccaagacagccatggcctacaaggagaagatgaaggagctgtccatgctgagcctcatctgcagctgcttctacccagagcccaggaacatcaacatctacacctatgatgacatggaggtgaagcagatcaacaagagggccagcggccaggcctttgagctgatcctgaagccacccagccccatcagcgaggcccccaggaccctggccagccccaagaagaaggacctgagcctggaggagatccagaagaagctggaggccgctgaggagaggaggaagagccaggaggcccaggtgctgaagcagctggccgagaagcgggagcacgagcgggaggtgctgcagaaggccctggaggagaacaacaacttcagcaagatggccgaggagaagctgatcctgaagatggagcagatcaaggagaaccgggaggccaacctggccgccatcatcgagcggctgcaggagaaggagagacatgctgctgaggtgagaagaaacaaggagctgcaggtggagctgagcggctag

SEQ ID NO: 174139 - DNA, 3885 bp, synthetic construct
  misc_feature 1..3885: note = Description of Artificial Sequence: Synthetic coding sequence
  source 1..3885: mol_type = other DNA
atgccctatgaggtgaatgccggctatgacttcaccaacatggtgaggaagaagaacccccccctgagaaatgtggccagcgagggggagggccagatcctggagcccatcggcacagagagcaaggtgtctgggaagaacaaggagttctctgctgaccagatgtctgaaaatacagaccagagtgatgctgctgagctgaaccacaaggaggagcacagcctgcacgtgcaggaccccagcagcagcagcaagaaggacctgaagtctgctgtgctgtctgagaaggccggcttcaactatgagagccccagcaagggcggcaacttccccagcttcccccatgatgaggtgacagacaggaacatgctggccttcagcagccctgctgctggaggagtgtgtgagcccctgaagagcccccagagagctgaggctgatgacccccaggacatggcctgcaccccatctggggacagcctggagaccaaggaggaccagaagatgagccccaaggccacagaggagaccggccaggcccagagcggccaggccaactgccagggcctgagccctgtgtctgtggccagcaagaacccccaggtgcccagtgatggaggagtgcggctgaacaagagcaagacagacctgctggtgaatgacaacccagaccctgcccccctgagccctgagctgcaggacttcaagtgcaacatctgtggctacggctactatggaaatgaccccacagacctgatcaagcacttcaggaagtaccacctgggcctgcacaacagaacccggcaggatgctgagctggacagcaagatcctggccctgcacaacatggtgcagttcagccacagcaaggacttccagaaggtgaacagaagtgtcttctctggagtgctgcaggacatcaacagcagcaggcctgtgctgctgaatggcacctatgatgtgcaggtgaccagcggcggcaccttcatcggcatcggcaggaagaccccagactgccagggcaacaccaagtacttccgctgcaagttctgcaacttcacctacatgggcaacagcagcacagagctggagcagcacttcctgcagacccaccccaacaagatcaaggccagcctgcccagcagcgaggtggccaagcccagcgagaagaacagcaacaagagcatcccagccctgcagagcagtgacagcggggacctgggcaagtggcaggacaagatcaccgtgaaggctggagatgacacccctgtgggctacagcgtgcccatcaagcccctggacagcagccggcagaatggaacagaggccaccagctactactggtgcaagttctgcagcttcagctgtgagagcagcagcagcctgaagctgctggagcactacggcaagcagcacggggctgtgcagagcggcggcctgaaccctgagctgaatgacaagctgagccggggcagcgtcatcaaccagaatgacctggccaagagcagcgagggggagaccatgaccaagacagacaagagcagcagcggggccaagaagaaggacttcagcagcaaaggagctgaggacaacatggtgaccagctacaactgccagttctgtgacttccgctacagcaagagccacggcccagatgtgattgtggtgggccccctgctgcggcactaccagcagctgcacaacatccacaagtgcaccatcaagcactgccccttctgcccccggggcctgtgcagccctgagaagcacctgggggagatcacctacccctttgcctgcaggaagagcaactgcagccactgtgccctgctgctgctgcacctgagccctggagctgctggcagcagccgggtgaagcaccagtgccaccagtgcagcttcaccaccccagatgtggatgtgctgctcttccactatgagagcgtgcatgagagccaggccagtgatgtgaagcaggaggccaaccacctgcagggcagtgatggccagcagagcgtgaaggagagcaaggagcacagctgcaccaagtgtgacttcatcacccaggtggaggaggagatcagccgccactacagaagagcccacagctgctacaagtgccggcagtgcagcttcaccgctgctgacacccagagcctgctggagcacttcaacacagtgcactgccaggagcaggacatcaccacagccaacggggaggaggatggccacgccatcagcaccatcaaggaggagcccaagattgacttccgggtgtacaacctgctgaccccagacagcaagatgggagagcctgtgtctgagagcgtggtgaagcgggagaagctggaggagaaggatggcctgaaggagaaggtgtggacagagagcagcagtgatgacctgagaaatgtgacctggagaggagctgacatcctgcggggcagccccagctacacccaggccagcctgggcctgctgacccctgtgtctggcacccaggagcagaccaagaccctgcgggacagccccaacgtggaggccgcccacctggcccggcccatctacggcctggccgtggagaccaagggcttcctgcagggcgccccagctggaggagagaagagcggggccctgccccagcagtacccagccagcggggagaacaagagcaaggatgagagccagagcctgctgcggcggcggcggggcagcggggtcttctgtgccaactgcctgaccaccaagaccagcctgtggaggaagaatgccaatggaggctacgtgtgcaatgcctgtggcctgtaccagaagctgcacagcaccccccggcccctgaacatcatcaagcagaacaatggagagcagatcatcagaagaaggaccaggaagaggctgaaccctgaggccctgcaggccgagcagctgaacaagcagcagaggggcagcaatgaggagcaggtgaatggcagccccctggagaggagaagtgaggaccacctgacagagagccaccagcgggagatccccctgcccagcctgagcaaatatgaggcccagggcagcctgaccaagagccacagcgcccagcagcctgtgctggtgtcccagaccctggacatccacaagaggatgcagcccctgcacatccagatcaagagcccccaggagagcactggagaccccggcaacagcagctctgtgtctgagggcaagggcagcagcgagcggggcagccccatcgagaagtacatgaggcctgccaagcaccccaactacagccccccaggcagccccatcgagaagtaccagtaccccctgtttggcctgccctttgtgcacaatgacttccagagcgaggccgactggctgcgcttctggagcaagtacaagctgtctgtgcccggcaacccccactacctgagccacgtgcccggcctgcccaacccctgccagaactacgtgccctaccccaccttcaacctgcccccccacttctctgctgtgggcagtgacaatgacatccccctggacctggccatcaagcacagccggcccggccccacagccaatggagccagcaaggagaagaccaaggcccccccaaatgtgaagaatgaaggccccctgaatgtggtgaagacagagaaggtggacaggagcacccaggatgagctgagcaccaagtgtgtgcactgcggcatcgtgttcctggatgaggtgatgtatgccctgcacatgagctgccacggggacagcggccccttccagtgcagcatctgccagcacctgtgcacagacaagtatgacttcaccacccacatccagaggggcctgcacagaaataatgcccaggtggagaagaatggcaagcccaaggagtag

SEQ ID NO: 174140 - DNA, 3858 bp, synthetic construct
  misc_feature 1..3858: note = Description of Artificial Sequence: Synthetic coding sequence
  source 1..3858: mol_type = other DNA
atgcagagcaacatggtgaggaagaagaacccccccctgagaaatgtggccagcgagggggagggccagatcctggagcccatcggcacagagagcaaggtgtctgggaagaacaaggagttctctgctgaccagatgtctgagaacacagaccagagtgatgctgctgagctgaaccacaaggaggagcacagcctgcacgtgcaggaccccagcagcagcagcaagaaggacctgaagtctgctgtgctgtctgagaaggccggcttcaactatgagagccccagcaaaggaggcaacttccccagcttcccccatgatgaggtgacagacaggaacatgctggccttcagcagccctgctgctgggggcgtgtgtgagcccctgaagagcccccagagagctgaggctgatgacccccaggacatggcctgcacccccagcggggacagcctggagaccaaggaggaccagaagatgagccccaaggccacagaggagaccggccaggcccagagcggccaggccaactgccagggcctgagccctgtgtctgtggccagcaagaacccccaggtgcccagtgatggcggcgtgcggctgaacaagagcaagacagacctgctggtgaatgacaacccagaccctgcccccctgagccctgagctgcaggacttcaagtgcaacatctgtggctacggctactatggaaatgaccccacagacctgatcaagcacttcaggaagtaccacctgggcctgcacaacagaacccggcaggatgctgagctggacagcaagatcctggccctgcacaacatggtgcagttcagccacagcaaggacttccagaaggtgaacagatctgtgttcagcggcgtgctgcaggacatcaacagcagcaggcctgtgctgctgaatggcacctatgatgtgcaggtgaccagcggcggcaccttcatcggcattggaaggaagaccccagactgccagggcaacaccaagtacttccgctgcaagttctgcaacttcacctacatgggcaacagcagcacagagctggagcagcacttcctgcagacccaccccaacaagatcaaggccagcctgcccagcagcgaggtggccaagcccagcgagaagaacagcaacaagagcatcccagccctgcagagcagtgacagcggggacctgggcaagtggcaggacaagatcaccgtgaaggctggagatgacacccctgtgggctacagcgtgcccatcaagcccctggacagcagccggcagaatggaacagaggccaccagctactactggtgcaagttctgcagcttcagctgtgagagcagcagcagcctgaagctgctggagcactacggcaagcagcacggggctgtgcagagcggcggcctgaaccctgagctgaatgacaagctgagccggggcagcgtcatcaaccagaatgacctggccaagagcagcgagggggagaccatgaccaagacagacaagagcagcagcggggccaagaagaaggacttcagcagcaaaggagctgaggacaacatggtgaccagctacaactgccagttctgtgacttccgctacagcaagagccacggcccagatgtgattgtggtgggccccctgctgcggcactaccagcagctgcacaacatccacaagtgcaccatcaagcactgccccttctgcccccggggcctgtgcagccctgagaagcacctgggggagatcacctacccctttgcctgcaggaagagcaactgcagccactgtgccctgctgctgctgcacctgagccctggagctgctggcagcagccgggtgaagcaccagtgccaccagtgcagcttcaccaccccagatgtggatgtgctgctcttccactatgaatctgtgcatgagagccaggccagtgatgtgaagcaggaggccaaccacctgcagggcagtgatggccagcagagcgtgaaggagagcaaggagcacagctgcaccaagtgtgacttcatcacccaggtggaggaggagatcagccgccactaccgccgggcccacagctgctacaagtgccggcagtgcagcttcaccgctgctgacacccagagcctgctggagcacttcaacacagtgcactgccaggagcaggacatcaccacagccaatggagaggaggatggccacgccatcagcaccatcaaggaggagcccaagattgacttccgggtgtacaacctgctgaccccagacagcaagatgggagagcctgtgtctgagagcgtggtgaagcgggagaagctggaggagaaggatggcctgaaggagaaggtgtggacagagagcagcagtgatgacctgagaaatgtgacctggagaggagctgacatcctgcggggcagccccagctacacccaggccagcctgggcctgctgacccctgtgtctggcacccaggagcagaccaagaccctgcgggacagccccaacgtggaggccgcccacctggcccggcccatctacggcctggccgtggagaccaagggcttcctgcagggcgccccagctggaggagagaagagcggggccctgccccagcagtacccagccagcggggagaacaagagcaaggatgagagccagagcctgctgcggaggagaagaggcagcggggtcttctgtgccaactgcctgaccaccaagaccagcctgtggaggaagaatgccaacggcggctacgtgtgcaatgcctgtggcctgtaccagaagctgcacagcaccccccggcccctgaacatcatcaagcagaacaacggggagcagatcatcagaagaaggaccaggaagaggctgaaccctgaggccctgcaggccgagcagctgaacaagcagcagaggggcagcaatgaggagcaggtgaatggcagccccctggagcggcgctctgaggaccacctgacagagagccaccagcgggagatccccctgcccagcctgagcaaatatgaggcccagggcagcctgaccaagagccacagcgcccagcagcctgtgctggtgtcccagaccctggacatccacaagaggatgcagcccctgcacatccagatcaagagcccccaggagagcactggagaccccggcaacagcagctctgtgtctgagggcaagggcagcagcgagcggggcagccccatcgagaagtacatgaggcctgccaagcaccccaactacagccccccaggcagccccatcgagaagtaccagtaccccctgtttggcctgccctttgtgcacaatgacttccagagcgaggccgactggctgcgcttctggagcaagtacaagctgtctgtgcccggcaacccccactacctgagccacgtgcccggcctgcccaacccctgccagaactacgtgccctaccccaccttcaacctgcccccccacttctctgctgtgggcagtgacaatgacatccccctggacctggccatcaagcacagcaggcctggccccacagccaacggggccagcaaggagaagaccaaggccccacccaacgtgaagaatgaaggccccctgaatgtggtgaagacagagaaggtggacaggagcacccaggatgagctgagcaccaagtgtgtgcactgcggcatcgtgttcctggatgaggtgatgtatgccctgcacatgagctgccacggggacagcggccccttccagtgcagcatctgccagcacctgtgcacagacaagtatgacttcaccacccacatccagaggggcctgcacaggaacaatgcccaggtggagaagaatggcaagcccaaggagtag

SEQ ID NO: 174141 - DNA, 705 bp, synthetic construct
  misc_feature 1..705: note = Description of Artificial Sequence: Synthetic coding sequence
  source 1..705: mol_type = other DNA
atgaggaagacccggctgtggggcctgctgtggatgctgtttgtgtctgagctgcgggccgccaccaagctgacagaggagaagtatgagctgaaggagggccagaccctggatgtgaagtgtgactacaccctggagaagtttgccagcagccagaaggcctggcagatcatcagagatggagagatgcccaagaccctggcctgcacagagcggcccagcaagaacagccaccctgtgcaggtgggccgcatcatcctggaggactaccatgaccacggcctgctgcgggtgaggatggtgaacctgcaggtggaggacagcggcctgtaccagtgtgtgatctaccagccccccaaggagccccacatgctgtttgaccgcatccggctggtggtgaccaagggcttcagcggcaccccaggcagcaatgaaaacagcacccagaatgtgtacaagatcccccccaccaccaccaaggccctgtgccccctgtacaccagccccaggacagtgacccaggccccacccaagagcacagcagatgtgtccaccccagacagcgagatcaacctgaccaacgtgacagacatcatccgggtgcctgtgttcaacatcgtcatcctgctggccggcggcttcctgagcaagagcctggtgttttctgtgctgtttgctgtgaccctgcggagctttgtgccctag

SEQ ID NO: 174142 - DNA, 453 bp, synthetic construct
  misc_feature 1..453: note = Description of Artificial Sequence: Synthetic coding sequence
  source 1..453: mol_type = other DNA
atgaggaagacccggctgtggggcctgctgtggatgctgtttgtgtctgagctgcgggccgccaccaagctgacagaggagaagtatgagctgaaggagggccagaccctggatgtgaagtgtgactacaccctggagaagtttgccagcagccagaaggcctggcagatcatcagagatggagagatgcccaagaccctggcctgcacagagcggcccagcaagaacagccaccctgtgcaggtgggccgcatcatcctggaggactaccatgaccacggcctgctgcgggtgaggatggtgaacctgcaggtggaggacagcggcctgtaccagtgtgtgatctaccagccccccaaggagccccacatgctgtttgaccgcatccggctggtggtgaccaagggcttccgctgcagcaccctgtccttctcctggctggtggacagctag

SEQ ID NO: 174143 - DNA, 678 bp, synthetic construct
  misc_feature 1..678: note = Description of Artificial Sequence: Synthetic coding sequence
  source 1..678: mol_type = other DNA
atgaggaagacccggctgtggggcctgctgtggatgctgtttgtgtctgagctgcgggccgccaccaagctgacagaggagaagtatgagctgaaggagggccagaccctggatgtgaagtgtgactacaccctggagaagtttgccagcagccagaaggcctggcagatcatcagagatggagagatgcccaagaccctggcctgcacagagcggcccagcaagaacagccaccctgtgcaggtgggccgcatcatcctggaggactaccatgaccacggcctgctgcgggtgaggatggtgaacctgcaggtggaggacagcggcctgtaccagtgtgtgatctaccagccccccaaggagccccacatgctgtttgaccgcatccggctggtggtgaccaagggcttcagcggcaccccaggcagcaatgaaaacagcacccagaatgtgtacaagatcccccccaccaccaccaaggccctgtgccccctgtacaccagccccaggacagtgacccaggccccacccaagagcacagcagatgtgtccaccccagacagcgagatcaacctgaccaacgtgacagacatcatccgctacagcttccaggtgcccggccccctggtgtggaccctgagccccctcttccccagcctgtgtgccgagaggatgtag

SEQ ID NO: 174144 - DNA, 501 bp, synthetic construct
  misc_feature 1..501: note = Description of Artificial Sequence: Synthetic coding sequence
  source 1..501: mol_type = other DNA
atggagcccctgcggctgctgatcctgctgtttgtgacagagctgagcggggcccacaacaccaccgtcttccagggcgtggccggccagagcctgcaggtgtcctgcccctatgacagcatgaagcactggggccgcaggaaggcctggtgccggcagctgggggagaagggcccctgccagagggtggtgtccacccacaacctgtggctgctgtccttcctgcggcgctggaatggcagcacagccatcacagatgacaccctgggcggcaccctgaccatcaccctgaggaacctgcagccccatgatgctggcctgtaccagtgccagagcctgcacggcagcgaggccgacaccctgaggaaggtgctggtggaggtgctggccgaccccctggaccacagagatgctggggacctgtggttccctggagagagcgagagctttgaagatgcccacgtggagcacagcatcagcagagctgagagacatgtgtag

SEQ ID NO: 174145 - DNA, 693 bp, synthetic construct
  misc_feature 1..693: note = Description of Artificial Sequence: Synthetic coding sequence
  source 1..693: mol_type = other DNA
atggagcccctgcggctgctgatcctgctgtttgtgacagagctgagcggggcccacaacaccaccgtcttccagggcgtggccggccagagcctgcaggtgtcctgcccctatgacagcatgaagcactggggccgcaggaaggcctggtgccggcagctgggggagaagggcccctgccagagggtggtgtccacccacaacctgtggctgctgtccttcctgcggcgctggaatggcagcacagccatcacagatgacaccctgggcggcaccctgaccatcaccctgaggaacctgcagccccatgatgctggcctgtaccagtgccagagcctgcacggcagcgaggccgacaccctgaggaaggtgctggtggaggtgctggccgaccccctggaccacagagatgctggggacctgtggttccctggagagagcgagagctttgaagatgcccacgtggagcacagcatcagccgcagcctgctggagggggagatccccttcccccccaccagcatcctgctgctgctggcctgcatcttcctgatcaagatcctggccgccagcgccctgtgggccgccgcctggcacggccagaagccaggcacccaccccccatctgagctggactgtggccatgaccccggctaccagctgcagaccctgcccggcctgcgggacacctag

SEQ ID NO: 174146 - DNA, 660 bp, synthetic construct
  misc_feature 1..660: note = Description of Artificial Sequence: Synthetic coding sequence
  source 1..660: mol_type = other DNA
atggagcccctgcggctgctgatcctgctgtttgtgacagagctgagcggggcccacaacaccaccgtcttccagggcgtggccggccagagcctgcaggtgtcctgcccctatgacagcatgaagcactggggccgcaggaaggcctggtgccggcagctgggggagaagggcccctgccagagggtggtgtccacccacaacctgtggctgctgtccttcctgcggcgctggaatggcagcacagccatcacagatgacaccctgggcggcaccctgaccatcaccctgaggaacctgcagccccatgatgctggcctgtaccagtgccagagcctgcacggcagcgaggccgacaccctgaggaaggtgctggtggaggtgctggccgaccccctggaccacagagatgctggggacctgtggttccctggagagagcgagagctttgaagatgcccacgtggagcacagcatcagcagagctgagagacatgtgaaggaggatgatggcaggaagagccctggagaggtgcccccaggcaccagccctgcctgcatcctggccacctggcccccaggcctgctggtgctgctgtggcaggagaccaccctgcctgagcactgcttctcctggaccctggaggccggcaccggctag

SEQ ID NO: 174147 - DNA, 936 bp, synthetic construct
  misc_feature 1..936: note = Description of Artificial Sequence: Synthetic coding sequence
  source 1..936: mol_type = other DNA
atgggcctgaccctgctgctgctgctgctgctgggcctggagggccagggcatcgtgggcagcctgcctgaggtgctgcaggcccctgtgggcagcagcatcctggtgcagtgccactaccgcctgcaggatgtgaaggcccagaaggtgtggtgccgcttcctgcctgagggctgccagcccctggtgtcctctgctgtggacagaagagccccagctggaagaaggaccttcctgacagacctgggcggcggcctgctgcaggtggagatggtgaccctgcaggaggaggatgctggggagtatggctgcatggtggatggagcccggggcccccagatcctgcaccgggtgtccctgaacatcctgcccccagaggaggaggaggagacccacaagattggcagcctggctgaaaatgccttcagtgaccctgctggcagcgccaaccccctggagcccagccaggatgagaagagcatccccctcatctggggcgctgtgctgctggtgggcctgctggtggccgctgtggtgctgtttgctgtgatggccaagaggaagcagggcaaccggctgggcgtgtgtggccgcttcctgagcagccgggtgtctggcatgaaccccagctctgtggtgcaccacgtgtctgattctggccctgctgctgagctgcccctggatgtgccccacatccggctggacagccccccatcctttgacaacaccacctacaccagcctgcccctggacagccccagcggcaagcccagcctgcctgcccccagcagcctgccccccctgccccccaaggtgctggtgtgcagcaagcctgtgacctacgccaccgtcatcttccctgggggcaacaagggcggcggcaccagctgtggccctgcccagaacccccccaacaaccagacccccagcagctag

SEQ ID NO: 174148 - DNA, 600 bp, synthetic construct
  misc_feature 1..600: note = Description of Artificial Sequence: Synthetic coding sequence
  source 1..600: mol_type = other DNA
atgggcctgaccctgctgctgctgctgctgctgggcctggagggccagggcatcgtgggcagcctgcctgaggtgctgcaggcccctgtgggcagcagcatcctggtgcagtgccactaccgcctgcaggatgtgaaggcccagaaggtgtggtgccgcttcctgcctgagggctgccagcccctggtgtcctctgctgtggacagaagagccccagctggaagaaggaccttcctgacagacctgggcggcggcctgctgcaggtggagatggtgaccctgcaggaggaggatgctggggagtatggctgcatggtggatggagcccggggcccccagatcctgcaccgggtgtccctgaacatcctgcccccagaggaggaggaggagacccacaagattggcagcctggctgaaaatgccttcagtgaccctgctggcagcgccaaccccctggagcccagccaggatgagaagagcatccccctcatctggggcgctgtgctgctggtgggcctgctggtggccgctgtggtgctgtttgctgtgatggccaagaggaagcaggagagcctgctgagcggccccccccggcagtag

SEQ ID NO: 174149 - DNA, 603 bp, synthetic construct
  misc_feature 1..603: note = Description of Artificial Sequence: Synthetic coding sequence
  source 1..603: mol_type = other DNA
atgggcctgaccctgctgctgctgctgctgctgggcctggaggaggaggaggaggagacccacaagattggcagcctggccgagaatgccttcagtgaccctgctggcagcgccaaccccctggagcccagccaggatgagaagagcatccccctcatctggggcgctgtgctgctggtgggcctgctggtggccgctgtggtgctgtttgctgtgatggccaagaggaagcagggcaaccggctgggcgtgtgtggccgcttcctgagcagccgggtgtctggcatgaaccccagctctgtggtgcaccacgtgtctgacagcggccctgctgctgagctgcccctggatgtgccccacatccggctggacagcccccccagctttgacaacaccacctacaccagcctgcccctggacagccccagcggcaagcccagcctgcctgcccccagcagcctgccccccctgccccccaaggtgctggtgtgcagcaagcctgtgacctacgccaccgtcatcttccctgggggcaacaagggcggcggcaccagctgtggccctgcccagaacccccccaacaaccagacccccagcagctag

SEQ ID NO: 174150 - DNA, 966 bp, synthetic construct
  misc_feature 1..966: note = Description of Artificial Sequence: Synthetic coding sequence
  source 1..966: mol_type = other DNA
atggccccagccttcctgctgctgctgctgctgtggccccagggctgtgtgtctggccccagcgctgacagcgtgtacaccaaggtgcggctgctggagggggagaccctgtctgtgcagtgcagctacaagggctacaagaacagagtggagggcaaggtgtggtgcaagatcaggaagaagaagtgtgagcccggctttgcccgggtgtgggtgaagggcccccgctacctgctgcaggatgatgcccaggccaaggtggtgaacatcaccatggtggccctgaagctgcaggacagcggccgctactggtgcatgaggaacaccagcggcatcctgtaccccctgatgggcttccagctggatgtgtccccagccccccagacagaaagaaacatccccttcacccacctggacaacatcctgaagagcggcaccgtgaccaccggccaggcccccaccagcggcccagatgcccccttcaccactggagtgatggtgttcaccccaggcctcatcaccctgccccggctgctggccagcaccaggcctgccagcaagacaggctacagcttcaccgccaccagcaccaccagccagggccccaggaggaccatgggcagccagacagtgacagccagccccagcaatgcccgggacagcagcgctggccctgagagcatcagcaccaagagcggggacctgagcaccaggagccccaccaccggcctgtgcctgaccagccgcagcctgctgaaccggctgcccagcatgcccagcatccgccaccaggatgtgtacagcacagtgctgggcgtggtgctgaccctgctggtgctgatgctgatcatggtgtatggcttctggaagaagaggcacatggccagctacagcatgtgcagcgaccccagcacccgggaccccccaggccggcctgagccctacgtggaggtgtacctgatctag

SEQ ID NO: 174151 - DNA, 2562 bp, synthetic construct
  misc_feature 1..2562: note = Description of Artificial Sequence: Synthetic coding sequence
  source 1..2562: mol_type = other DNA
atgtgctgtgagaagtggagccgggtggccgagatgttcctgttcatcgaggagcgggaggactgcaagatcctgtgcctgtgcagccgggcctttgtggaggacaggaagctgtacaacctgggcctgaagggctactacatccgggacagcggcaacaacagcggggaccaggccacagaggaggaggagggcggctacagctgtggcacagctgagagccatgacagcaagggcatcggcctggatgaaagtgagctggacagcgaggccgagctgatgaggtccatgggcctgcccctgcagtttggccgcatcacagcccacaaggactttgaggtgtccatgaacaccaggaacaaggtgaagatcaagaagaagaagcaccagaagaagtacctggatgaaattgtgcaggagagctggaggaaggagtatgaggaggatgacatcctggccagtgatgaccccagcagcattgagcagtatgagaacaccaggacctatgagctgcagagcaagaaggacacagaaacagagaacccccctgtggagaacaccctgagccccaagctggagatcacagagaagtgggagaagtactggaatgaatatggaggcggcctgctgtggcagagctggcaggagaagcaccctggccaggccctgagcagcgagccctggaacttcccagacaccaaggaggagtgggagcagcactacagccagctgtactggtactacctggagcagttccagtactgggaggcccagggctggacctttgatgccagccagagctgtgacacagacacctacaccagcaagacagaagcagatgacaagaatgatgagaagtgcatgaaggtggacctggtgtccttccccagcagccccatcatggtggacaatgacagcagcggcaccagtgacaaggaccacagcgagatcctggatggcatcagcaacatcaagctgaacagcgaggaggtgacccagagccagctggacagctgcaccagccatgatggccaccagcagctgtctgaggtgagcagcaagcgggagtgcccagccagcggccagagcgagcccagaaatggaggcaccaatgaggagagcaacagcagcggcaacaccaacacagaccccccagctgaggacagccagaagagcagcggggccaacaccagcaaggaccggccccacgccagcggcacagatggagatgagagcgaggaggaccccccagagcacaagcccagcaagctgaagaggagccatgagctggacattgatgagaacccagccagtgactttgatgattctggcagcctgctgggcttcaagtatggcagcggccagaagtatggaggcatccccaacttcagccaccggcaggtgcgctacctggagaagaatgtgaagctgaagagcaagtacctggacatgaggcggcagatcaagatgaagaacaagcacatcttcttcaccaaggagagcgagaagcccttcttcaagaagagcaagatcctgagcaaggtggagaagttcctgacctgggtgaacaagcccatggatgaggaggccagccaggagagcagcagccatgacaacgtgcatgatgccagcaccagcagtgacagcgaggagcaggacatgtctgtgaagaagggagatgacctgctggagaccaacaaccctgagcctgagaagtgccagagcgtgagcagcgctggggagctggagacagaaaattatgagcgggacagcctgctggccaccgtgcctgatgagcaggactgtgtgacccaggaggtgcctgacagccggcaggccgagacagaagctgaggtgaagaagaagaagaacaagaagaagaacaagaaggtgaatggcctgcccccagaaattgctgctgtgcctgagctggccaagtactgggcccagcgctaccgcctcttcagcagatttgatgatggcatcaagctggaccgggagggctggttctctgtgaccccagagaagattgctgagcacatcgccggccgggtgtcccagagcttcaagtgtgatgtggtggtggatgccttctgtggggtgggcggcaacaccatccagtttgccctgaccggcatgagggtcatcgccatcgacatcgaccctgtgaagatcgccctggccagaaataatgctgaggtgtatggaattgctgacaagattgagttcatctgtggggacttcctgctgctggccagcttcctgaaggcagatgtggtgttcctgagccccccctggggcggccctgactatgccacagctgagacctttgacatccgcaccatgatgagcccagatggctttgagatcttccggctgagcaagaagatcaccaacaacatcgtgtacttcctgcccagaaatgctgacatcgaccaggtggccagcctggccggccctgggggccaggtggagattgagcagaacttcctgaacaacaagctgaagaccatcacagcctactttggagacctgatcagaagacctgccagcgagacctag

SEQ ID NO: 174152 - DNA, 1266 bp, synthetic construct
  misc_feature 1..1266: note = Description of Artificial Sequence: Synthetic coding sequence
  source 1..1266: mol_type = other DNA
atgtggtaccaccggctgagccacctgcacagccggctgcaggacctgctgaagggcggcgtcatctacccagccctgccccagcccaacttcaagagcctgctgcccctggccgtgcactggcaccacacagccagcaagagcctgacctgtgcctggcagcagcacgaggaccactttgagctgaagtatgccaacacagtgatgagatttgattatgtgtggctgcgggaccactgccgcagcgccagctgctacaacagcaagacccaccagaggagcctggacacagcctctgtggacctgtgcatcaagcccaagaccatccggctggatgagaccaccctcttcttcacctggccagatggccacgtgaccaagtatgacctgaactggctggtgaagaacagctatgagggccagaagcagaaggtgatccagccccgcatcctgtggaatgctgagatctaccagcaggcccaggtgcccagcgtggactgccagagcttcctggagaccaatgaaggcctgaagaagttcctgcagaacttcctgctgtatggaattgcctttgtggagaatgtgccccccacccaggagcacacagagaagctggccgagcgcatcagcctcatccgggagaccatctacggccgcatgtggtacttcaccagtgacttcagcagaggagacacagcctacaccaagctggccctggacagacacacagacaccacctacttccaggagccctgtggcatccaggtgttccactgcctgaagcatgagggcactggaggccgcaccctgctggtggatggcttctatgctgctgagcaggtgctgcagaaggcccctgaggagtttgagctgctgagcaaggtgcccctgaagcatgagtacattgaagatgtgggggagtgccacaaccacatgattggaattggccctgtgctgaacatctacccctggaacaaggagctgtacctgatccgctacaacaactatgacagagctgtgatcaacacagtgccctatgatgtggtgcaccgctggtacacagcccacaggaccctgaccatcgagctgcggcggccagaaaatgagttctgggtgaagctgaagccaggccgggtgctcttcatcgacaactggagggtgctgcacggccgggagtgcttcaccggctaccggcagctgtgtggctgctacctgaccagagatgatgtgctgaacacagcccggctgctgggcctgcaggcctag

SEQ ID NO: 174153 - DNA, 1131 bp, synthetic construct
  misc_feature 1..1131: note = Description of Artificial Sequence: Synthetic coding sequence
  source 1..1131: mol_type = other DNA
atgtggtaccaccggctgagccacctgcacagccggctgcaggacctgctgaagggcggcgtcatctacccagccctgccccagcccaacttcaagagcctgctgcccctggccgtgcactggcaccacacagccagcaagagcctgacctgtgcctggcagcagcacgaggaccactttgagctgaagtatgccaacacagtgatgagatttgattatgtgtggctgcgggaccactgccgcagcgccagctgctacaacagcaagacccaccagaggagcctggacacagcctctgtggacctgtgcatcaagcccaagaccatccggctggatgagaccaccctcttcttcacctggccagatggccacgtgaccaagtatgacctgaactggctggtgaagaacagctatgagggccagaagcagaaggtgatccagccccgcatcctgtggaatgctgagatctaccagcaggcccaggtgcccagcgtggactgccagagcttcctggagaccaatgaaggcctgaagaagttcctgcagaacttcctgctgtatggaattgcctttgtggagaatgtgccccccacccaggagcacacagagaagctggccgagcgcatcagcctcatccgggagaccatctacggccgcatgtggtacttcaccagtgacttcagcagaggagacacagcctacaccaagctggccctggacagacacacagacaccacctacttccaggagccctgtggcatccaggtgttccactgcctgaagcatgagggcactggaggccgcaccctgctggtggatggcttctatgctgctgagcaggtgctgcagaaggcccctgaggagtttgagctgctgagcaaggtgcccctgaagcatgagtacattgaagatgtgggggagtgccacaaccacatgattggaattggccctgtgctgaacatctacccctggaacaaggagctgtacctgatccgcctcttcaaggagaagcagaacacagtgaaccggcagtggaacagcagcctgcagtgtgacatccctgagcgcatcctgacctaccgccactttgtgtctggcaccagcattgagcaccggggcagcctcatctag

SEQ ID NO: 174154 - DNA, 5889 bp, synthetic construct
  misc_feature 1..5889: note = Description of Artificial Sequence: Synthetic coding sequence
  source 1..5889: mol_type = other DNA
atgagggagctggaggccaaggccaccaaggatgtggagaggaacctgagccgggacctggtgcaggaggaggagcagctgatggaggagaagaagaagaagaaggatgacaagaagaagaaggaggccgcccagaagaaggccacagagcagaagatcaaggtgcctgagcagatcaagcccagcgtgtcccagccccagcctgccaacagcaacaacggcaccagcacagccaccagcaccaacaacaatgccaagagggccacagccaacaaccagcagccccagcagcagcagcagcagcagcagccccagcagcagcagccccagcagcagccccagccccagccccagcagcagcagccccagcagcagccccaggccctgccccgctacccccgggaggtgcccccacgcttccgccaccaggagcacaagcagctgctgaagaggggccagcacttccctgtgattgctgccaacctgggcagcgctgtgaaggtgctgaacagccagagcgagagcagcgccctgaccaaccagcagccccagaacaacggggaggtgcagaacagcaagaaccagagcgacatcaaccacagcaccagcggcagccactatgagaacagccagaggggccctgtgagcagcaccagtgacagcagcaccaactgcaagaatgctgtggtgtctgacctgtctgagaaggaggcctggcccagcgcccctggcagtgaccctgagctggccagcgagtgcatggatgctgacagcgccagcagcagcgagagcgagaggaacatcaccatcatggccagcggcaacacaggaggagagaaggatggcctgaggaacagcacaggcctgggcagccagaacaagtttgtggtgggcagcagcagcaacaacgtgggccacggcagcagcacaggcccctggggcttcagccatggagccatcatcagcacctgccaggtgtctgtggatgcccctgagagcaagtctgagagcagcaacaacaggatgaatgcctggggcaccgtgagcagcagcagcaatggaggcctgaaccccagcaccctgaacagcgccagcaaccacggggcctggcctgtgctggagaacaacggcctggccctgaagggccctgtgggcagcggcagcagcggcatcaacatccagtgcagcaccatcggccagatgcccaacaaccagagcatcaacagcaaggtgtctgggggcagcacccacggcacctggggcagcctgcaggagacctgtgagagcgaggtgtctggcacccagaaggtgtccttcagcggccagccccagaacatcaccacagagatgacaggccccaacaacaccaccaacttcatgaccagcagcctgcccaacagcggctctgtgcagaacaatgagctgcccagcagcaacacaggagcctggagggtgtccaccatgaaccacccccagatgcaggcccccagcggcatgaatggcaccagcctgagccacctgagcaatggagagagcaagagcggcggcagctatggcaccacctggggcgcctacggcagcaactacagcggggacaagtgcagcggccccaacggccaggccaacggggacacagtgaatgccaccctgatgcagcccggggtgaatggccccatgggcaccaacttccaggtgaacaccaacaagggcggcggcgtgtgggagagcggggccgccaacagccagagcacctcctggggcagcggaaatggagccaacagcggcggcagccggcggggctggggcaccccagcccagaacacaggcaccaacctgcccagcgtggagtggaacaagctgcccagcaaccagcacagcaatgattctgccaatggaaatggcaagaccttcaccaacggctggaagagcacagaggaggaggaccagggcagcgccaccagccagaccaatgagcagagctctgtgtgggccaagacaggaggcaccgtggagagtgatggcagcacagagagcacaggccgcctggaggagaagggcactggagagagccagagccgggacaggaggaagattgaccagcacaccctgctgcagagcatcgtgaacagaacagacctggacccccgggtgctgagcaacagcggctggggccagacccccatcaagcagaacacagcctgggacacagagaccagccccagaggagagaggaagacagacaatggaacagaggcctggggcagcagcgccacccagaccttcaacagcggggcctgcatcgacaagaccagccccaatggaaatgacaccagctctgtgtctggctggggagaccccaagccagccctgcgctggggagacagcaagggcagcaactgccagggcggctgggaggatgacagcgctgccaccggcatggtgaagagcaaccagtggggcaactgcaaggaggagaaggccgcctggaatgacagccagaagaacaagcagggctggggagatggccagaagagcagccagggctggagcgtgtctgccagtgacaactggggcgagaccagcaggaacaaccactggggcgaggccaacaagaagagcagcagcggcggcagtgacagcgacagatctgtgtctggctggaatgagctgggcaagaccagcagcttcacctggggcaacaacatcaaccccaacaacagcagcggctgggatgagagcagcaagcccacccccagccagggctggggagacccccccaagagcaaccagagcctgggctggggagacagcagcaagcctgtgagcagcccagactggaacaagcagcaggacatcgtgggctcctggggcatccccccagccaccgggaagcccccaggcaccggctggctgggcggccccatcccagccccagccaaggaggaggagcccaccggctgggaggagcccagccctgagagcatccggaggaagatggagattgatgatggcaccagcgcctggggagaccccagcaagtacaactacaagaatgtgaacatgtggaacaagaatgtgcccaacggcaacagcagaagtgaccagcaggcccaggtgcaccagctgctgaccccagccagcgccatcagcaacaaggaggccagcagcggcagcggctggggcgagccctggggcgagcccagcaccccagccaccaccgtggacaatggcaccagcgcctggggcaagcccattgattctggccccagctggggcgagcccatcgctgctgccagcagcaccagcacctggggcagcagctctgtgggcccccaggccctgagcaagagcggccccaagtccatgcaggacggctggtgtggagatgacatgcccctgcccggcaaccggcccaccggctgggaggaggaggaggatgtggagatcggcatgtggaacagcaacagcagccaggagctgaacagcagcctgaactggccaccctacaccaagaagatgagcagcaagggcctgagcggcaagaagagaagaagagagcggggcatgatgaagggcggcaacaagcaggaggaggcctggatcaacccctttgtgaagcagttcagcaacatctccttcagccgggacagccctgaggagaatgtgcagagcaacaagatggacctgagcggcggcatgctgcaggacaagaggatggagattgacaagcacagcctgaacatcggggactacaacagaacagtgggcaaaggacctggcagccggccccagatcagcaaggagagctccatggagaggaacccctactttgacaaggatggcatcgtggctgatgagagccagaacatgcagttcatgagcagccagagcatgaagctgccccccagcaacagcgccctgcccaaccaggccctgggcagcattgctggcctgggcatgcagaacctgaacagcgtgcggcagaatggaaaccccagcatgtttggagtgggcaacacagctgcccagccccggggcatgcagcagcccccagcccagcccctgagcagcagccagcccaacctgcgggcccaggtgcccccacccctgctgagcccccaggtgcctgtgtccctgctgaagtatgcccccaacaacggcggcctgaaccccctgtttggcccccagcaggtggccatgctgaaccagctgagccagctgaaccagctgagccagatcagccagctgcagaggctgctggcccagcagcagagggcccagagccagaggtctgtgcccagcggcaaccggccccagcaggaccagcagggccggcccctgtctgtgcagcagcagatgatgcagcagagccggcagctggaccccaacctgctggtgaagcagcagaccccacccagccagcagcagcccctgcaccagcctgccatgaagagcttcctggacaacgtgatgccccacaccaccccagagctgcagaagggccccagccccatcaatgccttcagcaacttccccatcggcctgaacagcaacctgaatgtgaacatggacatgaacagcatcaaggagccccagagccggctgaggaagtggaccaccgtggacagcatctctgtgaacaccagcctggaccagaacagcagcaagcatggagccatcagcagcggcttccggctggaggagagcccctttgtgccctatgacttcatgaacagcagcaccagccctgccagccccccaggcagcattggagatggctggccccgggccaagagccccaacggcagcagctctgtgaactggcccccagagttccggcctggagagccctggaagggctaccccaacatcgaccctgagacagacccctacgtgaccccaggcagcgtcatcaacaacctgagcatcaacacagtgcgggaggtggaccacctgcgggacagaaattctggcagcagcagcagcctgaacaccaccctgcccagcaccagcgcctggagcagcatccgggccagcaactacaacgtgcccctgagcagcacagcccagagcaccagcgccaggaacagcgacagcaagctgacctggagccctggctctgtgaccaacaccagcctggcccacgagctgtggaaggtgcccctgccccccaagaacatcacagcccccagcaggcctcctcctggcctgaccggccagaagccacccctgagcacctgggacaacagccccctgcgcatcggcggcggctggggcaacagtgatgcccgctacaccccaggcagctcctggggcgagagcagcagcggccgcatcaccaactggctggtgctgaagaacctgaccccccagattgatggcagcaccctgcggaccctgtgcatgcagcacggccccctcatcaccttccacctgaacctgccccacggcaatgccctggtgcgctacagcagcaaggaggaggtggtgaaggcccagaagagcctgcacatgtgtgtgctgggcaacaccaccatcctggccgagtttgccagcgaggaggagatcagccgcttctttgcccagagccagagcctgacccccagccctggctggcagagcctgggcagcagccagagccggctgggcagcctggactgcagccacagcttcagcagcaggacagacctgaaccactggaatggagctggcctgagcggcaccaactgtggggacctgcacggcaccagcctgtggggcaccccccactacagcaccagcctgtggggcccccccagcagcagtgacccccggggcatcagcagccccagccccatcaatgccttcctgtctgtggaccacctgggcggcggcggggagagcatgtag

SEQ ID NO: 174155 - DNA, 1323 bp, synthetic construct
  misc_feature 1..1323: note = Description of Artificial Sequence: Synthetic coding sequence
  source 1..1323: mol_type = other DNA
atggacatgaacagcatcaaggagccccagagccggctgaggaagtggaccaccgtggacagcatctctgtgaacaccagcctggaccagaacagcagcaagcatggagccatcagcagcggcttccggctggaggagagcccctttgtgccctatgacttcatgaacagcagcaccagccctgccagccccccaggcagcattggagatggctggccccgggccaagagccccaacggcagcagctctgtgaactggcccccagagttccggcctggagagccctggaagggctaccccaacatcgaccctgagacagacccctacgtgaccccaggcagcgtcatcaacaacctgagcatcaacacagtgcgggaggtggaccacctgcgggacagaaattctggcagcagcagcagcctgaacaccaccctgcccagcaccagcgcctggagcagcatccgggccagcaactacaacgtgcccctgagcagcacagcccagagcaccagcgccaggaacagcgacagcaagctgacctggagccctggctctgtgaccaacaccagcctggcccacgagctgtggaaggtgcccctgccccccaagaacatcacagcccccagcaggcctcctcctggcctgaccggccagaagccacccctgagcacctgggacaacagccccctgcgcatcggcggcggctggggcaacagtgatgcccgctacaccccaggcagctcctggggcgagagcagcagcggccgcatcaccaactggctggtgctgaagaacctgaccccccagattgatggcagcaccctgcggaccctgtgcatgcagcacggccccctcatcaccttccacctgaacctgccccacggcaatgccctggtgcgctacagcagcaaggaggaggtggtgaaggcccagaagagcctgcacatgtgtgtgctgggcaacaccaccatcctggccgagtttgccagcgaggaggagatcagccgcttctttgcccagagccagagcctgacccccagccctggctggcagagcctgggcagcagccagagccggctgggcagcctggactgcagccacagcttcagcagcaggacagacctgaaccactggaatggagctggcctgagcggcaccaactgtggggacctgcacggcaccagcctgtggggcaccccccactacagcaccagcctgtggggcccccccagcagcagtgacccccggggcatcagcagccccagccccatcaatgccttcctgtctgtggaccacctgggcggcggcggggagagcatgtag

SEQ ID NO: 174156 - DNA, 5073 bp, synthetic construct
  misc_feature 1..5073: note = Description of Artificial Sequence: Synthetic coding sequence
  source 1..5073: mol_type = other DNA
atggccactggaagtgcccagggcaacttcaccggccacaccaagaagaccaacggcaacaacggcaccaacggggccctggtgcagagccccagcaaccagagcgccctgggcgccggcggggccaacagcaatggatctgctgcccgggtgtggggcgtggccaccggcagcagcagcggcctggcccactgcagcgtgtctggaggagatggcaagatggacaccatgattggagatggccgcagccagaactgctggggcgccagcaacagcaatgccggcatcaacctgaacctgaaccccaatgccaacccagctgcctggcctgtgctgggccacgagggcaccgtggccaccggcaaccccagcagcatctgcagccctgtgtctgccatcggccagaacatgggcaaccagaatggaaaccccaccggcaccctgggcgcctggggcaacctgctgccccaggagagcacagagccccagaccagcaccagccagaatgtgtccttcagcgcccagccccagaacctgaacacagatggccccaacaacaccaaccccatgaacagcagccccaaccccatcaatgccatgcagaccaacggcctgcccaactggggcatggctgtgggcatgggcgccatcatccccccccacctgcagggcctgcccggggccaacggcagctctgtgtcccaggtgtctgggggcagcgctgagggcatcagcaacagcgtgtggggcctgagccctggcaacccagccaccggcaacagcaacagcggcttcagccagggcaatggagacacagtgaacagcgccctgagcgccaagcagaatggcagcagcagcgctgtgcagaaggagggcagcggcggcaatgcctgggacagcggccccccagctggccctggcatcctggcctggggccggggcagcggcaacaacggggtgggcaacatccacagcggggcctggggccaccccagccgcagcaccagcaatggagtgaatggagagtggggcaagccacccaaccagcacagcaacagcgacatcaacgggaagggcagcacaggctgggagagccccagcgtgaccagccagaaccccaccgtgcagcctggaggagagcacatgaacagctgggccaaggccgccagcagcggcaccacagccagcgagggcagcagtgatggcagcggcaaccacaatgaaggcagcacaggccgggagggcaccggggagggcagaagaagagacaagggcatcatcgaccagggccacatccagctgcccagaaatgacctggacccccgggtgctgagcaacacaggctggggccagacccctgtgaagcagaacacagcctgggagtttgaggagagccccaggtctgagaggaagaatgacaatggaacagaggcctggggctgtgccgccacccaggccagcaacagcggcggcaagaatgatggcagcatcatgaacagcaccaacaccagctctgtgtctggctgggtgaatgcccctcctgctgctgtgcctgccaacacaggctggggagacagcaacaacaaggcccccagcggccctggggtgtggggagacagcatcagcagcacagctgtgtccacagctgctgctgccaagagcggccacgcctggagcggggccgccaaccaggaggacaagagccccacctggggcgagccccccaagcccaagagccagcactggggagatggccagaggagcaacccagcctggagcgctgggggcggggactgggccgacagcagctctgtgctgggccacctgggagatggcaagaagaatggaagtggctgggatgctgacagcaacagaagtggcagcggctggaatgacaccaccaggagcggcaacagcggctggggcaacagcaccaacaccaaggccaaccctggcaccaactggggcgagaccctgaagccaggcccccagcagaactgggccagcaagccccaggacaacaacgtgagcaactggggcggggccgcctctgtgaagcagacaggcaccggctggattggaggccctgtgcctgtgaagcagaaggacagcagcgaggccaccggctgggaggagcccagccccccatccatccggaggaagatggagattgatgatggcaccagcgcctggggagaccccagcaactacaacaacaagacagtgaacatgtgggacaggaacaaccctgtgatccagagcagcaccaccaccaacaccaccaccaccaccaccaccaccaccagcaacaccacccaccgggtggagaccccaccaccccaccaggccggcacccagctgaacagaagccccctgctgggccctggcaggaaggtgagcagcggctggggcgagatgcccaacgtgcacagcaagacagagaacagctggggcgagcccagcagccccagcaccctggtggacaatggaacagctgcctggggcaagccacccagcagcggcagcggctggggagaccaccctgctgagccccctgtggccttcggccgggccggggcccctgtggccgccagcgccctgtgcaagccagccagcaagtccatgcaggagggctggggcagcggaggagatgagatgaacctgagcaccagccagtgggaggatgaggagggagatgtgtggaacaatgctgccagccaggagagcaccagcagctgcagctcctggggcaatgcccccaagaagggcctgcagaagggcatgaagaccagcggcaagcaggatgaggcctggatcatgagccgcctcatcaagcagctgacagacatgggcttcccccgggagcctgctgaggaggccctgaagagcaacaacatgaacctggaccaggccatgtctgccctgctggagaagaaggtggatgtggacaagaggggcctgggcgtgacagaccacaacggcatggccgccaagcccctgggctgccggccccccatcagcaaggagagctctgtggaccggcccaccttcctggacaaggatggcggcctggtggaggagcccacccccagccccttcctgcccagccccagcctgaagctgcccctgagccacagcgccctgcccagccaggccctgggcggcatcgccagcggcctgggcatgcagaacctgaacagcagccggcagatccccagcggcaacctgggcatgtttggaaacagcggggccgcccaggcccggaccatgcagcagcccccccagccccctgtgcagcccctgaacagcagccagcccagcctgcgggcccaggtgccccagttcctgagcccccaggtgcaggcccagctgctgcagtttgctgccaagaacatcggcctgaacccagccctgctgaccagccccatcaacccccagcacatgaccatgctgaaccagctgtaccagctgcagctggcctaccagaggctgcagatccagcagcagatgctgcaggcccagagaaatgtgtctggctccatgaggcagcaggagcagcaggtggcccggaccatcaccaacctgcagcagcagatccagcagcaccagaggcagctggcccaggccctgctggtgaagcagcccccacctcctcctcctccaccccacctgagcctgcaccccagcgctgggaagagcgccatggacagcttccccagccacccccagaccccaggcctgcctgacctgcagaccaaggagcagcagagcagccccaacacctttgccccctaccccctggccggcctgaaccccaacatgaatgtgaacagcatggacatgactggaggcctgtctgtgaaggaccccagccagagccagagccggctgccccagtggacccaccccaacagcatggacaacctgcccagcgctgccagccccctggagcagaaccccagcaagcatggagccatccctgggggcctgagcatcggccccccaggcaagagcagcattgatgacagctatggccgctatgacctgatccagaacagcgagagccctgccagcccccctgtggccgtgccccacagctggagccgggccaagagtgacagcgacaagatcagcaatggcagcagcatcaactggcccccagagttccaccctggggtgccctggaagggcctgcagaacattgatcctgaaaatgaccctgatgtgaccccaggctctgtgcccaccggccccaccatcaacaccaccatccaggatgtgaaccgctacctgctgaagagcggcggcaagctgagtgacatcaagagcacctggagcagcggccccaccagccacacccaggccagcctgagccatgagctgtggaaggtgcccaggaacagcacagcccccacccggcccccacctggcctgaccaaccccaagcccagcagcacctggggcgccagccccctgggctggaccagcagctacagcagcggcagcgcctggagcacagacaccagcggccgcaccagctcctggctggtgctgaggaacctgaccccccagattgatggcagcaccctgcggaccctgtgcctgcagcacggccccctcatcaccttccacctgaacctgacccagggcaatgctgtggtgcgctacagcagcaaggaggaggccgccaaggcccagaagagcctgcacatgtgtgtgctgggcaacaccaccatcctggccgagtttgctggggaggaggaggtgaaccgcttcctggcccagggccaggccctgccccccaccagctcctggcagagcagcagcgccagcagccagccccggctgtctgctgctggcagcagccacggcctggtgcggagtgatgctggccactggaatgccccctgcctgggcggcaagggcagcagcgagctgctgtggggcggcgtgccccagtacagcagcagcctgtggggccccccatctgcagatgacagcagggtcatcggcagccccacccccctgaccaccctgctgcccggggacctgctgagcggggagagcctgtag

SEQ ID NO: 174157 - DNA, 5181 bp, synthetic construct
  misc_feature 1..5181: note = Description of Artificial Sequence: Synthetic coding sequence
  source 1..5181: mol_type = other DNA
atggccactggaagtgcccagggcaacttcaccggccacaccaagaagaccaacggcaacaacggcaccaacggggccctggtgcagagccccagcaaccagagcgccctgggcgccggcggggccaacagcaatggatctgctgcccgggtgtggggcgtggccaccggcagcagcagcggcctggcccactgcagcgtgtctggaggagatggcaagatggacaccatgattggagatggccgcagccagaactgctggggcgccagcaacagcaatgccggcatcaacctgaacctgaaccccaatgccaacccagctgcctggcctgtgctgggccacgagggcaccgtggccaccggcaaccccagcagcatctgcagccctgtgtctgccatcggccagaacatgggcaaccagaatggaaaccccaccggcaccctgggcgcctggggcaacctgctgccccaggagagcacagagccccagaccagcaccagccagaatgtgtccttcagcgcccagccccagaacctgaacacagatggccccaacaacaccaaccccatgaacagcagccccaaccccatcaatgccatgcagaccaacggcctgcccaactggggcatggctgtgggcatgggcgccatcatccccccccacctgcagggcctgcccggggccaacggcagctctgtgtcccaggtgtctgggggcagcgctgagggcatcagcaacagcgtgtggggcctgagccctggcaacccagccaccggcaacagcaacagcggcttcagccagggcaatggagacacagtgaacagcgccctgagcgccaagcagaatggcagcagcagcgctgtgcagaaggagggcagcggcggcaatgcctgggacagcggccccccagctggccctggcatcctggcctggggccggggcagcggcaacaacggggtgggcaacatccacagcggggcctggggccaccccagccgcagcaccagcaatggagtgaatggagagtggggcaagccacccaaccagcacagcaacagcgacatcaacgggaagggcagcacaggctgggagagccccagcgtgaccagccagaaccccaccgtgcagcctggaggagagcacatgaacagctgggccaaggccgccagcagcggcaccacagccagcgagggcagcagtgatggcagcggcaaccacaatgaaggcagcacaggccgggagggcaccggggagggcagaagaagagacaagggcatcatcgaccagggccacatccagctgcccagaaatgacctggacccccgggtgctgagcaacacaggctggggccagacccctgtgaagcagaacacagcctgggagtttgaggagagccccaggtctgagaggaagaatgacaatggaacagaggcctggggctgtgccgccacccaggccagcaacagcggcggcaagaatgatggcagcatcatgaacagcaccaacaccagctctgtgtctggctgggtgaatgcccctcctgctgctgtgcctgccaacacaggctggggagacagcaacaacaaggcccccagcggccctggggtgtggggagacagcatcagcagcacagctgtgtccacagctgctgctgccaagagcggccacgcctggagcggggccgccaaccaggaggacaagagccccacctggggcgagccccccaagcccaagagccagcactggggagatggccagaggagcaacccagcctggagcgctgggggcggggactgggccgacagcagctctgtgctgggccacctgggagatggcaagaagaatggaagtggctgggatgctgacagcaacagaagtggcagcggctggaatgacaccaccaggagcggcaacagcggctggggcaacagcaccaacaccaaggccaaccctggcaccaactggggcgagaccctgaagccaggcccccagcagaactgggccagcaagccccaggacaacaacgtgagcaactggggcggggccgcctctgtgaagcagacaggcaccggctggattggaggccctgtgcctgtgaagcagaaggacagcagcgaggccaccggctgggaggagcccagccccccatccatccggaggaagatggagattgatgatggcaccagcgcctggggagaccccagcaactacaacaacaagacagtgaacatgtgggacaggaacaaccctgtgatccagagcagcaccaccaccaacaccaccaccaccaccaccaccaccaccagcaacaccacccaccgggtggagaccccaccaccccaccaggccggcacccagctgaacagaagccccctgctgggccctgtgagcagcggctggggcgagatgcccaacgtgcacagcaagacagaaaattcctggggcgagcccagcagccccagcaccctggtggacaatggaacagctgcctggggcaagccacccagcagcggcagcggctggggagaccaccctgctgagccccctgtggccttcggccgggccggggcccctgtggccgccagcgccctgtgcaagccagccagcaagtccatgcaggagggctggggcagcggaggagatgagatgaacctgagcaccagccagtgggaggatgaggagggagatgtgtggaacaatgctgccagccaggagagcaccagcagctgcagctcctggggcaatgcccccaagaagggcctgcagaagggcatgaagaccagcggcaagcaggatgaggcctggatcatgagccgcctcatcaagcagctgacagacatgggcttcccccgggagcctgctgaggaggccctgaagagcaacaacatgaacctggaccaggccatgtctgccctgctggagaagaaggtggatgtggacaagaggggcctgggcgtgacagaccacaacggcatggccgccaagcccctgggctgcaggcctcccatcagcaaggagagctctgtggaccggcccaccttcctggacaaggatggcggcctggtggaggagcccacccccagccccttcctgcccagccccagcctgaagctgcccctgagccacagcgccctgcccagccaggccctgggcggcatcgccagcggcctgggcatgcagaacctgaacagcagccggcagatccccagcggcaacctgggcatgtttggaaattctggagctgcccaggcccggaccatgcagcagcccccccagccccctgtgcagcccctgaacagcagccagcccagcctgcgggcccaggtgccccagttcctgagcccccaggtgcaggcccagctgctgcagtttgctgccaagaacatcggcctgaacccagccctgctgaccagccccatcaacccccagcacatgaccatgctgaaccagctgtaccagctgcagctggcctaccagaggctgcagatccagcagcagatgctgcaggcccagagaaatgtgtctggctccatgaggcagcaggagcagcaggtggcccggaccatcaccaacctgcagcagcagatccagcagcaccagaggcagctggcccaggccctgctggtgaagcagcccccacctcctcctcctccaccccacctgagcctgcaccccagcgctgggaagagcgccatggacagcttccccagccacccccagaccccaggcctgcctgacctgcagaccaaggagcagcagagcagccccaacacctttgccccctaccccctggccggcctgaaccccaacatgaatgtgaacagcatggacatgactggaggcctgtctgtgaaggaccccagccagagccagagccggctgccccagtggacccaccccaacagcatggacaacctgcccagcgctgccagccccctggagcagaaccccagcaagcacggggccatccctgggggcctgagcatcggccccccaggcaagagcagcattgatgacagctatggccgctatgacctgatccagaacagcgagagccctgccagcccccctgtggccgtgccccacagctggagccgggccaagagtgacagcgacaagatcagcaatggcagcagcatcaactggcccccagagttccaccctggggtgccctggaagggcctgcagaacatcgaccctgaaaatgaccctgatgtgaccccaggctctgtgcccaccggccccaccatcaacaccaccatccaggatgtgaaccgctacctgctgaagagcggcggcagcagcccccccagcagccagaatgccaccctgcccagcagcagcgcctggcccctgagcgccagcggctacagcagcagcttcagcagcatcgccagcgcccccagcgtggccggcaagctgagtgacatcaagagcacctggagcagcggccccaccagccacacccaggccagcctgagccatgagctgtggaaggtgcccaggaacagcacagcccccacccggcccccacctggcctgaccaaccccaagcccagcagcacctggggcgccagccccctgggctggaccagcagctacagcagcggcagcgcctggagcacagacaccagcggccgcaccagctcctggctggtgctgaggaacctgaccccccagattgatggcagcaccctgcggaccctgtgcctgcagcacggccccctcatcaccttccacctgaacctgacccagggcaatgctgtggtgcgctacagcagcaaggaggaggccgccaaggcccagaagagcctgcacatgtgtgtgctgggcaacaccaccatcctggccgagtttgctggggaggaggaggtgaaccgcttcctggcccagggccaggccctgccccccaccagctcctggcagagcagcagcgccagcagccagccccggctgtctgctgctggcagcagccacggcctggtgcggagtgatgctggccactggaatgccccctgcctgggcggcaagggcagcagcgagctgctgtggggcggcgtgccccagtacagcagcagcctgtggggccccccatctgcagatgacagcagggtcatcggcagccccacccccctgaccaccctgctgcccggggacctgctgagcggggagagcctgtag

SEQ ID NO: 174158 - DNA, 5181 bp, synthetic construct; identical to SEQ ID NO: 174157
  misc_feature 1..5181: note = Description of Artificial Sequence: Synthetic coding sequence
  source 1..5181: mol_type = other DNA

SEQ ID NO: 174159 - DNA, 5073 bp, synthetic construct; identical to SEQ ID NO: 174156
  misc_feature 1..5073: note = Description of Artificial Sequence: Synthetic coding sequence
  source 1..5073: mol_type = other DNA

SEQ ID NO: 174160 - DNA, 5073 bp, synthetic construct; identical to SEQ ID NO: 174156
  misc_feature 1..5073: note = Description of Artificial Sequence: Synthetic coding sequence
  source 1..5073: mol_type = other DNA

SEQ ID NO: 174161 - DNA, 5181 bp, synthetic construct; identical to SEQ ID NO: 174157
  misc_feature 1..5181: note = Description of Artificial Sequence: Synthetic coding sequence
  source 1..5181: mol_type = other DNA

SEQ ID NO: 174162 - DNA, 1959 bp, synthetic construct
  misc_feature 1..1959: note = Description of Artificial Sequence: Synthetic coding sequence
  source 1..1959: mol_type = other DNA
atgggcggctggaagggccctggccagaggcggggcaaggagggccctgaggcccggcggcgggctgctgagcggggcggcggcggcggcggcggcggcgtgcctgcccccaggagccctgcccgggagccccggcccaggagctgcctgctgctgcccccaccctggggcgccgccatgaccccagacctgctgaacttcaagaagggctggatgagcatcctggatgagcccggggagccccccagccccagcctgaccaccaccagcaccagccagtggaagaagcactggtttgtgctgacagacagcagcctgaagtactacagagacagcacagctgaggaggctgatgagctggatggagaaattgacctgcggagctgcacagatgtgacagaatatgctgtgcagagaaattatggcttccagatccacaccaaggatgctgtgtacaccctgagcgccatgaccagcggcatcagaagaaactggattgaggccctgaggaagacagtgcggcccaccagcgccccagatgtgaccaagctgagtgacagcaacaaggaaaatgccctgcacagctacagcacccagaagggccccctgaaggccggggagcagagagctggcagcgaggtgatcagccggggcggccccaggaaggcagatggccagaggcaggccctggactatgtggagctgagccccctgacccaggccagcccccagagggcccggaccccagcccggaccccagaccggctggccaagcaggaggagctggagcgggacctggcccagaggtctgaggagaggaggaagtggtttgaggccacagacagcaggaccccagaggtgcctgctggggagggcccccggcggggcctgggcgcccccctgacagaggaccagcagaaccggctgtctgaggagattgagaagaagtggcaggagctggagaagctgcccctgcgggagaacaagagggtgcccctgacagccctgctgaaccagagcagaggagagcggcggggccccccatctgatggccacgaggccctggagaaggaggtgcaggccctgcgggcccagctggaggcctggaggctgcagggcgaggccccccagagcgccctgcggagccaggaggatggccacatccccccaggctacatcagccaggaggcctgtgagaggagcctggccgagatggagagcagccaccagcaggtgatggaggagctgcagaggcaccacgagcgggagctgcagaggctgcagcaggagaaggagtggctgctggccgaggagacagctgccacagccagcgccatcgaggccatgaagaaggcctaccaggaggagctgagccgggagctgagcaagaccaggagcctgcagcagggcccagatggcctgaggaagcagcaccagagtgatgtggaggccctgaagcgggagctgcaggtgctgtctgagcagtacagccagaagtgcctggagattggagccctgatgaggcaggccgaggagcgggagcacaccctgcggcgctgccagcaggagggccaggagctgctgcggcacaaccaggagctgcacggccgcctgtctgaggagattgaccagctgcggggcttcatcgccagccagggcatgggaaatggctgcggccgcagcaatgaaagaagcagctgtgagctggaggtgctgctgcgggtgaaggaaaatgagctgcagtacctgaagaaggaggtgcagtgcctgagagatgagctgcagatgatgcagaaggacaagcgcttcaccagcggcaagtaccaggatgtgtatgtggagctgagccacatcaagaccaggtctgagcgggagattgagcagctgaaggagcacctgcggctggccatggccgccctgcaggagaaggagagcatgaggaacagcctggccgagtag

SEQ ID NO: 174163 - DNA, 7098 bp, synthetic construct
  misc_feature 1..7098: note = Description of Artificial Sequence: Synthetic coding sequence
  source 1..7098: mol_type = other DNA
atggaggaggtgcctggagatgccctgtgtgagcactttgaggccaacatcctgacccagaaccgctgccagaactgcttccaccctgaggaggcccatggagcccgctaccaggagctgcggagccccagcggggctgaggtgccctactgtgacctgccccgctgccccccagcccctgaggaccccctgagcgccagcaccagcggctgccagagcgtggtggaccccggcctgcggcccggccccaagaggggccccagccccagcgctggcctgcctgaggagggccccacagctgcccccaggagccgcagccgggagctggaggccgtgccctacctggagggcctgaccaccagcctgtgtggcagctgcaatgaagaccccggcagtgaccccaccagcagcccagacagcgccaccccagatgacaccagcaacagcagctctgtggactgggacacagtggagcggcaggaggaggaggcccccagctgggatgagctggccgtgatgatcccccggcggccccgggagggccccagggctgacagcagccagagggcccccagcctgctgaccaggagccctgtgggcggagatgctgctggccagaagaaggaggacacaggaggcggcggccgctctgctggccagcactgggcccggctgcggggggagagcggcctgagcctggagcggcacaggagcaccctgacccaggccagctccatgaccccccacagcggccccaggagcaccaccagccaggccagccctgcccagagggacacagcccaggccgccagcacccgggagatcccccgggccagcagcccccaccgcatcacccagagggacaccagccgggccagcagcacccagcaggagatcagccgggccagcagcacccagcaggagaccagccgggccagcagcacccaggaggacaccccccgggccagcagcacccaggaggacaccccccgggccagcagcacccagtggaacaccccccgggccagcagccccagccgcagcacccagctggacaaccccaggaccagcagcacccagcaggacaacccccagaccagcttccccacctgcaccccccagcgggagaaccccaggaccccctgtgtgcagcaggatgacccccgggccagcagccccaacagaaccacccagcgggagaacagcaggaccagctgtgcccagagggacaaccccaaggccagcaggaccagcagccccaacagagccacccgggacaaccccaggaccagctgtgcccagagggacaacccccgggccagcagccccagccgggccacccgggacaaccccaccaccagctgtgcccagagggacaacccccgggccagcaggaccagcagccccaacagagccacccgggacaaccccaggaccagctgtgcccagagggacaacccccgggccagcagccccagccgggccacccgggacaaccccaccaccagctgtgcccagagggacaacccccgggccagcaggaccagcagccccaacagagccacccgggacaaccccaggaccagctgtgcccagagggacaacccccgggccagcagccccaacagagctgcccgggacaaccccaccaccagctgtgcccagagggacaacccccgggccagcaggaccagcagccccaacagagccacccgggacaaccccaggaccagctgtgcccagagggacaacccccgggccagcagccccaacagagccacccgggacaaccccaccaccagctgtgcccagagggacaacccccgggccagcaggaccagcagccccaacagagccacccgggacaaccccaggaccagctgtgcccagagggacaacccccgggccagcagccccaacagaaccacccagcaggacagccccaggaccagctgtgccaggagagatgacccccgggccagcagccccaacagaaccatccagcaggagaaccccaggaccagctgtgccctgcgggacaacccccgggccagcagccccagcaggaccatccagcaggagaaccccaggaccagctgtgcccagagagatgacccccgggccagcagccccaacagaaccacccagcaggagaaccccaggaccagctgtgcccggcgggacaacccccgggccagcagcaggaacagaaccatccagagggacaaccccaggaccagctgtgcccagagggacaacccccgggccagcagccccaacagaaccatccagcaggagaacctgcggaccagctgcacccggcaggacaaccccaggaccagcagccccaacagagccacccgggacaaccccaggaccagctgtgcccagagggacaacctgcgggccagcagccccatccgggccacccagcaggacaaccccaggacctgcatccagcagaacatccccaggagcagcagcacccagcaggacaaccccaagaccagctgcaccaagagggacaacctgcggcccacctgcacccagagggacaggacccagagcttctccttccagagggacaaccctggcaccagcagcagccagtgctgcacccagaaggagaacctgcggcccagcagcccccacaggagcacccagtggaacaaccccaggaacagcagcccccacaggaccaacaaggacatcccctgggccagcttccccctgcggcccacccagagtgatggccccaggaccagcagccccagccgcagcaagcagagcgaggtgccctgggccagcatcgccctgcggcccacccagggcgaccggccccagaccagcagccccagcaggcctgcccagcacgaccccccccagagcagctttggccccacccagtacaacctgcccagccgggccaccagcagcagccacaaccctggccaccagagcaccagcaggaccagcagccctgtgtacccagctgcctacggggcccccctgaccagccctgagcccagccagcccccctgtgctgtgtgcatcggccacagagatgccccccgggccagcagccccccacgctacctgcagcacgaccccttccccttcttccctgagccccgggcccctgagagcgagcccccccaccacgagcccccctacatccccccagctgtgtgcatcggccacagagatgccccccgggccagcagcccccccaggcacacccagtttgaccccttccccttcctgcctgacaccagtgatgctgagcaccagtgccagagcccccagcacgagcccctgcagctgcctgcccctgtgtgcatcggctacagagatgccccccgggccagcagccccccccggcaggcccctgagcccagcctgctcttccaggacctgccccgggccagcacagagagcctggtgcccagcatggacagcctgcacgagtgcccccacatccccacccctgtgtgcatcggccacagagatgcccccagcttcagcagccccccccggcaggcccctgagcccagcctcttcttccaggaccccccaggcacctccatggagagcctggcccccagcacagacagcctgcacggcagccctgtgctgatcccccaggtgtgcatcggccacagagatgccccccgggccagcagccccccaagacaccccccaagtgacctggccttcctggcccccagccccagccctggcagcagcggcggcagccggggcagcgcccctcctggagagaccaggcacaacctggagcgggaggagtacacagtgctggccgacctgcccccaccccggcggctggcccagaggcagcccggcccccaggcccagtgcagcagcggcggccgcacccacagccctggccgggcagaggtggagcggctgtttggccaggagaggaggaagtctgaggccgccggggccttccaggcccaggatgagggccgcagccagcagcccagccagggccagagccagctgctgcggcggcagagcagccctgcccccagccggcaggtgaccatgctgcctgccaagcaggccgagctgaccaggaggagccaggccgagcccccccacccctggagccctgagaagaggcctgagggggaccggcagctgcagggcagccccctgccccccaggaccagcgcccggaccccagagcgggagctgcggacccagaggcccctggagagcggccaggccggcccccggcagcccctgggcgtgtggcagagccaggaggagcccccaggcagccagggcccccaccgccacctggagaggtcctggagcagccaggagggcggcctgggccctgggggctggtggggctgtggggagcccagcctgggcgccgccaaggcccctgagggcgcctggggcggcaccagccgggagtacaaggagagctggggccagcctgaggcctgggaggagaagcccacccatgagctgccccgggagctgggcaagaggagccccctgaccagccccccagagaactggggcggccctgctgagagcagccagagctggcacagcggcacccccacagctgtgggctggggcgctgagggcgcctgcccctacccccggggcagcgagaggaggcctgagctggactggagggacctgctgggcctgctgcgggcccctggagagggcgtgtgggcccgggtgcccagcctggactgggagggcctgctggagctgctgcaggcccggctgcccaggaaggaccctgctggccacagagatgacctggcccgggccctgggccctgagctgggccccccaggcaccaatgatgtgcctgagcaggagagccacagccagcctgagggctgggccgaggccacccctgtgaatggccacagccctgccctgcagagccagagccctgtgcagctgcccagccctgcctgcaccagcacccagtggcccaagatcaaggtgacccggggccctgccacagccaccctggccggcctggagcagacaggccccctgggcagccgcagcacagccaagggccccagcctgcctgagctgcagttccagcctgaggagcctgaggagagcgagcccagccggggccaggaccccctgacagaccagaagcaggccgacagcgctgacaagaggcctgctgagggcaaggccggcagccccctgaagggccgcctggtgacctcctggaggatgcctggggaccggcccaccctcttcaaccccttcctgctgagcctgggcgtgctgcgctggaggaggccagacctgctgaacttcaagaagggctggatgagcatcctggatgagcctggagagccccccagccccagcctgaccaccaccagcaccagccagtggaagaagcactggtttgtgctgacagacagcagcctgaagtactacagagacagcacagctgaggaggctgatgagctggatggagaaattgacctgcggagctgcacagatgtgacagaatatgctgtgcagaggaactacggcttccagatccacaccaaggatgctgtgtacaccctgagcgccatgaccagcggcatcagaagaaactggattgaggccctgaggaagacagtgcggcccaccagcgccccagatgtgaccaagctgagtgacagcaacaaggaaaatgccctgcacagctacagcacccagaagggccccctgaaggccggggagcagagagctggcagcgaggtgatcagcagaggaggccccaggaaggcagatggccagaggcaggccctggactatgtggagctgagccccctgacccaggccagcccccagagggcccggaccccagcccggaccccagaccggctggccaagcaggaggagctggagcgggacctggcccagaggtctgaggagaggaggaagtggtttgaggccacagacagcaggaccccagaggtgcctgctggggagggcccccggcggggcctgggcgcccccctgacagaggaccagcagaaccggctgtctgaggagattgagaagaagtggcaggagctggagaagctgcccctgcgggagaacaagagggtgcccctgacagccctgctgaaccagagcagaggagagcggcggggccccccatctgatggccacgaggccctggagaaggaggtgcaggccctgcgggcccagctggaggcctggaggctgcagggcgaggccccccagagcgccctgcggagccaggaggatggccacatccccccaggctacatcagccaggaggcctgtgagaggagcctggccgagatggagagcagccaccagcaggtgatggaggagctgcagaggcaccacgagcgggagctgcagaggctgcagcaggagaaggagtggctgctggccgaggagacagctgccacagccagcgccatcgaggccatgaagaaggcctaccaggaggagctgagccgggagctgagcaagaccaggagcctgcagcagggcccagatggcctgaggaagcagcaccagagtgatgtggaggccctgaagcgggagctgcaggtgctgtctgagcagtacagccagaagtgcctggagatcggggccctgatgaggcaggccgaggagcgggagcacaccctgcggcgctgccagcaggagggccaggagctgctgcggcacaaccaggagctgcacggccgcctgtctgaggagattgaccagctgcggggcttcatcgccagccagggcatgggaaatggctgcggccgcagcaatgaaagaagcagctgtgagctggaggtgctgctgcgggtgaaggaaaatgagctgcagtacctgaagaaggaggtgcagtgcctgagagatgagctgcagatgatgcagaaggacaagcgcttcaccagcggcaagtaccaggatgtgtatgtggagctgagccacatcaagaccaggtctgagcgggagattgagcagctgaaggagcacctgcggctggccatggccgccctgcaggagaaggagagcatgaggaacagcctggccgagtag

SEQ ID NO: 174164 - DNA, 1296 bp, synthetic construct
  misc_feature 1..1296: note = Description of Artificial Sequence: Synthetic coding sequence
  source 1..1296: mol_type = other DNA
atgggcggctggaagggccctggccagaggcggggcaaggagggccctgaggcccggcggcgggctgctgagcggggcggcggcggcggcggcggcggcgtgcctgcccccaggagccctgcccgggagccccggcccaggagctgcctgctgctgcccccaccctggggcgccgccatgaccccagacctgctgaacttcaagaagggctggatgagcatcctggatgagcccggggagccccccagccccagcctgaccaccaccagcaccagccagtggaagaagcactggtttgtgctgacagacagcagcctgaagtactacagagacagcacagctgaggaggctgatgagctggatggagaaattgacctgcggagctgcacagatgtgacagaatatgctgtgcagagaaattatggcttccagatccacaccaaggatgctgtgtacaccctgagcgccatgaccagcggcatcagaagaaactggattgaggccctgaggaagacagtgcggcccaccagcgccccagatgtgaccaagctgagtgacagcaacaaggaaaatgccctgcacagctacagcacccagaagggccccctgaaggccggggagcagagagctggcagcgaggtgatcagccggggcggccccaggaaggcagatggccagaggcaggccctggactatgtggagctgagccccctgacccaggccagcccccagagggcccggaccccagcccggaccccagaccggctggccaagcaggaggagctggagcgggacctggcccagaggtctgaggagaggaggaagtggtttgaggccacagacagcaggaccccagaggtgcctgctggggagggcccccggcggggcctgggcgcccccctgacagaggaccagcagaaccggctgtctgaggagattgagaagaagtggcaggagctggagaagctgcccctgcgggagaacaagagggtgcccctgacagccctgctgaaccagagcagaggagagcggcggggccccccatctgatggccacgaggccctggagaaggaggtgcaggccctgcgggcccagctggaggcctggaggctgcagggcgaggccccccagagcgccctgcggagccaggaggatggccacatccccccaggctacatcagccagctggtgggcgtcatcaccgtgcctgtgctgcagacccggcccctgagcagcgagcggctgtgtgacctgcccaaggtgaccccacctgctggcctgaagggcggcatctag

SEQ ID NO: 174165 - DNA, 5070 bp, synthetic construct
  misc_feature 1..5070: note = Description of Artificial Sequence: Synthetic coding sequence
  source 1..5070: mol_type = other DNA
atggaggaggtgcctggagatgccctgtgtgagcactttgaggccaacatcctgacccagaaccgctgccagaactgcttccaccctgaggaggcccatggagcccgctaccaggagctgcggagccccagcggggctgaggtgccctactgtgacctgccccgctgccccccagcccctgaggaccccctgagcgccagcaccagcggctgccagagcgtggtggaccccggcctgcggcccggccccaagaggggccccagccccagcgctggcctgcctgaggagggccccacagctgcccccaggagccgcagccgggagctggaggccgtgccctacctggagggcctgaccaccagcctgtgtggcagctgcaatgaagaccccggcagtgaccccaccagcagcccagacagcgccaccccagatgacaccagcaacagcagctctgtggactgggacacagtggagcggcaggaggaggaggcccccagctgggatgagctggccgtgatgatcccccggcggccccgggagggccccagggctgacagcagccagagggcccccagcctgctgaccaggagccctgtgggcggagatgctgctggccagaagaaggaggacacaggaggcggcggccgctctgctggccagcactgggcccggctgcggggggagagcggcctgagcctggagcggcacaggagcaccctgacccaggccagctccatgaccccccacagcggccccaggagcaccaccagccaggccagccctgcccagagggacacagcccaggccgccagcacccgggagatcccccgggccagcagcccccaccgcatcacccagagggacaccagccgggccagcagcacccagcaggagatcagccgggccagcagcacccagcaggagaccagccgggccagcagcacccaggaggacaccccccgggccagcagcacccaggaggacaccccccgggccagcagcacccagtggaacaccccccgggccagcagccccagccgcagcacccagctggacaaccccaggaccagcagcacccagcaggacaacccccagaccagcttccccacctgcaccccccagcgggagaaccccaggaccccctgtgtgcagcaggatgacccccgggccagcagccccaacagaaccacccagcgggagaacagcaggaccagctgtgcccagagggacaaccccaaggccagcaggaccagcagccccaacagagccacccgggacaaccccaggaccagctgtgcccagagggacaacccccgggccagcagccccagccgggccacccgggacaaccccaccaccagctgtgcccagagggacaacccccgggccagcaggaccagcagccccaacagagccacccgggacaaccccaggaccagctgtgcccagagggacaacccccgggccagcagccccagccgggccacccgggacaaccccaccaccagctgtgcccagagggacaacccccgggccagcaggaccagcagccccaacagagccacccgggacaaccccaggaccagctgtgcccagagggacaacccccgggccagcagccccaacagagctgcccgggacaaccccaccaccagctgtgcccagagggacaacccccgggccagcaggaccagcagccccaacagagccacccgggacaaccccaggaccagctgtgcccagagggacaacccccgggccagcagccccaacagagccacccgggacaaccccaccaccagctgtgcccagagggacaacccccgggccagcaggaccagcagccccaacagagccacccgggacaaccccaggaccagctgtgcccagagggacaacccccgggccagcagccccaacagaaccacccagcaggacagccccaggaccagctgtgccaggagagatgacccccgggccagcagccccaacagaaccatccagcaggagaaccccaggaccagctgtgccctgcgggacaacccccgggccagcagccccagcaggaccatccagcaggagaaccccaggaccagctgtgcccagagagatgacccccgggccagcagccccaacagaaccacccagcaggagaaccccaggaccagctgtgcccggcgggacaacccccgggccagcagcaggaacagaaccatccagagggacaaccccaggaccagctgtgcccagagggacaacccccgggccagcagccccaacagaaccatccagcaggagaacctgcggaccagctgcacccggcaggacaaccccaggaccagcagccccaacagagccacccgggacaaccccaggaccagctgtgcccagagggacaacctgcgggccagcagccccatccgggccacccagcaggacaaccccaggacctgcatccagcagaacatccccaggagcagcagcacccagcaggacaaccccaagaccagctgcaccaagagggacaacctgcggcccacctgcacccagagggacaggacccagagcttctccttccagagggacaaccctggcaccagcagcagccagtgctgcacccagaaggagaacctgcggcccagcagcccccacaggagcacccagtggaacaaccccaggaacagcagcccccacaggaccaacaaggacatcccctgggccagcttccccctgcggcccacccagagtgatggccccaggaccagcagccccagccgcagcaagcagagcgaggtgccctgggccagcatcgccctgcggcccacccagggcgaccggccccagaccagcagccccagcaggcctgcccagcacgaccccccccagagcagctttggccccacccagtacaacctgcccagccgggccaccagcagcagccacaaccctggccaccagagcaccagcaggaccagcagccctgtgtacccagctgcctacggggcccccctgaccagccctgagcccagccagcccccctgtgctgtgtgcatcggccacagagatgccccccgggccagcagccccccacgctacctgcagcacgaccccttccccttcttccctgagccccgggcccctgagagcgagcccccccaccacgagcccccctacatccccccagctgtgtgcatcggccacagagatgccccccgggccagcagcccccccaggcacacccagtttgaccccttccccttcctgcctgacaccagtgatgctgagcaccagtgccagagcccccagcacgagcccctgcagctgcctgcccctgtgtgcatcggctacagagatgccccccgggccagcagccccccccggcaggcccctgagcccagcctgctcttccaggacctgccccgggccagcacagagagcctggtgcccagcatggacagcctgcacgagtgcccccacatccccacccctgtgtgcatcggccacagagatgcccccagcttcagcagccccccccggcaggcccctgagcccagcctcttcttccaggaccccccaggcacctccatggagagcctggcccccagcacagacagcctgcacggcagccctgtgctgatcccccaggtgtgcatcggccacagagatgccccccgggccagcagccccccaagacaccccccaagtgacctggccttcctggcccccagccccagccctggcagcagcggcggcagccggggcagcgcccctcctggagagaccaggcacaacctggagcgggaggagtacacagtgctggccgacctgcccccaccccggcggctggcccagaggcagcccggcccccaggcccagtgcagcagcggcggccgcacccacagccctggccgggcagaggtggagcggctgtttggccaggagaggaggaccatgctgcctgccaagcaggccgagctgacccggcgcagccaggccgagcccccccacccctggagccctgagaagaggcctgagggggaccggcagctgcagggcagccccctgccccccaggaccagcgcccggaccccagagcgggagctgcggacccagaggcccctggagagcggccaggccggcccccggcagcccctgggcgtgtggcagagccaggaggagcccccaggcagccagggcccccaccgccacctggagaggtcctggagcagccaggagggcggcctgggccctgggggctggtggggctgtggggagcccagcctgggcgccgccaaggcccctgagggcgcctggggcggcaccagccgggagtacaaggagagctggggccagcctgaggcctgggaggagaagcccacccatgagctgccccgggagctgggcaagaggagccccctgaccagccccccagagaactggggcggccctgctgagagcagccagagctggcacagcggcacccccacagctgtgggctggggcgctgagggcgcctgcccctacccccggggcagcgagcggcggcctgagctggactggagggacctgctgggcctgctgcgggcccctggagaaggagtgtgggcccgggtgcccagcctggactgggagggcctgctggagctgctgcaggcccggctgcccaggaaggaccctgctggccacagagatgacctggcccgggccctgggccctgagctgggccccccaggcaccaatgatgtgcctgagcaggagagccacagccagcctgagggctgggccgaggccacccctgtgaatggccacagccctgccctgcagagccagagccctgtgcagctgcccagccctgcctgcaccagcacccagtggcccaagatcaaggtgacccggggccctgccacagccaccctggccggcctggagcagacaggccccctgggcagccgcagcacagccaagggccccagcctgcctgagctgcagttccagcctgaggagcctgaggagagcgagcccagccggggccaggaccccctgacagaccagaagcaggccgacagctag

SEQ ID NO: 174166 - DNA, 771 bp, synthetic construct
  misc_feature 1..771: note = Description of Artificial Sequence: Synthetic coding sequence
  source 1..771: mol_type = other DNA
atgagcatcctggatgagcctggagagccccccagccccagcctgaccaccaccagcaccagccagtggaagaagcactggtttgtgctgacagacagcagcctgaagtactacagagacagcacagctgaggaggctgatgagctggatggagaaattgacctgcggagctgcacagatgtgacagaatatgctgtgcagaggaactacggcttccagatccacaccaaggatgctgtgtacaccctgagcgccatgaccagcggcatcagaagaaactggattgaggccctgaggaagacagtgcggcccaccagcgccccagatgtgaccaagctgagtgacagcaacaaggaaaatgccctgcacagctacagcacccagaagggccccctgaaggccggggagcagagagctggcagcgaggtgatcagcagaggaggccccaggaaggcagatggccagaggcaggccctggactatgtggagctgagccccctgacccaggccagcccccagagggcccggaccccagcccggaccccagaccggctggccaagcaggaggagctggagcgggacctggcccagaggtctgaggagaggaggaagtggtttgaggccacagacagcaggaccccagaggtgcctgctggggagggcccccggcggggcctgggcgcccccctgacagaggaccagcagaaccggctgtctgaggagattgagaagaagtggcaggagctggagaagctgcccctgcgggagtag

SEQ ID NO: 174167 - DNA, 252 bp, synthetic construct
  misc_feature 1..252: note = Description of Artificial Sequence: Synthetic coding sequence
  source 1..252: mol_type = other DNA
atgagcatcctggatgagcctggagagccccccagccccagcctgaccaccaccagcaccagccagtggaagaagcactggtttgtgctgacagacagcagcctgaagtactacagagacagcacagctgaggaggctgatgagctggatggagaaattgacctgcggagctgcacagatgtgacagaatatgctgtgcagaggaactacggcttccagatccacaccaaggatgctgtgtacaccctgtag

SEQ ID NO: 174168 - DNA, 2577 bp, synthetic construct
  misc_feature 1..2577: note = Description of Artificial Sequence: Synthetic coding sequence
  source 1..2577: mol_type = other DNA
atggccgagctgtctgaggaggccctgctgtctgtgctgcccaccatccgggtgcccaaggccggggacagagtgcacaaggatgaatgtgccttctcctttgacaccccagagagcgagggcggcctgtacatctgcatgaacaccttcctgggctttgggaagcagtatgtggagcggcacttcaacaagacaggccagagggtgtacctgcacctgcggaggacccggcggcccaaggaggaggaccctgccaccggcaccggggacccccccaggaagaagcccacccggctggccatcggcgtggagggcggctttgacctgtctgaggagaagtttgagctggatgaagatgtgaagatcgtcatcctgcctgactacctggagatcgccagagatggcctgggcggcctgcctgacatcgtgcgggacagagtgaccagcgctgtggaggccctgctgtctgctgacagcgccagcaggaagcaggaggtgcaggcctgggatggagaggtgcggcaggtgtccaagcacgccttcagcctgaagcagctggacaacccagcccgcatccccccctgtggctggaagtgcagcaaatgtgacatgagggagaacctgtggctgaacctgacagatggcagcatcctgtgtggccgccgctactttgatggcagcggcggcaacaaccacgctgtggagcactaccgggagaccggctaccccctggccgtgaagctgggcaccatcaccccagatggagcagatgtgtacagctatgatgaagatgacatggtgctggaccccagcctggccgagcacctgagccactttggaattgacatgctgaagatgcagaagacagacaagaccatgacagagctggagattgacatgaaccagagaattggagagtgggagctgatccaggagagcggcgtgcccctgaagcccctgtttggacctggctacacaggcatccggaacctgggcaacagctgctacctgaacagcgtggtgcaggtgctcttcagcatcccagacttccagaggaaatatgtggacaagctggagaagatcttccagaatgcccccacagaccccacccaggacttcagcacccaggtggccaagctgggccacggcctgctgagcggggagtacagcaagcctgtgcctgagagcggagatggagagcgggtgcctgagcagaaggaggtgcaggacggcatcgcccccaggatgttcaaggccctgattggcaagggccaccctgagttcagcaccaaccggcagcaggatgcccaggagttcttcctgcacctgatcaacatggtggagaggaactgccgcagcagcgagaaccccaatgaggtgttccgcttcctggtggaggagaagatcaagtgcctggccacagagaaggtgaagtacacccagagggtggactacatcatgcagctgcctgtgcccatggatgctgccctgaacaaggaggagctgctggagtatgaggagaagaagaggcaggccgaggaggagaagatggccctgcctgagctggtgcgggcccaggtgcccttcagcagctgcctggaggcctacggggcccctgagcaggtggatgacttctggagcacagccctgcaggccaagtctgtggccgtgaagaccaccaggtttgccagcttcccagactacctggtgatccagatcaagaagttcaccttcggcctggactgggtgcccaagaagctggatgtgtccattgagatgcctgaggagctggacatcagccagctgcggggcaccggcctgcagcctggagaggaggagctgcctgacatcgccccacccctggtgaccccagatgagcccaagggcagcctgggcttctatggaaatgaagatgaagattccttctgcagcccccacttcagcagccccaccagccccatgctggatgagagcgtcatcatccagctggtggagatgggcttccccatggatgcctgcaggaaggctgtgtactacacaggcaacagcggggctgaggccgccatgaactgggtgatgagccacatggatgatcctgactttgccaaccccctcatcctgcccggcagcagcggccctggcagcaccagcgctgctgctgaccccccacctgaggactgtgtgaccaccatcgtgtccatgggcttcagccgggaccaggccctgaaggccctgcgggccaccaacaacagcctggagagagctgtggactggatcttcagccacattgatgacctggatgctgaggccgccatggacatcagcgagggccgctctgctgctgacagcatcagcgagagcgtgcctgtgggccccaaggtgagagatggccctgggaagtaccagctgtttgccttcatcagccacatgggcaccagcaccatgtgtggccactacgtgtgccacatcaagaaggagggccgctgggtgatctacaatgaccagaaggtgtgtgccagcgagaagccacccaaggacctgggctacatctacttctaccagagggtggccagctag

SEQ ID NO: 174169 - DNA, 750 bp, synthetic construct
  misc_feature 1..750: note = Description of Artificial Sequence: Synthetic coding sequence
  source 1..750: mol_type = other DNA
atggcccccagcaggaagttctttgtgggcggcaactggaagatgaatggaaggaagcagagcctgggggagctgattggcaccctgaatgctgccaaggtgcctgctgacacagaggtggtgtgtgccccacccacagcctacatcgactttgcccggcagaagctggaccccaagattgctgtggccgcccagaactgctacaaggtgaccaacggggccttcaccggggagatcagccctggcatgatcaaggactgtggggccacctgggtggtgctgggccacagcgagaggagacatgtgtttggagagagtgatgagctgattggccagaaggtggcccacgccctggccgagggcctgggcgtgattgcctgcatcggggagaagctggatgagcgggaggccggcatcacagagaaggtggtgtttgagcagaccaaggtgattgctgacaacgtgaaggactggagcaaggtggtgctggcctatgagcctgtgtgggccatcggcaccgggaagacagccaccccccagcaggcccaggaggtgcatgagaagctgcggggctggctgaagagcaatgtgtctgatgctgtggcccagagcacccgcatcatctatggaggctctgtgactggagccacctgcaaggagctggccagccagccagatgtggatggcttcctggtgggcggggccagcctgaagccagagtttgtggacatcatcaatgccaagcagtag

SEQ ID NO: 174170 - DNA, 504 bp, synthetic construct
  misc_feature 1..504: note = Description of Artificial Sequence: Synthetic coding sequence
  source 1..504: mol_type = other DNA
atgatcaaggactgtggggccacctgggtggtgctgggccacagcgagaggagacatgtgtttggagagagtgatgagctgattggccagaaggtggcccacgccctggccgagggcctgggcgtgattgcctgcatcggggagaagctggatgagcgggaggccggcatcacagagaaggtggtgtttgagcagaccaaggtgattgctgacaacgtgaaggactggagcaaggtggtgctggcctatgagcctgtgtgggccatcggcaccgggaagacagccaccccccagcaggcccaggaggtgcatgagaagctgcggggctggctgaagagcaatgtgtctgatgctgtggcccagagcacccgcatcatctatggaggctctgtgactggagccacctgcaaggagctggccagccagccagatgtggatggcttcctggtgggcggggccagcctgaagccagagtttgtggacatcatcaatgccaagcagtag

SEQ ID NO: 174171 - DNA, 1233 bp, synthetic construct
  misc_feature 1..1233: note = Description of Artificial Sequence: Synthetic coding sequence
  source 1..1233: mol_type = other DNA
atggatgtgatggagctgctggaggaggacctgacctgccccatctgctgcagcctgtttgatgacccccgggtgctgccctgcagccacaacttctgcaagaagtgcctggagggcatcctggagggctctgtgaggaacagcctgtggaggcctgcccccttcaagtgccccacctgcaggaaggagaccagcgccaccggcatcaacagcctgcaggtgaactacagcctgaagggcatcgtggagaagtacaacaagatcaagatcagccccaagatgcctgtgtgcaagggccacctgggccagcccctgaacatcttctgcctgacagacatgcagctgatctgtggcatctgtgccaccagaggagagcacaccaagcacgtgttctgcagcattgaagatgcctatgcccaggagagagatgcctttgagagcctcttccagagctttgagacctggaggagaggagatgccctgagccggctggacaccctggagaccagcaagaggaagagcctgcagctgctgaccaaggacagcgacaaggtgaaggagttctttgagaagctgcagcacaccctggaccagaagaagaatgagatcctgagtgactttgagaccatgaagctggccgtgatgcaggcctatgaccctgagatcaacaagctgaacaccatcctgcaggagcagaggatggccttcaacattgctgaggccttcaaggatgtgtctgagcccatcgtgttcctgcagcagatgcaggagttccgggagaagatcaaggtgatcaaggagacccccctgccccccagcaacctgcctgccagccccctgatgaagaactttgacaccagccagtgggaggacatcaagctggtggatgtggacaagctgagcctgccccaggacaccggcaccttcatcagcaagatcccctggagcttctacaagctgttcctgctgatcctgctgctgggcctggtgattgtgtttggccccaccatgttcctggagtggagcctgtttgatgacctggccacctggaagggctgcctgagcaacttcagcagctacctgaccaagacagctgacttcatcgagcagagcgtcttctactgggagcaggtgacagatggcttcttcatcttcaatgaacgcttcaagaacttcaccctggtggtgctgaacaacgtggccgagtttgtgtgcaagtacaagctgctgtag

SEQ ID NO: 174172 - DNA, 1233 bp, synthetic construct; identical to SEQ ID NO: 174171
  misc_feature 1..1233: note = Description of Artificial Sequence: Synthetic coding sequence
  source 1..1233: mol_type = other DNA

SEQ ID NO: 174173 - DNA, 1224 bp, synthetic construct
  misc_feature 1..1224: note = Description of Artificial Sequence: Synthetic coding sequence
  source 1..1224: mol_type = other DNA
atggagctgctggaggaggacctgacctgccccatctgctgcagcctgtttgatgacccccgggtgctgccctgcagccacaacttctgcaagaagtgcctggagggcatcctggagggctctgtgaggaacagcctgtggaggcctgcccccttcaagtgccccacctgcaggaaggagaccagcgccaccggcatcaacagcctgcaggtgaactacagcctgaagggcatcgtggagaagtacaacaagatcaagatcagccccaagatgcctgtgtgcaagggccacctgggccagcccctgaacatcttctgcctgacagacatgcagctgatctgtggcatctgtgccaccagaggagagcacaccaagcacgtgttctgcagcattgaagatgcctatgcccaggagagagatgcctttgagagcctcttccagagctttgagacctggaggagaggagatgccctgagccggctggacaccctggagaccagcaagaggaagagcctgcagctgctgaccaaggacagcgacaaggtgaaggagttctttgagaagctgcagcacaccctggaccagaagaagaatgagatcctgagtgactttgagaccatgaagctggccgtgatgcaggcctatgaccctgagatcaacaagctgaacaccatcctgcaggagcagaggatggccttcaacattgctgaggccttcaaggatgtgtctgagcccatcgtgttcctgcagcagatgcaggagttccgggagaagatcaaggtgatcaaggagacccccctgccccccagcaacctgcctgccagccccctgatgaagaactttgacaccagccagtgggaggacatcaagctggtggatgtggacaagctgagcctgccccaggacaccggcaccttcatcagcaagatcccctggagcttctacaagctgttcctgctgatcctgctgctgggcctggtgattgtgtttggccccaccatgttcctggagtggagcctgtttgatgacctggccacctggaagggctgcctgagcaacttcagcagctacctgaccaagacagctgacttcatcgagcagagcgtcttctactgggagcaggtgacagatggcttcttcatcttcaatgaacgcttcaagaacttcaccctggtggtgctgaacaacgtggccgagtttgtgtgcaagtacaagctgctgtag

SEQ ID NO: 174174 - DNA, 801 bp, synthetic construct
  misc_feature 1..801: note = Description of Artificial Sequence: Synthetic coding sequence
  source 1..801: mol_type = other DNA
atggagctgctggaggaggacctgacctgccccatctgctgcagcctgtttgatgacccccgggtgctgccctgcagccacaacttctgcaagaagtgcctggagggcatcctggagggctctgtgaggaacagcctgtggaggcctgcccccttcaagtgccccacctgcaggaaggagaccagcgccaccggcatcaacagcctgcaggtgaactacagcctgaagggcatcgtggagaagtacaacaagatcaagatcagccccaagatgcctgtgtgcaagggccacctgggccagcccctgaacatcttctgcctgacagacatgcagctgatctgtggcatctgtgccaccagaggagagcacaccaagcacgtgttctgcagcattgaagatgcctatgcccaggagagagatgcctttgagagcctcttccagagctttgagacctggaggagaggagatgccctgagccggctggacaccctggagaccagcaagaggaagagcctgcagctgctgaccaaggacagcgacaaggtgaaggagttctttgagaagctgcagcacaccctggaccagaagaagaatgagatcctgagtgactttgagaccatgaagctggccgtgatgcaggcctatgaccctgagatcaacaagctgaacaccatcctgcaggagcagaggatggccttcaacattgctgaggccttcaaggatgtgtctgagcccatcgtgttcctgcagcagatgcaggagttccgggagaagatcaaggtgatcaaggagaccccctag

SEQ ID NO: 174175 - DNA, 1224 bp, synthetic construct; identical to SEQ ID NO: 174173
  misc_feature 1..1224: note = Description of Artificial Sequence: Synthetic coding sequence
  source 1..1224: mol_type = other DNA

SEQ ID NO: 174176 - DNA, 390 bp, synthetic construct
  misc_feature 1..390: note = Description of Artificial Sequence: Synthetic coding sequence
  source 1..390: mol_type = other DNA
atggagctgctggaggaggacctgacctgccccatctgctgcagcctgtttgatgacccccgggtgctgccctgcagccacaacttctgcaagaagtgcctggagggcatcctggagggctctgtgaggaacagcctgtggaggcctgcccccttcaagtgccccacctgcaggaaggagaccagcgccaccggcatcaacagcctgcaggtgaactacagcctgaagggcatcgtggagaagtacaacaagatcaagatcagccccaagatgcctgtgtgcaagggccacctgggccagcccctgaacatcttctgcctgacagacatgcagctgatctgtggcatctgtgccaccagaggagagcacaccaagcacgtgttctgctag

SEQ ID NO: 174177 - DNA, 1224 bp, synthetic construct; identical to SEQ ID NO: 174173
  misc_feature 1..1224: note = Description of Artificial Sequence: Synthetic coding sequence
  source 1..1224: mol_type = other DNA

SEQ ID NO: 174178 - DNA, 669 bp, synthetic construct
  misc_feature 1..669: note = Description of Artificial Sequence: Synthetic coding sequence
  source 1..669: mol_type = other DNA
atgaatgacctgagcaacagagtgtggagcatcagccaggagccagaccctgtgcagaggctgcaggcctacacagccacagagcaggagatgcagcagcagatgagcctgggggagctgtgccaccctgtgcccctgagctttgagcctgtgaagagcttcttcaagggcctggtggaggccgtggagagcaccctgcagacccccctggacatccggctgaaggagagcatcaactgccagctgagtgaccccagcagcaccaagccaggcaccctgctgaagaccagccccagccctgagaggagcctgctgctgaagagctgctgggccgcctggggcccctgcccctgctgcggcagcaccaggtctgggaagtgctggctggtgacagccagccccccagctgccaccaccggccgcctgacctgcagaagaagagccccagctgggggctgggcccggcccaccccaccatttggagctgctggccccaggcctcctccagcctgggccgccacagccagccctggggccagcagcgccaccaccctgagcacaggccccagcaccacagccagcgctgctgcctgtggccctgccaccaccagcactggaagtgccagctcctggaccaccaggcctgccagcagccccagcaccacctag

SEQ ID NO: 174179 - DNA, 1329 bp, synthetic construct
  misc_feature 1..1329: note = Description of Artificial Sequence: Synthetic coding sequence
  source 1..1329: mol_type = other DNA
atggccggggccgccaccggcagcaggaccccaggccgctctgagctggtggagggctgcggctggcgctgcccagagcacggggacagagtggccgagctgttctgccgccgctgccgccgctgtgtgtgtgccctgtgccctgtgctgggcgcccaccggggccaccctgtgggcctggccctggaggccgctgtgcacgtgcagaagctgagccaggagtgcctgaagcagctggccatcaagaagcagcagcacatcgacaacatcacccagattgaagatgccacagagaagctgaaggccaatgctgagagcagcaagacctggctgaagggcaagttcacagagctgcggctgctgctggatgaggaggaggccctggccaagaagttcatcgacaagaacacccagctgaccctgcaggtgtaccgggagcaggccgacagctgccgggagcagctggacatcatgaatgacctgagcaacagagtgtggagcatcagccaggagccagaccctgtgcagaggctgcaggcctacacagccacagagcaggagatgcagcagcagatgagcctgggggagctgtgccaccctgtgcccctgagctttgagcctgtgaagagcttcttcaagggcctggtggaggccgtggagagcaccctgcagacccccctggacatccggctgaaggagagcatcaactgccagctgagtgaccccagcagcaccaagccaggcaccctgctgaagaccagccccagccctgagaggagcctgctgctgaagtatgcccggacccccaccctggaccctgacaccatgcacgcccggctgcggctgtctgctgaccggctgactgtgcgctgtggcctgctgggcagcctgggccctgtgcctgtgctgcgctttgatgccctgtggcaggtgctggcccgggactgctttgccaccggccgccactactgggaggtggatgtgcaggaggccggggccggctggtgggtgggcgccgcctatgccagcctgcggcggcggggggccagcgctgctgcccggctgggctgcaaccggcagagctggtgcctgaagagatatgacctggagtactgggccttccatgatggccagaggagccggctgcggcccagagatgacctggaccggctgggcgtcttcctggactatgaagctggggtgctggccttctatgatgtgactggaggcatgagccacctgcacaccttccgggccaccttccaggagcccctgtacccagccctgcggctgtgggagggcgccatcagcatcccccggctgccctag

SEQ ID NO: 174180 - DNA, 1329 bp, synthetic construct; identical to SEQ ID NO: 174179
  misc_feature 1..1329: note = Description of Artificial Sequence: Synthetic coding sequence
  source 1..1329: mol_type = other DNA

SEQ ID NO: 174181 - DNA, 1221 bp, synthetic construct
  misc_feature 1..1221: note = Description of Artificial Sequence: Synthetic coding sequence
  source 1..1221: mol_type = other DNA
atggccggggccgccaccggcagcaggaccccaggccgctctgagctggtggagggctgcggctggcgctgcccagagcacggggacagagtggccgagctgttctgccgccgctgccgccgctgtgtgtgtgccctgtgccctgtgctgggcgcccaccggggccaccctgtgggcctggccctggaggccgctgtgcacgtgcagaagctgagccaggagtgcctgaagcagctggccatcaagaagcagcagcacatcgacaacatcacccagattgaagatgccacagagaagctgaaggccaatgctgagagcagcaagacctggctgaagggcaagttcacagagctgcggctgctgctggatgaggaggaggccctggccaagaagttcatcgacaagaacacccagctgaccctgcaggtgtaccgggagcaggccgacagctgccgggagcagctggacatcatgaatgacctgagcaacagagtgtggagcatcagccaggagccagaccctgtgcagaggctgcaggcctacacagccacagagcaggagatgcagcagcagatgagcctgggggagctgtgccaccctgtgcccctgagctttgagcctgtgaagagcttcttcaagggcctggtggaggccgtggagagcaccctgcagacccccctggacatccggctgaaggagagcatcaactgccagctgagtgaccccagcagcaccaagccaggcaccctgctgaagaccagccccagccctgagaggagcctgctgctgaagtatgcccggacccccaccctggaccctgacaccatgcacgcccggctgcggctgtctgctgaccggctgactgtgcgctgtggcctgctgggcagcctgggccctgtgcctgtgctgcgctttgatgccctgtggcaggtgctggcccgggactgctttgccaccggccgccactactgggaggtggatgtgcaggaggccggggccggctggtgggtgggcgccgcctatgccagcctgcggcggcggggggccagcgctgctgcccggctgggctgcaaccggcagagctggtgcctgaagagatatgacctggagtactgggccttccatgatggccagaggtctgcctgtggccctgccaccaccagcactggaagtgccagctcctggaccaccaggcctgccagcagccccagcaccacctag

SEQ ID NO: 174182 - DNA, 762 bp, synthetic construct
  misc_feature 1..762: note = Description of Artificial Sequence: Synthetic coding sequence
  source 1..762: mol_type = other DNA
atggccggggccgccaccggcagcaggaccccaggccgctctgagctggtggagggctgcggctggcgctgcccagagcacggggacagagtggccgagctgttctgccgccgctgccgccgctgtgtgtgtgccctgtgccctgtgctgggcgcccaccggggccaccctgtgggcctggccctggaggccgctgtgcacgtgcagaagctgagccaggagtgcctgaagcagctggccatcaagaagcagcagcacatcgacaacatcacccagattgaagatgccacagagaagctgaaggccaatgctgagagcagcaagacctggctgaagggcaagttcacagagctgcggctgctgctggatgaggaggaggccctggccaagaagttcatcgacaagaacacccagctgaccctgcaggtgtaccgggagcaggccgacagctgccgggagcagctggacatcatgaatgacctgagcaacagagtgtggagcatcagccaggagccagaccctgtgcagaggctgcaggcctacacagccacagagcaggagatgcagcagcagatgagcctgggggagctgtgccaccctgtgcccctgagctttgagcctgtgaagagcttcttcaagggcctggtggaggccgtggagagcaccctgcagacccccctggacatccggctgagccccaccaaccacgcctacagcgccctgaaggtgagcagcccccggctggtgagcaaccggccctag

SEQ ID NO: 174183 - DNA, 1329 bp, synthetic construct; identical to SEQ ID NO: 174179
  misc_feature 1..1329: note = Description of Artificial Sequence: Synthetic coding sequence
  source 1..1329: mol_type = other DNA

SEQ ID NO: 174184 - DNA, 672 bp, synthetic construct
  misc_feature 1..672: note = Description of Artificial Sequence: Synthetic coding sequence
  source 1..672: mol_type = other DNA
atgtctgctggcagtgatggcggcggccgccacttctgtggcggcatcaactgccagctgagtgaccccagcagcaccaagccaggcaccctgctgaagaccagccccagccctgagaggagcctgctgctgaagtatgcccggacccccaccctggaccctgacaccatgcacgcccggctgcggctgtctgctgaccggctgactgtgcgctgtggcctgctgggcagcctgggccctgtgcctgtgctgcgctttgatgccctgtggcaggtgctggcccgggactgctttgccaccggccgccactactgggaggtggatgtgcaggaggccggggccggctggtgggtgggcgccgcctatgccagcctgcggaggagaggagccagcgctgctgcccggctgggctgcaaccggcagagctggtgcctgaagagatatgacctggagtactgggccttccatgatggccagaggagccggctgcggcccagagatgacctggaccggctgggcgtcttcctggactatgaggccggcgtgctggccttctatgatgtgactggaggcatgagccacctgcacaccttccgggccaccttccaggagcccctgtacccagccctgcggctgtgggagggcgccatcagcatcccccggctgccctag

SEQ ID NO: 174185 - DNA, 2316 bp, synthetic construct
  misc_feature 1..2316: note = Description of Artificial Sequence: Synthetic coding sequence
  source 1..2316: mol_type = other DNA
atgcacaggagcggccgctatggcacccagcagcagagagctggcagcaagacagctggccccccctgccagtggagcaggatggccagcgagggcaccaacatccccagccctgtggtgcggcagattgacaagcagttcctgatctgcagcatctgcctggagcgctacaagaaccccaaggtgctgccctgcctgcacaccttctgtgagcgctgcctgcagaactacatcccagcccacagcctgaccctgagctgccctgtgtgccggcagaccagcatcctgcctgagaagggcgtggccgccctgcagaacaacttcttcatcaccaacctgatggatgtgctgcagaggaccccaggcagcaatgctgaggagagcagcatcctggagaccgtgacagctgtggccgccggcaagcccctgagctgccccaaccatgatggaaatgtgatggagttctactgccagagctgtgaaacagccatgtgcagagaatgtacagaaggagaacatgctgagcaccccaccgtgcccctgaaggatgtggtggagcagcacaaggccagcctgcaggtgcagctggatgctgtgaacaagaggctgcctgagattgacagcgccctgcagttcatcagcgagatcatccaccagctgaccaaccagaaggccagcatcgtggatgacatccacagcacctttgatgagctgcagaagaccctgaatgtgaggaagtctgtgctgctgatggagctggaggtgaactacggcctgaagcacaaggtgctgcagagccagctggacaccctgctgcagggccaggagagcatcaagagctgcagcaacttcaccgcccaggccctgaaccacggcacagaaacagaggtgctgctggtgaagaagcagatgtctgagaagctgaatgagctggccgaccaggacttccccctgcacccccgggagaatgaccagctggacttcatcgtggagacagagggcctgaagaagagcatccacaacctgggcaccatcctgaccaccaatgctgtggccagcgagaccgtggccaccggggagggcctgcggcagaccatcatcggccagcccatgtctgtgaccatcaccaccaaggacaaggatggagagctgtgcaagacaggaaatgcctacctgacagctgagctgagcaccccagatggctctgtggctgatggagagatcctggacaacaagaatggcacctatgagttcctgtacacagtgcagaaggagggggacttcaccctgagcctgcggctgtatgaccagcacatccggggcagccccttcaagctgaaggtgatccgctctgcagatgtgagccccaccacagagggcgtgaagagaagagtgaagagccctggcagcggccacgtgaagcagaaggctgtgaagaggcctgcctccatgtacagcacaggcaagaggaaggagaaccccattgaagatgacctgatcttccgggtgggcaccaagggcaggaacaagggggagttcaccaacctgcagggcgtggccgccagcaccaacgggaagatcctgattgctgacagcaacaaccagtgtgtgcagatcttcagcaatgatggccagttcaagagccgcttcggcatccggggccgcagccctggccagctgcagaggcccaccggggtggccgtgcaccccagcggggacatcatcatcgctgactatgacaacaagtgggtgtccatcttcagcagtgatggcaagttcaagaccaagattggcagcggcaagctgatgggccccaagggcgtgtctgtggacagaaatggccacatcatcgtggtggacaacaaggcctgctgcgtgttcatcttccagcccaacgggaagatcgtgaccaggtttggcagcagaggaaatggagaccggcagtttgctggcccccactttgctgctgtgaacagcaacaatgagatcatcatcacagacttccacaaccacagcgtgaaggtgttcaaccaggagggggagttcatgctgaagtttggcagcaatggagagggcaatggccagttcaatgcccccaccggggtggccgtggacagcaatggaaacatcatcgtggccgactggggcaacagccgcatccaggtgtttgatggcagcggcagcttcctgagctacatcaacaccagcgctgaccccctgtatggcccccagggcctggccctgaccagtgatggccacgtggtggtggccgacagcggcaaccactgcttcaaggtgtaccgctacctgcagtag

SEQ ID NO: 174186 - DNA, 2235 bp, synthetic construct
  misc_feature 1..2235: note = Description of Artificial Sequence: Synthetic coding sequence
  source 1..2235: mol_type = other DNA
atggccagcgagggcaccaacatccccagccctgtggtgcggcagattgacaagcagttcctgatctgcagcatctgcctggagcgctacaagaaccccaaggtgctgccctgcctgcacaccttctgtgagcgctgcctgcagaactacatcccagcccacagcctgaccctgagctgccctgtgtgccggcagaccagcatcctgcctgagaagggcgtggccgccctgcagaacaacttcttcatcaccaacctgatggatgtgctgcagaggaccccaggcagcaatgctgaggagagcagcatcctggagaccgtgacagctgtggccgccggcaagcccctgagctgccccaaccatgatggaaatgtgatggagttctactgccagagctgtgaaacagccatgtgccgggagtgcacagaaggagagcacgccgagcaccccaccgtgcccctgaaggatgtggtggagcagcacaaggccagcctgcaggtgcagctggatgctgtgaacaagaggctgcctgagattgattctgccctgcagttcatcagcgagatcatccaccagctgaccaaccagaaggccagcatcgtggatgacatccacagcacctttgatgagctgcagaagaccctgaatgtgaggaagtctgtgctgctgatggagctggaggtgaactacggcctgaagcacaaggtgctgcagagccagctggacaccctgctgcagggccaggagagcatcaagagctgcagcaacttcaccgcccaggccctgaaccacggcacagaaacagaggtgctgctggtgaagaagcagatgtctgagaagctgaatgagctggccgaccaggacttccccctgcaccccagagaaaatgaccagctggacttcatcgtggagacagagggcctgaagaagagcatccacaacctgggcaccatcctgaccaccaatgctgtggccagcgagaccgtggccactggagagggcctgcggcagaccatcatcggccagcccatgtctgtgaccatcaccaccaaggacaaggatggagagctgtgcaagacaggaaatgcctacctgacagctgagctgagcaccccagatggctctgtggctgatggagagatcctggacaacaagaatggcacctatgagttcctgtacacagtgcagaaggagggggacttcaccctgagcctgcggctgtatgaccagcacatccggggcagccccttcaagctgaaggtgatccgctctgcagatgtgagccccaccacagaaggagtgaagagaagagtgaagagccctggcagcggccacgtgaagcagaaggctgtgaagaggcctgcctccatgtacagcacaggcaagaggaaagaaaaccccattgaagatgacctgatcttccgggtgggcaccaagggcagaaataaaggagagttcaccaacctgcagggcgtggccgccagcaccaacgggaagatcctgattgctgacagcaacaaccagtgtgtgcagatcttcagcaatgatggccagttcaagagcagatttggcatccggggccgcagccctggccagctgcagaggcccactggagtggccgtgcaccccagcggggacatcatcatcgctgactatgacaacaagtgggtgtccatcttcagcagtgatggcaagttcaagaccaagattggcagcggcaagctgatgggccccaagggcgtgtctgtggacagaaatggccacatcatcgtggtggacaacaaggcctgctgcgtgttcatcttccagcccaacgggaagatcgtgacccgcttcggcagcagaggaaatggagaccggcagtttgctggcccccactttgctgctgtgaacagcaacaatgagatcatcatcacagacttccacaaccacagcgtgaaggtgttcaaccaggagggggagttcatgctgaagtttggcagcaatggagagggcaatggccagttcaatgcccccactggagtggccgtggacagcaatggaaacatcatcgtggccgactggggcaacagccgcatccaggtgtttgatggcagcggcagcttcctgagctacatcaacaccagcgctgaccccctgtatggcccccagggcctggccctgaccagtgatggccacgtggtggtggccgacagcggcaaccactgcttcaaggtgtaccgctacctgcagtag

SEQ ID NO: 174187 - DNA, 1428 bp, synthetic construct
  misc_feature 1..1428: note = Description of Artificial Sequence: Synthetic coding sequence
  source 1..1428: mol_type = other DNA
atggccagcgctgcccggctgaccatgatgtgggaggaggtgacctgccccatctgcctggacccctttgtggagcctgtgtccattgaatgtggccacagcttctgccaggagtgcatcagccaggtgggcaaaggaggcggctctgtgtgccctgtgtgccggcagcgcttcctgctgaagaacctgcggcccaaccggcagctggccaacatggtgaacaacctgaaggagatcagccaggaggcccgggagggcacccagggcgagcgctgtgctgtgcatggagagcggctgcacctgttctgtgagaaggatggcaaggccctgtgctgggtgtgtgcccagagcaggaagcaccgggaccacgccatggtgcccctggaggaggccgcccaggagtaccaggagaagctgcaggtggccctgggggagctgcggaggaagcaggagctggccgagaagctggaggtggagatcgccatcaagagagctgactggaagaagacagtggagacccagaagagccgcatccacgccgagtttgtgcagcagaagaacttcctggtggaggaggagcagaggcagctgcaggagctggagaaggatgagcgggagcagctgcgcatcctgggggagaaggaggccaagctggcccagcagagccaggccctgcaggagctgatcagcgagctggaccggcgctgccacagcagcgccctggagctgctgcaggaggtgatcatcgtgctggagaggtctgagagctggaacctgaaggacctggacatcaccagccctgagctgcggtctgtgtgccacgtgcccggcctgaagaagatgctgcggacctgtgctgtgcacatcaccctggaccctgacacagccaacccctggctgatcctgtctgaggaccggcggcaggtgcggctgggggacacccagcagagcatccctggaaatgaggagagatttgacagctaccccatggtgctgggcgcccagcacttccacagcggcaagcactactgggaggtggatgtgacaggcaaggaggcctgggacctgggcgtgtgccgggacagcgtgcggaggaagggccacttcctgctgagcagcaagagcggcttctggaccatctggctgtggaacaagcagaagtatgaggccggcacctacccccagacccccctgcacctgcaggtgcccccctgccaggtgggcatcttcctggactatgaagctggcatggtgtccttctacaacatcacagaccacggcagcctcatctacagcttctctgaatgtgccttcaccggccccctgcggcccttcttcagccctggcttcaatgatggcggcaagaacacagcccccctgaccctgtgccccctgaacatcggcagccagggcagcacagactactag

SEQ ID NO: 174188 - DNA, 1428 bp, synthetic construct
  misc_feature 1..1428: note = Description of Artificial Sequence: Synthetic coding sequence
  source 1..1428: mol_type = other DNA
atggccagcgctgcccggctgaccatgatgtgggaggaggtgacctgccccatctgcctggacccctttgtggagcctgtgtccattgaatgtggccacagcttctgccaggagtgcatcagccaggtgggcaaaggaggcggctctgtgtgccctgtgtgccggcagcgcttcctgctgaagaacctgcggcccaaccggcagctggccaacatggtgaacaacctgaaggagatcagccaggaggcccgggagggcacccagggcgagcgctgtgctgtgcatggagagcggctgcacctgttctgtgagaaggatggcaaggccctgtgctgggtgtgtgcccagagcaggaagcaccgggaccacgccatggtgcccctggaggaggccgcccaggagtaccaggagaagctgcaggtggccctgggggagctgcggaggaagcaggagctggccgagaagctggaggtggagatcgccatcaagagagctgactggaagaagacagtggagacccagaagagccgcatccacgccgagtttgtgcagcagaagaacttcctggtggaggaggagcagaggcagctgcaggagctggagaaggatgagcgggagcagctgcgcatcctgggggagaaggaggccaagctggcccagcagagccaggccctgcaggagctgatcagcgagctggaccggcgctgccacagcagcgccctggagctgctgcaggaggtgattgtgctgggccccaggtctgagagctggaacctgaaggacctggacatcaccagccctgagctgcggtctgtgtgccacgtgcccggcctgaagaagatgctgcggacctgtgctgtgcacatcaccctggaccctgacacagccaacccctggctgatcctgtctgaggaccggcggcaggtgcggctgggggacacccagcagagcatccctggaaatgaggagagatttgacagctaccccatggtgctgggcgcccagcacttccacagcggcaagcactactgggaggtggatgtgacaggcaaggaggcctgggacctgggcgtgtgccgggacagcgtgcggaggaagggccacttcctgctgagcagcaagagcggcttctggaccatctggctgtggaacaagcagaagtatgaggccggcacctacccccagacccccctgcacctgcaggtgcccccctgccaggtgggcatcttcctggactatgaagctggcatggtgtccttctacaacatcacagaccacggcagcctcatctacagcttctctgaatgtgccttcaccggccccctgcggcccttcttcagccctggcttcaatgatggcggcaagaacacagcccccctgaccctgtgccccctgaacatcggcagccagggcagcacagactactag

SEQ ID NO: 174189 - DNA, 1497 bp, synthetic construct
  misc_feature 1..1497: note = Description of Artificial Sequence: Synthetic coding sequence
  source 1..1497: mol_type = other DNA
atggacttctctgtgaaggtggacatcgagaaggaggtgacctgccccatctgcctggagctgctgacagagcccctgagcctggactgtggccacagcttctgccaggcctgcatcacagccaagatcaaggagagcgtcatcatcagcagaggagagagcagctgccctgtgtgccagacccgcttccagcccggcaacctgcggcccaacagacacctggccaacatcgtggagcgggtgaaggaggtgaagatgagcccccaggagggccagaagagagatgtgtgtgagcaccacggcaagaagctgcagatcttctgcaaggaggatggcaaggtgatctgctgggtgtgtgagctgagccaggagcaccagggccaccagaccttccgcatcaatgaggtggtgaaggagtgccaggagaagctgcaggtggccctgcagaggctcatcaaggaggaccaggaggccgagaagctggaggatgacatccggcaggagaggacagcctggaagaactacatccagatcgagcggcagaagatcctgaagggcttcaatgagatgagggtcatcctggacaatgaggagcagcgggagctgcagaagctggaggagggggaggtgaatgtgctggacaacctggccgccgccacagaccagctggtgcagcagaggcaggatgccagcaccctcatcagtgacctgcagaggcggctgcggggcagctctgtggagatgctgcaggatgtgattgatgtgatgaagaggtctgagagctggaccctgaagaagcccaagtctgtgtccaagaagctgaagagcgtcttccgggtgcctgacctgagcggcatgctgcaggtgctgaaggagctgacagatgtgcagtactactgggtggatgtgatgctgaaccctggcagcgccaccagcaatgtggccatctctgtggaccagaggcaggtgaagacagtgaggacctgcaccttcaagaacagcaacccctgtgacttcagcgccttcggcgtgtttggctgccagtacttcagcagcggcaagtactactgggaggtggatgtgtctgggaagatcgcctggatcctgggcgtgcacagcaagatcagcagcctgaacaagaggaagagcagcggctttgcctttgaccccagcgtgaactacagcaaggtgtacagccgctaccggccccagtatggctactgggtgattggcctgcagaacacctgtgagtacaatgcctttgaggacagcagcagcagtgaccccaaggtgctgaccctcttcatggctgtgcccccctgcagaattggagtcttcctggactatgaagctggcatcgtgtccttcttcaacgtgaccaaccacggggccctgatctacaagttcagcggctgccgcttcagcaggcctgcctacccctacttcaacccctggaactgcctggtgcccatgacagtgtgcccccccagcagctag

SEQ ID NO: 174190 - DNA, 684 bp, synthetic construct
  misc_feature 1..684: note = Description of Artificial Sequence: Synthetic coding sequence
  source 1..684: mol_type = other DNA
atggacttctctgtgaaggtggacatcgagaaggaggtgacctgccccatctgcctggagctgctgacagagcccctgagcctggactgtggccacagcttctgccaggcctgcatcacagccaagatcaaggagagcgtcatcatcagcagaggagagagcagctgccctgtgtgccagacccgcttccagcccggcaacctgcggcccaacagacacctggccaacatcgtggagcgggtgaaggaggtgaagatgagcccccaggagggccagaagagagatgtgtgtgagcaccacggcaagaagctgcagatcttctgcaaggaggatggcaaggtgatctgctgggtgtgtgagctgagccaggagcaccagggccaccagaccttccgcatcaatgaggtggtgaaggagtgccaggagaagctgcaggtggccctgcagaggctcatcaaggaggaccaggaggccgagaagctggaggatgacatccggcaggagaggacagcctggaagaactacatccagatcgagcggcagaagatcctgaagggcttcaatgagatgagggtcatcctggacaatgaggagcagcgggagctgcagaagctggaggagggggaggtgaatgtgctggacaacctggccgccgccacagaccagctggtgcagcagaggtag

SEQ ID NO: 174191 - DNA, 612 bp, synthetic construct
  misc_feature 1..612: note = Description of Artificial Sequence: Synthetic coding sequence
  source 1..612: mol_type = other DNA
atggacttctctgtgaaggtggacatcgagaaggaggtgacctgccccatctgcctggagctgctgacagagcccctgagcctggactgtggccacagcttctgccaggcctgcatcacagccaagatcaaggagagcgtcatcatcagcagaggagagagcagctgccctgtgtgccagacccgcttccagcccggcaacctgcggcccaacagacacctggccaacatcgtggagcgggtgaaggaggtgaagatgagcccccaggagggccagaagagagatgtgtgtgagcaccacggcaagaagctgcagatcttctgcaaggaggatggcaaggtgatctgctgggtgtgtgagctgagccaggagcaccagggccaccagaccttccgcatcaatgaggtggtgaaggagtgccaggagaagctgcaggtggccctgcagaggctcatcaaggaggaccaggaggccgagaagctggaggatgacatccggcaggagaggacagcctggaagaactacatccagatcgagcggcagaagatcctgaagggcttcaatgagatgagggtcatcctggacaatgaggagcagcgggagctgcagtag

SEQ ID NO: 174192 - DNA, 1263 bp, synthetic construct
  misc_feature 1..1263: note = Description of Artificial Sequence: Synthetic coding sequence
  source 1..1263: mol_type = other DNA
atggacttctctgtgaaggtggacatcgagaaggaggtgacctgccccatctgcctggagctgctgacagagcccctgagcctggactgtggccacagcttctgccaggcctgcatcacagccaagatcaaggagagcgtcatcatcagcagaggagagagcagctgccctgtgtgccagacccgcttccagcccggcaacctgcggcccaacagacacctggccaacatcgtggagcgggtgaaggaggtgaagatgagcccccaggagggccagaagagagatgtgtgtgagcaccacggcaagaagctgcagatcttctgcaaggaggatggcaaggtgatcctggacaatgaggagcagcgggagctgcagaagctggaggagggggaggtgaatgtgctggacaacctggccgccgccacagaccagctggtgcagcagaggcaggatgccagcaccctcatcagtgacctgcagaggcggctgcggggcagctctgtggagatgctgcaggatgtgattgatgtgatgaagaggtctgagagctggaccctgaagaagcccaagtctgtgtccaagaagctgaagagcgtcttccgggtgcctgacctgagcggcatgctgcaggtgctgaaggagctgacagatgtgcagtactactgggtggatgtgatgctgaaccctggcagcgccaccagcaatgtggccatctctgtggaccagaggcaggtgaagacagtgaggacctgcaccttcaagaacagcaacccctgtgacttcagcgccttcggcgtgtttggctgccagtacttcagcagcggcaagtactactgggaggtggatgtgtctgggaagatcgcctggatcctgggcgtgcacagcaagatcagcagcctgaacaagaggaagagcagcggctttgcctttgaccccagcgtgaactacagcaaggtgtacagccgctaccggccccagtatggctactgggtgattggcctgcagaacacctgtgagtacaatgcctttgaggacagcagcagcagtgaccccaaggtgctgaccctcttcatggctgtgcccccctgcagaattggagtcttcctggactatgaagctggcatcgtgtccttcttcaacgtgaccaaccacggggccctgatctacaagttcagcggctgccgcttcagcaggcctgcctacccctacttcaacccctggaactgcctggtgcccatgacagtgtgcccccccagcagctag

SEQ ID NO: 174193 - DNA, 930 bp, synthetic construct
  misc_feature 1..930: note = Description of Artificial Sequence: Synthetic coding sequence
  source 1..930: mol_type = other DNA
atgagggtcatcctggacaatgaggagcagcgggagctgcagaagctggaggagggggaggtgaatgtgctggacaacctggccgccgccacagaccagctggtgcagcagaggcaggatgccagcaccctcatcagtgacctgcagaggcggctgcggggcagctctgtggagatgctgcaggatgtgattgatgtgatgaagaggtctgagagctggaccctgaagaagcccaagtctgtgtccaagaagctgaagtctgtgttccgggtgcctgacctgagcggcatgctgcaggtgctgaaggagctgacagatgtgcagtactactgggtggatgtgatgctgaaccctggcagcgccaccagcaatgtggccatctctgtggaccagaggcaggtgaagacagtgaggacctgcaccttcaagaacagcaacccctgtgacttcagcgcctttggagtgtttggctgccagtacttcagcagcggcaagtactactgggaggtggatgtgtctgggaagatcgcctggatcctgggcgtgcacagcaagatcagcagcctgaacaagaggaagagcagcggctttgcctttgaccccagcgtgaactacagcaaggtgtacagccgctaccggccccagtatggctactgggtgattggcctgcagaacacctgtgagtacaatgcctttgaggacagcagcagcagtgaccccaaggtgctgaccctcttcatggctgtgcccccctgccgcatcggggtcttcctggactatgaggccggcatcgtgtccttcttcaacgtgaccaaccacggggccctgatctacaagttcagcggctgccgcttcagcaggcctgcctacccctacttcaacccctggaactgcctggtgcccatgacagtgtgcccccccagcagctag

SEQ ID NO: 174194 - DNA, 1893 bp, synthetic construct
  misc_feature 1..1893: note = Description of Artificial Sequence: Synthetic coding sequence
  source 1..1893: mol_type = other DNA
atggccgagctgtgccccctggccgaggagctgagctgcagcatctgcctggagcccttcaaggagcctgtgaccaccccctgtggccacaacttctgtggcagctgcctgaatgagacctgggccgtgcagggcagcccctacctgtgcccccagtgcagagctgtgtaccaggcccggccccagctgcacaagaacacagtgctgtgcaatgtggtggagcagttcctgcaggccgacctggcccgggagcccccagcagatgtgtggaccccaccagcccgggccagcgcccccagccccaatgcccaggtggcctgtgaccactgcctgaaggaggccgctgtgaagacctgcctggtgtgcatggccagcttctgccaggagcacctgcagccccactttgacagccctgccttccaggaccaccccctgcagccccctgtgcgggacctgctgcggaggaagtgcagccagcacaaccggctgcgggagttcttctgcccagagcacagcgagtgcatctgccacatctgcctggtggagcacaagacctgcagccctgccagcctgagccaggccagcgctgacctggaggccaccctgcggcacaagctgactgtgatgtacagccagatcaacggggccagccgggccctggatgatgtgaggaaccggcagcaggatgtgaggatgacagccaacaggaaggtggagcagctgcagcaggagtacacagagatgaaggccctgctggatgccagcgagaccaccagcaccaggaagatcaaggaggaggagaagagggtgaacagcaagtttgacaccatctaccagatcctgctgaagaagaagtctgagatccagaccctgaaggaggagattgagcagagcctgaccaagagagatgaatttgagttcctggagaaggccagcaagctgcggggcatcagcaccaagcctgtgtacatccctgaggtggagctgaaccacaagctgatcaagggcatccaccagagcaccatcgacctgaagaatgagctgaagcagtgcatcggccgcctgcaggagcccacccccagcagcggggaccctggagaacatgaccctgccagcacccacaagagcaccaggcctgtgaagaaggtgtccaaggaggagaagaagagcaagaagcccccacctgtgcctgccctgcccagcaagctgcccaccttcggggcccctgagcagctggtggacctgaagcaggccggcctggaggccgccgccaaggccaccagcagccaccccaacagcaccagcctgaaggccaaggtgctggagaccttcctggccaagagcaggcctgagctgctggagtactacatcaaggtgatcctggactacaacacagcccacaacaaggtggccctgtctgagtgctacacagtggcctctgtggccgagatgccccagaactaccggccccacccccagcgcttcacctactgcagccaggtgctgggcctgcactgctacaagaagggcatccactactgggaggtggagctgcagaagaacaacttctgtggggtgggcatctgctacggctccatgaaccggcagggccctgagagccggctgggcaggaacagcgcctcctggtgtgtggagtggttcaacaccaagatcagcgcctggcacaacaacgtggagaagaccctgcccagcaccaaggccaccagggtgggcgtgctgctgaactgtgaccacggctttgtgatcttctttgctgtggccgacaaggtgcacctgatgtacaagttccgggtggacttcacagaggccctgtacccagccttctgggtgttttctgctggggccaccctgagcatctgcagccccaagtag

SEQ ID NO: 174195 - DNA, 1893 bp, synthetic construct; identical to SEQ ID NO: 174194
  misc_feature 1..1893: note = Description of Artificial Sequence: Synthetic coding sequence
  source 1..1893: mol_type = other DNA

SEQ ID NO: 174196 - DNA, 1077 bp, synthetic construct
  misc_feature 1..1077: note = Description of Artificial Sequence: Synthetic coding sequence
  source 1..1077: mol_type = other DNA
atggccagcggctctgtggccgagtgcctgcagcaggagaccacctgccctgtgtgcctgcagtactttgctgagcccatgatgctggactgtggccacaacatctgctgtgcctgcctggcccgctgctggggcacagctgagaccaacgtgtcctgcccccagtgccgggagaccttcccccagaggcacatgaggcccaacagacacctggccaacgtgacccagctggtgaagcagctgaggacagagcggcccagcggccctggaggagagatgggcgtgtgtgagaagcaccgggagcccctgaagctgtactgtgaggaggaccagatgcccatctgtgtggtgtgtgacaggagccgggagcaccggggccacagcgtgctgcccctggaggaggccgtggagggcttcaaggagcagatccagaaccagctggaccacctgaagagggtgaaggacctgaagaagagaagaagagcccagggcgagcaggcccgggcagagctgctgagcctgacccagatggagcgggagaagatcgtgtgggagtttgagcagctgtaccacagcctgaaggagcacgagtaccgcctgctggcccggctggaggagctggacctggccatctacaacagcatcaacggggccatcacccagttcagctgcaacatcagccacctgagcagcctgattgcccagctggaggagaagcagcagcagcccacccgggagctgctgcaggacattggagacaccctgagcagagctgagcgcatccgcatccctgagccctggatcaccccaccagacctgcaggagaagatccacatctttgcccagaagtgcctcttcctgacagagagcctgaagcagttcacagagaagatgcagagcgacatggagaagatccaggagctgcgggaggcccagctgtacagcgtggatgtgaccctggaccctgacacagcctaccccagcctcatcctgagtgacaacctgcggcaggtgcgctacagctacctgcagcaggacctgcctgacaaccctgagaggagccccagcaccacctag

SEQ ID NO: 174197 - DNA, 1542 bp, synthetic construct
  misc_feature 1..1542: note = Description of Artificial Sequence: Synthetic coding sequence
  source 1..1542: mol_type = other DNA
atggccagcggctctgtggccgagtgcctgcagcaggagaccacctgccctgtgtgcctgcagtactttgctgagcccatgatgctggactgtggccacaacatctgctgtgcctgcctggcccgctgctggggcacagctgagaccaacgtgtcctgcccccagtgccgggagaccttcccccagaggcacatgaggcccaacagacacctggccaacgtgacccagctggtgaagcagctgaggacagagcggcccagcggccctggaggagagatgggcgtgtgtgagaagcaccgggagcccctgaagctgtactgtgaggaggaccagatgcccatctgtgtggtgtgtgacaggagccgggagcaccggggccacagcgtgctgcccctggaggaggccgtggagggcttcaaggagcagatccagaaccagctggaccacctgaagagggtgaaggacctgaagaagagaagaagagcccagggcgagcaggcccgggcagagctgctgagcctgacccagatggagcgggagaagatcgtgtgggagtttgagcagctgtaccacagcctgaaggagcacgagtaccgcctgctggcccggctggaggagctggacctggccatctacaacagcatcaacggggccatcacccagttcagctgcaacatcagccacctgagcagcctgattgcccagctggaggagaagcagcagcagcccacccgggagctgctgcaggacattggagacaccctgagcagagctgagcgcatccgcatccctgagccctggatcaccccaccagacctgcaggagaagatccacatctttgcccagaagtgcctcttcctgacagagagcctgaagcagttcacagagaagatgcagagcgacatggagaagatccaggagctgcgggaggcccagctgtacagcgtggatgtgaccctggaccctgacacagcctaccccagcctcatcctgagtgacaacctgcggcaggtgcgctacagctacctgcagcaggacctgcctgacaaccctgagcgcttcaacctcttcccctgtgtgctgggcagcccctgcttcatcgccggccgccactactgggaggtggaggtgggggacaaggccaagtggaccatcggcgtgtgtgaagattctgtgtgcaggaaaggaggagtgaccagcgccccccagaatggcttctgggccgtgtccctgtggtacggcaaggagtactgggccctgaccagccccatgacagccctgcccctgcggacccccctgcagagggtgggcatcttcctggactatgatgctggggaggtgtccttctacaacgtgacagagcgctgccacaccttcaccttcagccacgccaccttctgtggccctgtgcggccctacttcagcctgagctacagcggcggcaagtctgctgcccccctcatcatctgccccatgtctggaattgatggcttcagcggccacgtgggcaaccacggccacagcatggagaccagcccctag

SEQ ID NO: 174198 - DNA, 1542 bp, synthetic construct; identical to SEQ ID NO: 174197
  misc_feature 1..1542: note = Description of Artificial Sequence: Synthetic coding sequence
  source 1..1542: mol_type = other DNA

SEQ ID NO: 174199 - DNA, 1077 bp, synthetic construct; identical to SEQ ID NO: 174196
  misc_feature 1..1077: note = Description of Artificial Sequence: Synthetic coding sequence
  source 1..1077: mol_type = other DNA

SEQ ID NO: 174200 - DNA, 747 bp, synthetic construct
  misc_feature 1..747: note = Description of Artificial Sequence: Synthetic coding sequence
  source 1..747: mol_type = other DNA
tgactgaagcagttcacagagaagatgcagagcgacatggagaagatccaggagagcgctgacagcctggagggcggcatcctggacctgggctctgtgctgagccacatcctgcctgtgtctgagctgcgggaggcccagctgtacagcgtggatgtgaccctggaccctgacacagcctaccccagcctcatcctgagtgacaacctgcggcaggtgcgctacagctacctgcagcaggacctgcctgacaaccctgagcgcttcaacctcttcccctgtgtgctgggcagcccctgcttcatcgccggccgccactactgggaggtggaggtgggggacaaggccaagtggaccatcggcgtgtgtgaggacagcgtgtgcaggaagggcggcgtgaccagcgccccccagaatggcttctgggccgtgtccctgtggtacggcaaggagtactgggccctgaccagccccatgacagccctgcccctgcggacccccctgcagagggtgggcatcttcctggactatgatgctggggaggtgtccttctacaacgtgacagagcgctgccacaccttcaccttcagccacgccaccttctgtggccctgtgcggccctacttcagcctgagctacagcggcggcaagtctgctgcccccctcatcatctgccccatgagcggcattgatggcttcagcggccacgtgggcaaccacggccacagcatggagaccagcccctag

SEQ ID NO: 174201 - DNA, 1077 bp, synthetic construct; identical to SEQ ID NO: 174196
  misc_feature 1..1077: note = Description of Artificial Sequence: Synthetic coding sequence
  source 1..1077: mol_type = other DNA

SEQ ID NO: 174202 - DNA, 747 bp, synthetic construct; identical to SEQ ID NO: 174200
  misc_feature 1..747: note = Description of Artificial Sequence: Synthetic coding sequence
  source 1..747: mol_type = other DNA

SEQ ID NO: 174203 - DNA, 1077 bp, synthetic construct; identical to SEQ ID NO: 174196
  misc_feature 1..1077: note = Description of Artificial Sequence: Synthetic coding sequence
  source 1..1077: mol_type = other DNA

SEQ ID NO: 174204 - DNA, 747 bp, synthetic construct; identical to SEQ ID NO: 174200
  misc_feature 1..747: note = Description of Artificial Sequence: Synthetic coding sequence
  source 1..747: mol_type = other DNA

SEQ ID NO: 174205 - DNA, 750 bp, synthetic construct
  misc_feature 1..750: note = Description of Artificial Sequence: Synthetic coding sequence
  source 1..750: mol_type = other DNA
atggccagcggctctgtggccgagtgcctgcagcaggagaccacctgccctgtgtgcctgcagtactttgctgagcccatgatgctggactgtggccacaacatctgctgtgcctgcctggcccgctgctggggcacagctgagaccaacgtgtcctgcccccagtgccgggagaccttcccccagaggcacatgaggcccaacagacacctggccaacgtgacccagctggtgaagcagctgaggacagagcggcccagcggccctggaggagagatgggcgtgtgtgagaagcaccgggagcccctgaagctgtactgtgaggaggaccagatgcccatctgtgtggtgtgtgacaggagccgggagcaccggggccacagcgtgctgcccctggaggaggccgtggagggcttcaaggagcagatccagaaccagctggaccacctgaagagggtgaaggacctgaagaagagaagaagagcccagggcgagcaggcccgggcagagctgctgagcctgacccagatggagcgggagaagatcgtgtgggagtttgagcagctgtaccacagcctgaaggagcacgagtaccgcctgctggcccggctggaggagctggacctggccatctacaacagcatcaacggggccatcacccagttcagctgcaacatcagccacctgagcagcctgattgcccagctggaggagaagcagcagcagcccacccgggagctgctgcagtag

SEQ ID NO: 174206 - DNA, 1542 bp, synthetic construct; identical to SEQ ID NO: 174197
  misc_feature 1..1542: note = Description of Artificial Sequence: Synthetic coding sequence
  source 1..1542: mol_type = other DNA

SEQ ID NO: 174207 - DNA, 1542 bp, synthetic construct; identical to SEQ ID NO: 174197
  misc_feature 1..1542: note = Description of Artificial Sequence: Synthetic coding sequence
  source 1..1542: mol_type = other DNA

SEQ ID NO: 174208 - DNA, 750 bp, synthetic construct; identical to SEQ ID NO: 174205
  misc_feature 1..750: note = Description of Artificial Sequence: Synthetic coding sequence
  source 1..750: mol_type = other DNA

SEQ ID NO: 174209 - DNA, 1542 bp, synthetic construct; identical to SEQ ID NO: 174197
  misc_feature 1..1542: note = Description of Artificial Sequence: Synthetic coding sequence
  source 1..1542: mol_type = other DNA

SEQ ID NO: 174210 - DNA, 744 bp, synthetic construct
  misc_feature 1..744: note = Description of Artificial Sequence: Synthetic coding sequence
  source 1..744: mol_type = other DNA
ctgaagcagttcacagagaagatgcagagcgacatggagaagatccaggagagcgctgacagcctggagggcggcatcctggacctgggctctgtgctgagccacatcctgcctgtgtctgagctgcgggaggcccagctgtacagcgtggatgtgaccctggaccctgacacagcctaccccagcctcatcctgagtgacaacctgcggcaggtgcgctacagctacctgcagcaggacctgcctgacaaccctgagcgcttcaacctcttcccctgtgtgctgggcagcccctgcttcatcgccggccgccactactgggaggtggaggtgggggacaaggccaagtggaccatcggcgtgtgtgaagattctgtgtgcaggaaaggaggagtgaccagcgccccccagaatggcttctgggccgtgtccctgtggtacggcaaggagtactgggccctgaccagccccatgacagccctgcccctgcggacccccctgcagagggtgggcatcttcctggactatgatgctggggaggtgtccttctacaacgtgacagagcgctgccacaccttcaccttcagccacgccaccttctgtggccctgtgcggccctacttcagcctgagctacagcggcggcaagtctgctgcccccctcatcatctgccccatgtctggaattgatggcttcagcggccacgtgggcaaccacggccacagcatggagaccagcccctag

SEQ ID NO: 174211 - DNA, 750 bp, synthetic construct; identical to SEQ ID NO: 174205
  misc_feature 1..750: note = Description of Artificial Sequence: Synthetic coding sequence
  source 1..750: mol_type = other DNA

SEQ ID NO: 174212 - DNA, 159 bp, synthetic construct
  misc_feature 1..159: note = Description of Artificial Sequence: Synthetic coding sequence
  source 1..159: mol_type = other DNA
tgactgcgggaggcccagctgtacagcgtggatgtgaccctggaccctgacacagcctaccccagcctcatcctgagtgacaacctgcggcaggtgcgctacagctacctgcagcaggacctgcctgacaaccctgagaggagccccagcaccacctag

SEQ ID NO: 174213 - DNA, 696 bp, synthetic construct
  misc_feature 1..696: note = Description of Artificial Sequence: Synthetic coding sequence
  source 1..696: mol_type = other DNA
tgaagtgctgacagcctggagggcggcatcctggacctgggctctgtgctgagccacatcctgcctgtgtctgagctgcgggaggcccagctgtacagcgtggatgtgaccctggaccctgacacagcctaccccagcctcatcctgagtgacaacctgcggcaggtgcgctacagctacctgcagcaggacctgcctgacaaccctgagcgcttcaacctcttcccctgtgtgctgggcagcccctgcttcatcgccggccgccactactgggaggtggaggtgggggacaaggccaagtggaccatcggcgtgtgtgaagattctgtgtgcaggaaaggaggagtgaccagcgccccccagaatggcttctgggccgtgtccctgtggtacggcaaggagtactgggccctgaccagccccatgacagccctgcccctgcggacccccctgcagagggtgggcatcttcctggactatgatgctggggaggtgtccttctacaacgtgacagagcgctgccacaccttcaccttcagccacgccaccttctgtggccctgtgcggccctacttcagcctgagctacagcggcggcaagtctgctgcccccctcatcatctgccccatgtctggaattgatggcttcagcggccacgtgggcaaccacggccacagcatggagaccagcccctag

SEQ ID NO: 174214 - DNA, 624 bp, synthetic construct
  misc_feature 1..624: note = Description of Artificial Sequence: Synthetic coding sequence
  source 1..624: mol_type = other DNA
tgactgcgggaggcccagctgtacagcgtggatgtgaccctggaccctgacacagcctaccccagcctcatcctgagtgacaacctgcggcaggtgcgctacagctacctgcagcaggacctgcctgacaaccctgagcgcttcaacctcttcccctgtgtgctgggcagcccctgcttcatcgccggccgccactactgggaggtggaggtgggggacaaggccaagtggaccatcggcgtgtgtgaagattctgtgtgcaggaaaggaggagtgaccagcgccccccagaatggcttctgggccgtgtccctgtggtacggcaaggagtactgggccctgaccagccccatgacagccctgcccctgcggacccccctgcagagggtgggcatcttcctggactatgatgctggggaggtgtccttctacaacgtgacagagcgctgccacaccttcaccttcagccacgccaccttctgtggccctgtgcggccctacttcagcctgagctacagcggcggcaagtctgctgcccccctcatcatctgccccatgtctggaattgatggcttcagcggccacgtgggcaaccacggccacagcatggagaccagcccctag

SEQ ID NO: 174215 - DNA, 1077 bp, synthetic construct; identical to SEQ ID NO: 174196
  misc_feature 1..1077: note = Description of Artificial Sequence: Synthetic coding sequence
  source 1..1077: mol_type = other DNA

SEQ ID NO: 174216 - DNA, 747 bp, synthetic construct; identical to SEQ ID NO: 174200
  misc_feature 1..747: note = Description of Artificial Sequence: Synthetic coding sequence
  source 1..747: mol_type = other DNA

SEQ ID NO: 174217 - DNA, 750 bp, synthetic construct; identical to SEQ ID NO: 174205
  misc_feature 1..750: note = Description of Artificial Sequence: Synthetic coding sequence
  source 1..750: mol_type = other DNA

SEQ ID NO: 174218 - DNA, 2202 bp, synthetic construct
  misc_feature 1..2202: note = Description of Artificial Sequence: Synthetic coding sequence
  source 1..2202: mol_type = other DNA
atggccaagcgggaggacagccctggccctgaggtgcagcccatggacaagcagttcctggtgtgcagcatctgcctggaccgctaccagtgccccaaggtgctgccctgcctgcacaccttctgtgagcgctgcctgcagaactacatcccagcccagagcctgaccctgagctgccctgtgtgccggcagaccagcatcctgcctgagcagggcgtgtctgccctgcagaacaacttcttcatcagcagcctgatggaggccatgcagcaggccccagatggagcccatgaccctgaggacccccaccccctgtctgtggtggccggccggcccctgagctgccccaaccacgagggcaagaccatggagttctactgtgaggcctgtgaaacagccatgtgtggagaatgtcgggccggggagcaccgggagcagcacaaggccgccctgcagaggcagctggaggccgtgcggggccgcctgccccagctgtctgctgccatcgccctggtgggcggcatcagccagcagctgcaggagaggaaggccgaggccctggcccagatctctgctgcctttgaggacctggagcaggccctgcagcagaggaagcaggccctggtgtctgacctggagaccatctgtggggccaagcagaaggtgctgcagagccagctggacaccctgcggcagggccaggagcacatcggcagcagctgcagctttgctgagcaggccctgcggctgggcagcgcccctgaggtgctgctggtgaggaagcacatgagggagcggctggccgccctggccgcccaggccttccctgagcggccccatgaaaatgcccagctggagctggtgctggaggtggatggcctgcggcgctctgtgctgaacctgggcgccctgctgaccaccagcgccacagcccacgagaccgtggccactggagagggcctgcggcaggccctggtgggccagcctgccagcctgactgtgaccaccaaggacaaggatggccgcctggtgaggacaggcagcgctgagctgcgggcagagatcaccggcccagatggcacccggctgcctgtgcctgtggtggaccacaagaatggcacctatgagctggtgtacacagccaggacagaaggagagctgctgctgtctgtgctgctgtatggccagcctgtgcggggcagccccttccgggtgcgggccctgcggcctggggacctgccccccagcccagatgatgtgaagagaagagtgaagagccctgggggccctggcagccacgtgcggcagaaggctgtgcggcggcccagctccatgtacagcactggaggcaagaggaaggacaaccccattgaagatgagctggtgttccgggtgggcagccggggccgggagaagggggagttcaccaacctgcagggcgtgtctgctgccagcagcggcagaattgtggtggccgacagcaacaaccagtgcatccaggtgttcagcaatgaaggccagttcaagttccgcttcggcgtgcggggccgcagccctggccagctgcagaggcccaccggggtggccgtggacaccaatggagacatcatcgtggccgactatgacaaccgctgggtgtccatcttcagccctgagggcaagttcaagaccaagattggagctggccgcctgatgggccccaagggcgtggccgtggacagaaatggccacatcatcgtggtggacaacaagagctgctgcgtgttcaccttccagcccaacgggaagctggtgggccgctttggaggccgcggggccacagacagacactttgctggcccccactttgtggccgtgaacaacaagaatgaaattgtggtgacagacttccacaaccacagcgtgaaggtgtacagcgcagatggagagttcctgttcaagtttggcagccatggagagggcaatggccagttcaatgcccccaccggggtggccgtggacagcaatggaaacatcatcgtggccgactggggcaacagccgcatccaggtgtttgacagcagcggcagcttcctgagctacatcaacaccagcgctgagcccctgtatggcccccagggcctggccctgaccagtgatggccacgtggtggtggctgatgctggcaaccactgcttcaaggcctaccgctacctgcagtag

SEQ ID NO: 174219 - DNA, 2235 bp, synthetic construct
  misc_feature 1..2235: note = Description of Artificial Sequence: Synthetic coding sequence
  source 1..2235: mol_type = other DNA
atggccaagcgggaggacagccctggccctgaggtgcagcccatggacaagcagttcctggtgtgcagcatctgcctggaccgctaccagtgccccaaggtgctgccctgcctgcacaccttctgtgagcgctgcctgcagaactacatcccagcccagagcctgaccctgagctgccctgtgtgccggcagaccagcatcctgcctgagcagggcgtgtctgccctgcagaacaacttcttcatcagcagcctgatggaggccatgcagcaggccccagatggagcccatgaccctgaggacccccaccccctgtctgtggtggccggccggcccctgagctgccccaaccacgagggcaagaccatggagttctactgtgaggcctgtgaaacagccatgtgtggagaatgtcgggccggggagcaccgggagcacggcaccgtgctgctgagagatgtggtggagcagcacaaggccgccctgcagaggcagctggaggccgtgcggggccgcctgccccagctgtctgctgccatcgccctggtgggcggcatcagccagcagctgcaggagaggaaggccgaggccctggcccagatctctgctgcctttgaggacctggagcaggccctgcagcagaggaagcaggccctggtgtctgacctggagaccatctgtggggccaagcagaaggtgctgcagagccagctggacaccctgcggcagggccaggagcacatcggcagcagctgcagctttgctgagcaggccctgcggctgggcagcgcccctgaggtgctgctggtgaggaagcacatgagggagcggctggccgccctggccgcccaggccttccctgagcggccccatgaaaatgcccagctggagctggtgctggaggtggatggcctgcggcgctctgtgctgaacctgggcgccctgctgaccaccagcgccacagcccatgaaacagtggccaccggggagggcctgcggcaggccctggtgggccagcctgccagcctgactgtgaccaccaaggacaaggatggccgcctggtgaggactggatctgctgagctgcgggcagagatcactggaccagatggcacccggctgcctgtgcctgtggtggaccacaagaatggcacctatgagctggtgtacacagccaggacagaaggagagctgctgctgtctgtgctgctgtatggccagcctgtgcggggcagccccttccgggtgcgggccctgcggcctggggacctgccccccagcccagatgatgtgaagagaagagtgaagagccctgggggccctggcagccacgtgcggcagaaggctgtgagaagacccagctccatgtacagcactggaggcaagaggaaggacaaccccattgaagatgagctggtgttccgggtgggcagccggggccgggagaagggggagttcaccaacctgcagggcgtgtctgctgccagcagcggccgcatcgtggtggccgacagcaacaaccagtgcatccaggtgttcagcaatgaaggccagttcaagttccgctttggagtgcggggccgcagccctggccagctgcagaggcccactggagtggccgtggacaccaacggggacatcatcgtggccgactatgacaaccgctgggtgtccatcttcagccctgagggcaagttcaagaccaagatcggggccggccgcctgatgggccccaagggcgtggccgtggacagaaatggccacatcatcgtggtggacaacaagagctgctgcgtgttcaccttccagcccaacgggaagctggtgggccgctttggaggccgcggggccacagacagacactttgctggcccccactttgtggccgtgaacaacaagaatgagatcgtggtgacagacttccacaaccacagcgtgaaggtgtacagcgcagatggagagttcctgttcaagtttggcagccacggggagggcaatggccagttcaatgcccccactggagtggccgtggacagcaatggaaacatcatcgtggccgactggggcaacagccgcatccaggtgtttgacagcagcggcagcttcctgagctacatcaacaccagcgctgagcccctgtatggcccccagggcctggccctgaccagtgatggccacgtggtggtggctgatgctggcaaccactgcttcaaggcctaccgctacctgcagtag

SEQ ID NO: 174220 - DNA, 2235 bp, synthetic construct; identical to SEQ ID NO: 174219
  misc_feature 1..2235: note = Description of Artificial Sequence: Synthetic coding sequence
  source 1..2235: mol_type = other DNA

SEQ ID NO: 174221 - DNA, 2235 bp, synthetic construct; identical to SEQ ID NO: 174219
  misc_feature 1..2235: note = Description of Artificial Sequence: Synthetic coding sequence
  source 1..2235: mol_type = other DNA

SEQ ID NO: 174222 - DNA, 2229 bp, synthetic construct
  misc_feature 1..2229: note = Description of Artificial Sequence: Synthetic coding sequence
  source 1..2229: mol_type = other DNA
atggccaagcgggaggacagccctggccctgaggtgcagcccatggacaagcagttcctggtgtgcagcatctgcctggaccgctaccagtgccccaaggtgctgccctgcctgcacaccttctgtgagcgctgcctgcagaactacatcccagcccagagcctgaccctgagctgccctgtgtgccggcagaccagcatcctgcctgagcagggcgtgtctgccctgcagaacaacttcttcatcagcagcctgatggaggccatgcagcaggccccagatggagcccatgaccctgaggacccccaccccctgtctgtggtggccggccggcccctgagctgccccaaccacgagggcaagaccatggagttctactgtgaggcctgtgaaacagccatgtgtggagaatgtcgggccggggagcaccgggagcacggcaccgtgctgctgagagatgtggtggagcagcacaaggccgccctgcagaggcagctggaggccgtgcggggccgcctgccccagctgtctgctgccatcgccctggtgggcggcatcagccagcagctgcaggagaggaaggccgaggccctggcccagatctctgctgcctttgaggacctggagcaggccctgcagcagaggaagcaggccctggtgtctgacctggagaccatctgtggggccaagcagaaggtgctgcagagccagctggacaccctgcggcagggccaggagcacatcggcagcagctgcagctttgctgagcaggccctgcggctgggcagcgcccctgaggtgctgctggtgaggaagcacatgagggagcggctggccgccctggccgcccaggccttccctgagcggccccatgaaaatgcccagctggagctggtgctggaggtggatggcctgcggcgctctgtgctgaacctgggcgccctgctgaccaccagcgccacagcccatgaaacagtggccaccggggagggcctgcggcaggccctggtgggccagcctgccagcctgactgtgaccaccaaggacaaggatggccgcctggtgaggactggatctgctgagctgcgggcagagatcactggaccagatggcacccggctgcctgtgcctgtggtggaccacaagaatggcacctatgagctggtgtacacagccaggacagaaggagagctgctgctgtctgtgctgctgtatggccagcctgtgcggggcagccccttccgggtgcgggccctgcggcctggggacctgccccccagcccagatgatgtgaagagaagagtgaagagccctgggggccctggcagccacgtgcggcagaaggctgtgagaagacccagctccatgtacagcactggaggcaagaggaaggacaaccccattgaagatgagctggtgttccgggtgggcagccggggccgggagaagggggagttcaccaacctgcagggcgtgtctgctgccagcagcggccgcatcgtggtggccgacagcaacaaccagtgcatccaggtgttcagcaatgaaggccagttcaagttccgctttggagtgcggggccgcagccctggccagctgcagaggcccactggagtggccgtggacaccaacggggacatcatcgtggccgactatgacaaccgctgggtgtccatcttcagccctgagggcaagttcaagaccaagatcggggccggccgcctgatgggccccaagggcgtggccgtggacagaaatggccacatcatcgtggtggacaacaagagctgctgcgtgttcaccttccagcccaacgggaagctggtgggccgctttggaggccgcggggccacagacagacactttgctggcccccactttgtggccgtgaacaacaagaatgagatcgtggtgacagacttccacaaccacagcgtgaaggtgtacagcgcagatggagagttcctgttcaagtttggcagccacggggagggcaatggccagttcaatgcccccactggagtggccgtggacagcaatggaaacatcattgatgtgtgccgggccagcccctaccccagctacaccccaccccacccctgccagagcgccccccaccccccagcctggggccagaacagcctgccccaggacaggagccccagcagctgcctgcccaccaccctgtacaccctgacagaaacagccatcccccaccccccctactag

SEQ ID NO: 174223 - DNA, 1878 bp, synthetic construct
  misc_feature 1..1878: note = Description of Artificial Sequence: Synthetic coding sequence
  source 1..1878: mol_type = other DNA
atgaagaccatggagttctactgtgaggcctgtgaaacagccatgtgtggggagtgcagagctggggagcaccgggagcacggcaccgtgctgctgagagatgtggtggagcagcacaaggccgccctgcagaggcagctggaggccgtgcggggccgcctgccccagctgtctgctgccatcgccctggtgggcggcatcagccagcagctgcaggagaggaaggccgaggccctggcccagatctctgctgcctttgaggacctggagcaggccctgcagcagaggaagcaggccctggtgtctgacctggagaccatctgtggggccaagcagaaggtgctgcagagccagctggacaccctgcggcagggccaggagcacatcggcagcagctgcagctttgctgagcaggccctgcggctgggcagcgcccctgaggtgctgctggtgaggaagcacatgagggagcggctggccgccctggccgcccaggccttccctgagcggccccatgaaaatgcccagctggagctggtgctggaggtggatggcctgcggcgctctgtgctgaacctgggcgccctgctgaccaccagcgccacagcccacgagaccgtggccactggagagggcctgcggcaggccctggtgggccagcctgccagcctgactgtgaccaccaaggacaaggatggccgcctggtgaggacaggcagcgctgagctgcgggcagagatcaccggcccagatggcacccggctgcctgtgcctgtggtggaccacaagaatggcacctatgagctggtgtacacagccaggacagaaggagagctgctgctgtctgtgctgctgtatggccagcctgtgcggggcagccccttccgggtgcgggccctgcggcctggggacctgccccccagcccagatgatgtgaagagaagagtgaagagccctgggggccctggcagccacgtgcggcagaaggctgtgcggcggcccagctccatgtacagcactggaggcaagaggaaggacaaccccattgaagatgagctggtgttccgggtgggcagccggggccgggagaagggggagttcaccaacctgcagggcgtgtctgctgccagcagcggcagaattgtggtggccgacagcaacaaccagtgcatccaggtgttcagcaatgaaggccagttcaagttccgcttcggcgtgcggggccgcagccctggccagctgcagaggcccaccggggtggccgtggacaccaatggagacatcatcgtggccgactatgacaaccgctgggtgtccatcttcagccctgagggcaagttcaagaccaagattggagctggccgcctgatgggccccaagggcgtggccgtggacagaaatggccacatcatcgtggtggacaacaagagctgctgcgtgttcaccttccagcccaacgggaagctggtgggccgctttggaggccgcggggccacagacagacactttgctggcccccactttgtggccgtgaacaacaagaatgaaattgtggtgacagacttccacaaccacagcgtgaaggtgtacagcgcagatggagagttcctgttcaagtttggcagccatggagagggcaatggccagttcaatgcccccaccggggtggccgtggacagcaatggaaacatcatcgtggccgactggggcaacagccgcatccaggtgtttgacagcagcggcagcttcctgagctacatcaacaccagcgctgagcccctgtatggcccccagggcctggccctgaccagtgatggccacgtggtggtggctgatgctggcaaccactgcttcaaggcctaccgctacctgcagtag

SEQ ID NO: 174224 - DNA, 2001 bp, synthetic construct
  misc_feature 1..2001: note = Description of Artificial Sequence: Synthetic coding sequence
  source 1..2001: mol_type = other DNA
atggccaagcgggaggacagccctggccctgaggtgcagcccatggacaagcagttcctggtgtgcagcatctgcctggaccgctaccagtgccccaaggtgctgccctgcctgcacaccttctgtgagcgctgcctgcagaactacatcccagcccagagcctgaccctgagctgccctgtgtgccggcagaccagcatcctgcctgagcagggcgtgtctgccctgcagaacaacttcttcatcagcagcctgatggaggccatgcagcaggccccagatggagcccatgaccctgaggacccccaccccctgtctgtggtggccggccggcccctgagctgccccaaccacgagggcaagaccatggagttctactgtgaggcctgtgaaacagccatgtgtggagaatgtcgggccggggagcaccgggagcacggcaccgtgctgctgagagatgtggtggagcagcacaaggccgccctgcagaggcagctggaggccgtgcggggccgcctgccccagctgtctgctgccatcgccctggtgggcggcatcagccagcagctgcaggagaggaaggccgaggccctggcccagatctctgctgcctttgaggacctggagcaggccctgcagcagaggaagcaggccctggtgtctgacctggtggatggcctgcggcgctctgtgctgaacctgggcgccctgctgaccaccagcgccacagcccatgaaacagtggccaccggggagggcctgcggcaggccctggtgggccagcctgccagcctgactgtgaccaccaaggacaaggatggccgcctggtgaggactggatctgctgagctgcgggcagagatcactggaccagatggcacccggctgcctgtgcctgtggtggaccacaagaatggcacctatgagctggtgtacacagccaggacagaaggagagctgctgctgtctgtgctgctgtatggccagcctgtgcggggcagccccttccgggtgcgggccctgcggcctggggacctgccccccagcccagatgatgtgaagagaagagtgaagagccctgggggccctggcagccacgtgcggcagaaggctgtgagaagacccagctccatgtacagcactggaggcaagaggaaggacaaccccattgaagatgagctggtgttccgggtgggcagccggggccgggagaagggggagttcaccaacctgcagggcgtgtctgctgccagcagcggccgcatcgtggtggccgacagcaacaaccagtgcatccaggtgttcagcaatgaaggccagttcaagttccgctttggagtgcggggccgcagccctggccagctgcagaggcccactggagtggccgtggacaccaacggggacatcatcgtggccgactatgacaaccgctgggtgtccatcttcagccctgagggcaagttcaagaccaagatcggggccggccgcctgatgggccccaagggcgtggccgtggacagaaatggccacatcatcgtggtggacaacaagagctgctgcgtgttcaccttccagcccaacgggaagctggtgggccgctttggaggccgcggggccacagacagacactttgctggcccccactttgtggccgtgaacaacaagaatgagatcgtggtgacagacttccacaaccacagcgtgaaggtgtacagcgcagatggagagttcctgttcaagtttggcagccacggggagggcaatggccagttcaatgcccccactggagtggccgtggacagcaatggaaacatcatcgtggccgactggggcaacagccgcatccaggtgtttgacagcagcggcagcttcctgagctacatcaacaccagcgctgagcccctgtatggcccccagggcctggccctgaccagtgatggccacgtggtggtggctgatgctggcaaccactgcttcaaggcctaccgctacctgcagtag

SEQ ID NO: 174225 - DNA, 2226 bp, synthetic construct
  misc_feature 1..2226: note = Description of Artificial Sequence: Synthetic coding sequence
  source 1..2226: mol_type = other DNA
atggccaagcgggaggacagccctggccctgaggtgcagcccatggacaagcagttcctggtgtgcagcatctgcctggaccgctaccagtgccccaaggtgctgccctgcctgcacaccttctgtgagcgctgcctgcagaactacatcccagcccagagcctgaccctgagctgccctgtgtgccggcagaccagcatcctgcctgagcagggcgtgtctgccctgcagaacaacttcttcatcagcagcctgatggaggccatgcagcaggccccagatggagcccatgaccctgaggacccccaccccctgtctgtggtggccggccggcccctgagctgccccaaccacgagggcaagaccatggagttctactgtgaggcctgtgaaacagccatgtgtggagaatgtcgggccggggagcaccgggagcacggcaccgtgctgctgagagatgtggtggagcagcacaaggccgccctgcagaggcagctggaggccgtgcggggccgcctgccccagctgtctgctgccatcgccctggtgggcggcatcagccagcagctgcaggagaggaaggccgaggccctggcccagatctctgctgcctttgaggacctggagcaggccctgcagcagaggaagcaggccctggtgtctgacctggagaccatctgtggggccaagcagaaggtgctgcagagccagctggacaccctgcggcagggccaggagcacatcggcagcagctgcagctttgctgagcaggccctgcggctgggcagcgcccctgaggtgctgctggtgaggaagcacatgagggagcggctggccgccctggccgcccaggccttccctgagcggccccatgaaaatgcccagctggagctggtgctggaggtggatggcctgcggcgctctgtgctgaacctgggcgccctgctgaccaccagcgccacagcccatgaaacagtggccaccggggagggcctgcggcaggccctggtgggccagcctgccagcctgactgtgaccaccaaggacaaggatggccgcctggtgaggactggatctgctgagctgcgggcagagatcactggaccagatggcacccggctgcctgtgcctgtggtggaccacaagaatggcacctatgagctggtgtacacagccaggacagaaggagagctgctgctgtctgtgctgctgtatggccagcctgtgcggggcagccccttccgggtgcgggccctgcggcctggggacctgccccccagcccagatgatgtgaagagaagagtgaagagccctgggggccctggcagccacgtgcggcagaaggctgtgagaagacccagctccatgtacagcactggaggcaagaggaaggacaaccccattgaagatgagctggtgttccgggtgggcagccggggccgggagaagggggagttcaccaacctgcagggcgtgtctgctgccagcagcggccgcatcgtggtggccgacagcaacaaccagtgcatccaggtgttcagcaatgaaggccagttcaagttccgctttggagtgcggggccgcagccctggccagctgcagaggcccactggagtggccgtggacaccaacggggacatcatcgtggccgactatgacaaccgctgggtgtccatcttcagccctgagggcaagttcaagaccaagatcggggccggccgcctgatgggccccaagggcgtggccgtggacagaaatggccacatcatcgtggtggacaacaagagctgctgcgtgttcaccttccagcccaacgggaagctggtgggccgctttggaggccgcggggccacagacagacactttgctggcccccactttgtggccgtgaacaacaagaatgagatcgtggtgacagacttccacaaccacagcgtgaaggtgtacagcgcagatggagagttcctgttcaagtttggcagccacggggagggcaatggccagttcaatgcccccactggagtggccgtggacagcaatggaaacatcatcgtgtgccgggccagcccctaccccagctacaccccaccccacccctgccagagcgccccccaccccccagcctggggccagaacagcctgccccaggacaggagccccagcagctgcctgcccaccaccctgtacaccctgacagaaacagccatcccccaccccccctactag

SEQ ID NO: 174226 - DNA, 1278 bp, synthetic construct
  misc_feature 1..1278: note = Description of Artificial Sequence: Synthetic coding sequence
  source 1..1278: mol_type = other DNA
atggccagcggccagtttgtgaacaagctgcaggaggaggtgatctgccccatctgcctggacatcctgcagaagcctgtgaccatcgactgtggccacaacttctgcctgaagtgcatcacccagattggagagaccagctgtggcttcttcaagtgccccctgtgcaagacctctgtgaggaagaatgccatccgcttcaacagcctgctgaggaacctggtggagaagatccaggccctgcaggccagcgaggtgcagagcaagaggaaggaggccacctgccccaggcaccaggagatgttccactacttctgtgaagatgatggcaagttcctgtgctttgtgtgctgtgagagcaaggaccacaagagccacaacgtgtccctgattgaggaggccgcccagaactaccagggccagatccaggagcagatccaggtgctgcagcagaaggagaaggagaccgtgcaggtgaaggcccagggcgtgcaccgggtggatgtgttcacagaccaggtggagcacgagaagcagaggatcctgacagaatttgagctgctgcaccaggtgctggaggaggagaagaacttcctgctgagccgcatctactggctgggccacgagggcacagaagctgggaagcactacgtggccagcacagagccccagctgaatgacctgaagaagctggtggacagcctgaagaccaagcagaacatgccaccccggcagctgctggaggacatcaaggtggtgctgtgccgctctgaggagttccagttcctgaaccccacccctgtgcccctggagctggagaagaagctgtctgaggccaagagcagacatgacagcatcaccggcagcctgaagaagttcaaggaccagctgcaggccgacaggaagaaggatgaaaatcgcttcttcaagtccatgaacaagaatgacatgaagtcctggggcctgctgcagaagaacaaccacaagatgaacaagaccagcgagcccggcagcagcagcgctgggggccgcaccaccagcggcccccccaaccaccacagcagcgcccccagccacagcctcttccgggccagcagcgctgggaaggtgaccttccctgtgtgcctgctggccagctatgatgagatcagcggccagggcgccagcagccaggacaccaagacctttgatgtggccctgtctgaggagctgcacgccgccctgtctgagtggctgacagccatccgggcctggttctgtgaggtgcccagcagctag

SEQ ID NO: 174227 - DNA, 1278 bp, synthetic construct
  misc_feature 1..1278: note = Description of Artificial Sequence: Synthetic coding sequence
  source 1..1278: mol_type = other DNA
atggccagcggccagtttgtgaacaagctgcaggaggaggtgatctgccccatctgcctggacatcctgcagaagcctgtgaccatcgactgtggccacaacttctgcctgaagtgcatcacccagattggagagaccagctgtggcttcttcaagtgccccctgtgcaagacctctgtgaggaagaatgccatccgcttcaacagcctgctgaggaacctggtggagaagatccaggccctgcaggccagcgaggtgcagagcaagaggaaggaggccacctgccccaggcaccaggagatgttccactacttctgtgaagatgatggcaagttcctgtgctttgtgtgccgggagagcaaggaccacaagagccacaacgtgtccctgattgaggaggccgcccagaactaccagggccagatccaggagcagatccaggtgctgcagcagaaggagaaggagaccgtgcaggtgaaggcccagggcgtgcaccgggtggatgtgttcacagaccaggtggagcacgagaagcagaggatcctgacagaatttgagctgctgcaccaggtgctggaggaggagaagaacttcctgctgagccgcatctactggctgggccacgagggcacagaagctgggaagcactacgtggccagcacagagccccagctgaatgacctgaagaagctggtggacagcctgaagaccaagcagaacatgccaccccggcagctgctggagcccgcccagccccacctgcccaggtctgaggagttccagttcctgaaccccacccctgtgcccctggagctggagaagaagctgtctgaggccaagagcagacatgacagcatcaccggcagcctgaagaagttcaaggaccagctgcaggccgacaggaagaaggatgaaaatcgcttcttcaagtccatgaacaagaatgacatgaagtcctggggcctgctgcagaagaacaaccacaagatgaacaagaccagcgagcccggcagcagcagcgctgggggccgcaccaccagcggcccccccaaccaccacagcagcgcccccagccacagcctcttccgggccagcagcgctgggaaggtgaccttccctgtgtgcctgctggccagctatgatgagatcagcggccagggcgccagcagccaggacaccaagacctttgatgtggccctgtctgaggagctgcacgccgccctgtctgagtggctgacagccatccgggcctggttctgtgaggtgcccagcagctag

SEQ ID NO: 174228 - DNA, 1278 bp, synthetic construct
  misc_feature 1..1278: note = Description of Artificial Sequence: Synthetic coding sequence
  source 1..1278: mol_type = other DNA
atggccagcggccagtttgtgaacaagctgcaggaggaggtgatctgccccatctgcctggacatcctgcagaagcctgtgaccatcgactgtggccacaacttctgcctgaagtgcatcacccagattggagagaccagctgtggcttcttcaagtgccccctgtgcaagacctctgtgaggaagaatgccatccgcttcaacagcctgctgaggaacctggtggagaagatccaggccctgcaggccagcgaggtgcagagcaagaggaaggaggccacctgccccaggcaccaggagatgttccactacttctgtgaagatgatggcaagttcctgtgctttgtgtgccgggagagcaaggaccacaagagccacaacgtgtccctgattgaggaggccgcccagaactaccagggccagatccaggagcagatccaggtgctgcagcagaaggagaaggagaccgtgcaggtgaaggcccagggcgtgcaccgggtggatgtgttcacagaccaggtggagcacgagaagcagaggatcctgacagaatttgagctgctgcaccaggtgctggaggaggagaagaacttcctgctgagccgcatctactggctgggccacgagggcacagaagctgggaagcactacgtggccagcacagagccccagctgaatgacctgaagaagctggtggacagcctgaagaccaagcagaacatgccaccccggcagctgctggaggacatcaaggtggtgctgtgccgctctgaggagttccagttcctgaaccccacccctgtgcccctggagctggagaagaagctgtctgaggccaagagcagacatgacagcatcaccggcagcctgaagaagttcaaggaccagctgcaggccgacaggaagaaggatgaaaatcgcttcttcaagtccatgaacaagaatgacatgaagtcctggggcctgctgcagaagaacaaccacaagatgaacaagaccagcgagcccggcagcagcagcgctgggggccgcaccaccagcggcccccccaaccaccacagcagcgcccccagccacagcctcttccgggccagcagcgctgggaaggtgaccttccctgtgtgcctgctggccagctatgatgagatcagcggccagggcgccagcagccaggacaccaagacctttgatgtggccctgtctgaggagctgcacgccgccctgtctgagtggctgacagccatccgggcctggttctgtgaggtgcccagcagctag

SEQ ID NO: 174229 - DNA, 747 bp, synthetic construct
  misc_feature 1..747: note = Description of Artificial Sequence: Synthetic coding sequence
  source 1..747: mol_type = other DNA
atggccagcggccagtttgtgaacaagctgcaggaggaggtgatctgccccatctgcctggacatcctgcagaagcctgtgaccatcgactgtggccacaacttctgcctgaagtgcatcacccagattggagagaccagctgtggcttcttcaagtgccccctgtgcaagacctctgtgaggaagaatgccatccgcttcaacagcctgctgaggaacctggtggagaagatccaggccctgcaggccagcgaggtgcagagcaagaggaaggaggccacctgccccaggcaccaggagatgttccactacttctgtgaagatgatggcaagttcctgtgctttgtgtgccgggagagcaaggaccacaagagccacaacgtgtccctgattgaggaggccgcccagaactaccagggccagatccaggagcagatccaggtgctgcagcagaaggagaaggagaccgtgcaggtgaaggcccagggcgtgcaccgggtggatgtgttcacagaccaggtggagcacgagaagcagaggatcctgacagaatttgagctgctgcaccaggtgctggaggaggagaagaacttcctgctgagccgcatctactggctgggccacgagggcacagaagctgggaagcactacgtggccagcacagagccccagctgaatgacctgaagaagctggtggacagcctgaagaccaagcagaacatgccaccccggcagctgctggagtag

SEQ ID NO: 174230 - DNA, 1278 bp, synthetic construct
  misc_feature 1..1278: note = Description of Artificial Sequence: Synthetic coding sequence
  source 1..1278: mol_type = other DNA
atggccagcggccagtttgtgaacaagctgcaggaggaggtgatctgccccatctgcctggacatcctgcagaagcctgtgaccatcgactgtggccacaacttctgcctgaagtgcatcacccagattggagagaccagctgtggcttcttcaagtgccccctgtgcaagacctctgtgaggaagaatgccatccgcttcaacagcctgctgaggaacctggtggagaagatccaggccctgcaggccagcgaggtgcagagcaagaggaaggaggccacctgccccaggcaccaggagatgttccactacttctgtgaagatgatggcaagttcctgtgctttgtgtgccgggagagcaaggaccacaagagccacaacgtgtccctgattgaggaggccgcccagaactaccagggccagatccaggagcagatccaggtgctgcagcagaaggagaaggagaccgtgcaggtgaaggcccagggcgtgcaccgggtggatgtgttcacagaccaggtggagcacgagaagcagaggatcctgacagaatttgagctgctgcaccaggtgctggaggaggagaagaacttcctgctgagccgcatctactggctgggccacgagggcacagaagctgggaagcactacgtggccagcacagagccccagctgaatgacctgaagaagctggtggacagcctgaagaccaagcagaacatgccaccccggcagctgctggaggacatcaaggtggtgctgtgccgctctgaggagttccagttcctgaaccccacccctgtgcccctggagctggagaagaagctgtctgaggccaagagcagacatgacagcatcaccggcagcctgaagaagttcaaggaccagctgcaggccgacaggaagaaggatgaaaatcgcttcttcaagtccatgaacaagaatgacatgaagtcctggggcctgctgcagaagaacaaccacaagatgaacaagaccagcgagcccggcagcagcagcgctgggggccgcaccaccagcggcccccccaaccaccacagcagcgcccccagccacagcctcttccgggccagcagcgctgggaaggtgaccttccctgtgtgcctgctggccagctatgatgagatcagcggccagggcgccagcagccaggacaccaagacctttgatgtggccctgtctgaggagctgcacgccgccctgtctgagtggctgacagccatccgggcctggttctgcaaggtgcccagcagctag

SEQ ID NO: 174231 - DNA, 1278 bp, synthetic construct; identical to SEQ ID NO: 174228
  misc_feature 1..1278: note = Description of Artificial Sequence: Synthetic coding sequence
  source 1..1278: mol_type = other DNA

SEQ ID NO: 174232 - DNA, 1278 bp, synthetic construct; identical to SEQ ID NO: 174228
  misc_feature 1..1278: note = Description of Artificial Sequence: Synthetic coding sequence
  source 1..1278: mol_type = other DNA

SEQ ID NO: 174233 - DNA, 1278 bp, synthetic construct; identical to SEQ ID NO: 174228
  misc_feature 1..1278: note = Description of Artificial Sequence: Synthetic coding sequence
  source 1..1278: mol_type = other DNA

SEQ ID NO: 174234 - DNA, 1278 bp, synthetic construct
  misc_feature 1..1278: note = Description of Artificial Sequence: Synthetic coding sequence
  source 1..1278: mol_type = other DNA
atggccagcggccagtttgtgaacaagctgcaggaggaggtgatctgccccatctgcctggacatcctgcagaagcctgtgaccatcgactgtggccacaacttctgcctgaagtgcatcacccagattggagagaccagctgtggcttcttcaagtgccccctgtgcaagacctctgtgaggaagaatgccatccgcttcaacagcctgctgaggaacctggtggagaagatccaggccctgcaggccagcgaggtgcagagcaagaggaaggaggccacctgccccaggcaccaggagatgttccactacttctgtgaagatgatggcaagttcctgtgctttgtgtgccgggagagcaaggaccacaagagccacaacgtgtccctgattgaggaggccgcccagaactaccagggccagatccaggagcagatccaggtgctgcagcagaaggagaaggagaccgtgcaggtgaaggcccagggcgtgcaccgggtggatgtgttcacagaccaggtggagcacgagaagcagaggatcctgacagaatttgagctgctgcaccaggtgctggaggaggagaagaacttcctgctgagccgcatctactggctgggccacgagggcacagaagctgggaagcactacgtggccagcacagagccccagctgaatgacctgaagaagctgattgacagcctgaagaccaagcagaacatgccaccccggcagctgctggaggacatcaaggtggtgctgtgccgctctgaggagttccagttcctgaaccccacccctgtgcccctggagctggagaagaagctgtctgaggccaagagcagacatgacagcatcaccggcagcctgaagaagttcaaggaccagctgcaggccgacaggaagaaggatgaaaatcgcttcttcaagtccatgaacaagaatgacatgaagtcctggggcctgctgcagaagaacaaccacaagatgaacaagaccagcgagcccggcagcagcagcgctgggggccgcaccaccagcggcccccccaaccaccacagcagcgcccccagccacagcctcttccgggccagcagcgctgggaaggtgaccttccctgtgtgcctgctggccagctatgatgagatcagcggccagggcgccagcagccaggacaccaagacctttgatgtggccctgtctgaggagctgcacgccgccctgtctgagtggctgacagccatccgggcctggttctgcaaggtgcccagcagctag

SEQ ID NO: 174235 - DNA, 1278 bp, synthetic construct; identical to SEQ ID NO: 174228
  misc_feature 1..1278: note = Description of Artificial Sequence: Synthetic coding sequence
  source 1..1278: mol_type = other DNA

SEQ ID NO: 174236 - DNA, 1278 bp, synthetic construct; identical to SEQ ID NO: 174227
  misc_feature 1..1278: note = Description of Artificial Sequence: Synthetic coding sequence
  source 1..1278: mol_type = other DNA

SEQ ID NO: 174237 - DNA, 1278 bp, synthetic construct; identical to SEQ ID NO: 174230
  misc_feature 1..1278: note = Description of Artificial Sequence: Synthetic coding sequence
  source 1..1278: mol_type = other DNA

SEQ ID NO: 174238 - DNA, 1278 bp, synthetic construct; identical to SEQ ID NO: 174227
  misc_feature 1..1278: note = Description of Artificial Sequence: Synthetic coding sequence
  source 1..1278: mol_type = other DNA

SEQ ID NO: 174239 - DNA, 1278 bp, synthetic construct
  misc_feature 1..1278: note = Description of Artificial Sequence: Synthetic coding sequence
  source 1..1278: mol_type = other DNA
atggccagcggccagtttgtgaacaagctgcaggaggaggtgatctgccccatctgcctggacatcctgcagaagcctgtgaccatcgactgtggccacaacttctgcctgaagtgcatcacccagattggagagaccagctgtggcttcttcaagtgccccctgtgcaagacctctgtgaggaagaatgccatccgcttcaacagcctgctgaggaacctggtggagaagatccaggccctgcaggccagcgaggtgcagagcaagaggaaggaggccacctgccccaggcaccaggagatgttccactacttctgtgaagatgatggcaagttcctgtgctttgtgtgccgggagagcaaggaccacaagagccacaacgtgtccctgattgaggaggccgcccagaactaccagggccagatccaggagcagatccaggtgctgcagcagaaggagaaggagaccgtgcaggtgaaggcccagggcgtgcaccgggtggatgtgttcacagaccaggtggagcacgagaagcagaggatcctgacagaatttgagctgctgcaccaggtgctggaggaggagaagaacttcctgctgagccgcatctactggctgggccacgagggcacagaagctgggaagcactacgtggccagcacagagccccagctgaatgacctgaagaagctgattgacagcctgaagaccaagcagaacatgccaccccggcagctgctggagcccgcccagccccacctgcccaggtctgaggagttccagttcctgaaccccacccctgtgcccctggagctggagaagaagctgtctgaggccaagagcagacatgacagcatcaccggcagcctgaagaagttcaaggaccagctgcaggccgacaggaagaaggatgaaaatcgcttcttcaagtccatgaacaagaatgacatgaagtcctggggcctgctgcagaagaacaaccacaagatgaacaagaccagcgagcccggcagcagcagcgctgggggccgcaccaccagcggcccccccaaccaccacagcagcgcccccagccacagcctcttccgggccagcagcgctgggaaggtgaccttccctgtgtgcctgctggccagctatgatgagatcagcggccagggcgccagcagccaggacaccaagacctttgatgtggccctgtctgaggagctgcacgccgccctgtctgagtggctgacagccatccgggcctggttctgcaaggtgcccagcagctag

SEQ ID NO: 174240 - DNA, 1278 bp, synthetic construct
  misc_feature 1..1278: note = Description of Artificial Sequence: Synthetic coding sequence
  source 1..1278: mol_type = other DNA
atggccagcggccagtttgtgaacaagctgcaggaggaggtgatctgccccatctgcctggacatcctgcagaagcctgtgaccatcgactgtggccacaacttctgcctgaagtgcatcacccagattggagagaccagctgtggcttcttcaagtgccccctgtgcaagacctctgtgaggaagaatgccatccgcttcaacagcctgctgaggaacctggtggagaagatccaggccctgcaggccagcgaggtgcagagcaagaggaaggaggccacctgccccaggcaccaggagatgttccactacttctgtgaagatgatggcaagttcctgtgctttgtgtgctgtgagagcaaggaccacaagagccacaacgtgtccctgattgaggaggccgcccagaactaccagggccagatccaggagcagatccaggtgctgcagcagaaggagaaggagaccgtgcaggtgaaggcccagggcgtgcaccgggtggatgtgttcacagaccaggtggagcacgagaagcagaggatcctgacagaatttgagctgctgcaccaggtgctggaggaggagaagaacttcctgctgagccgcatctactggctgggccacgagggcacagaagctgggaagcactacgtggccagcacagagccccagctgaatgacctgaagaagctggtggacagcctgaagaccaagcagaacatgccaccccggcagctgctggagcccgcccagccccacctgcccaggtctgaggagttccagttcctgaaccccacccctgtgcccctggagctggagaagaagctgtctgaggccaagagcagacatgacagcatcaccggcagcctgaagaagttcaaggaccagctgcaggccgacaggaagaaggatgaaaatcgcttcttcaagtccatgaacaagaatgacatgaagtcctggggcctgctgcagaagaacaaccacaagatgaacaagaccagcgagcccggcagcagcagcgctgggggccgcaccaccagcggcccccccaaccaccacagcagcgcccccagccacagcctcttccgggccagcagcgctgggaaggtgaccttccctgtgtgcctgctggccagctatgatgagatcagcggccagggcgccagcagccaggacaccaagacctttgatgtggccctgtctgaggagctgcacgccgccctgtctgagtggctgacagccatccgggcctggttctgtgaggtgcccagcagctag

SEQ ID NO: 174241 - DNA, 1278 bp, synthetic construct; identical to SEQ ID NO: 174228
  misc_feature 1..1278: note = Description of Artificial Sequence: Synthetic coding sequence
  source 1..1278: mol_type = other DNA

SEQ ID NO: 174242 - DNA, 1278 bp, synthetic construct; identical to SEQ ID NO: 174227
  misc_feature 1..1278: note = Description of Artificial Sequence: Synthetic coding sequence
  source 1..1278: mol_type = other DNA

SEQ ID NO: 174243 - DNA, 1278 bp, synthetic construct; identical to SEQ ID NO: 174226
  misc_feature 1..1278: note = Description of Artificial Sequence: Synthetic coding sequence
  source 1..1278: mol_type = other DNA

SEQ ID NO: 174244 - DNA, 1278 bp, synthetic construct; identical to SEQ ID NO: 174234
  misc_feature 1..1278: note = Description of Artificial Sequence: Synthetic coding sequence
  source 1..1278: mol_type = other DNA

SEQ ID NO: 174245 - DNA, 1278 bp, synthetic construct
  misc_feature 1..1278: note = Description of Artificial Sequence: Synthetic coding sequence
  source 1..1278: mol_type = other DNA
atggccagcggccagtttgtgaacaagctgcaggaggaggtgatctgccccatctgcctggacatcctgcagaagcctgtgaccatcgactgtggccacaacttctgcctgaagtgcatcacccagattggagagaccagctgtggcttcttcaagtgccccctgtgcaagacctctgtgaggaagaatgccatccgcttcaacagcctgctgaggaacctggtggagaagatccaggccctgcaggccagcgaggtgcagagcaagaggaaggaggccacctgccccaggcaccaggagatgttccactacttctgtgaagatgatggcaagttcctgtgctttgtgtgccgggagagcaaggaccacaagagccacaacgtgtccctgattgaggaggccgcccagaactaccagggccagatccaggagcagatccaggtgctgcagcagaaggagaaggagaccgtgcaggtgaaggcccagggcgtgcaccgggtggatgtgttcacagaccaggtggagcacgagaagcagaggatcctgacagaatttgagctgctgcaccaggtgctggaggaggagaagaacttcctgctgagccgcatctactggctgggccacgagggcacagaagctgggaagcactacgtggccagcacagagccccagctgaatgacctgaagaagctggtggacagcctgaagaccaagcagaacatgccaccccggcagctgctggagcccgcccagccccacctgcccaggtctgaggagttccagttcctgaaccccacccctgtgcccctggagctggagaagaagctgtctgaggccaagagcagacatgacagcatcaccggcagcctgaagaagttcaaggaccagctgcaggccgacaggaagaaggatgaaaatcgcttcttcaagtccatgaacaagaatgacatgaagtcctggggcctgctgcagaagaacaaccacaagatgaacaagaccagcgagcccggcagcagcagcgctgggggccgcaccaccagcggcccccccaaccaccacagcagcgcccccagccacagcctcttccgggccagcagcgctgggaaggtgaccttccctgtgtgcctgctggccagctatgatgagatcagcggccagggcgccagcagccaggacaccaagacctttgatgtggccctgtctgaggagctgcacgccgccctgtctgagtggctgacagccatccgggcctggttctgcaaggtgcccagcagctag

SEQ ID NO: 174246 - DNA, 1278 bp, synthetic construct; identical to SEQ ID NO: 174228
  misc_feature 1..1278: note = Description of Artificial Sequence: Synthetic coding sequence
  source 1..1278: mol_type = other DNA

SEQ ID NO: 174247 - DNA, 1278 bp, synthetic construct; identical to SEQ ID NO: 174228
  misc_feature 1..1278: note = Description of Artificial Sequence: Synthetic coding sequence
  source 1..1278: mol_type = other DNA

SEQ ID NO: 174248 - DNA, 1962 bp, synthetic construct
  misc_feature 1..1962: note = Description of Artificial Sequence: Synthetic coding sequence
  source 1..1962: mol_type = other DNA
atggctgctgctgctgccagccacctgaacctggatgccctgcgggaggtgctggagtgccccatctgcatggagagcttcacagaggagcagctgcggcccaagctgctgcactgcggccacaccatctgccggcagtgcctggagaagctgctggccagcagcatcaatggagtgcgctgccccttctgcagcaagatcacccgcatcaccagcctgacccagctgacagacaacctgactgtgctgaagatcatcgacacagctggcctgtctgaggccgtgggcctgctgatgtgccgcagctgtggccgccgcctgccccggcagttctgccgcagctgtggcctggtgctgtgtgagccctgccgggaggccgaccaccagcccccaggccactgcaccctgcctgtgaaggaggccgctgaggagcggcggcgggactttggagagaagctgacccggctgcgggagctgatgggagagctgcagaggaggaaggccgccctggagggcgtgtccaaggacctgcaggcccgctacaaggctgtgctgcaggagtatggccacgaggagaggagagtgcaggatgagctggcccggagcaggaagttcttcaccggcagcctggccgaggtggagaagagcaacagccaggtggtggaggagcagagctacctgctgaacattgctgaggtgcaggccgtgagccgctgtgactacttcctggccaagatcaagcaggctgatgtggccctgctggaggagacagcagatgaggaggagcctgagctgacagccagcctgccccgggagctgaccctgcaggatgtggagctgctgaaggtgggccacgtgggccccctgcagatcggccaggccgtgaagaagcccaggacagtgaatgtggaggacagctgggccatggaggccacagccagcgctgccagcacctctgtgaccttccgggagatggacatgagccctgaggaggtggtggccagcccccgggccagccctgccaagcagaggggccctgaggccgccagcaacatccagcagtgcctcttcctgaagaagatgggcgccaagggcagcaccccaggcatgttcaacctgcctgtgtccctgtatgtgaccagccagggcgaggtgctggtggccgaccggggcaactaccgcatccaggtgttcaccaggaagggcttcctgaaggagatccgccgcagccccagcggcatcgacagctttgtgctgtccttcctgggcgctgacctgcccaacctgacccccctgtctgtggccatgaactgccagggcctcatcggcgtgacagacagctatgacaacagcctgaaggtgtacaccctggatggccactgtgtggcctgccacaggagccagctgagcaagccctggggcatcacagccctgcccagcggccagtttgtggtgacagatgtggagggcggcaagctgtggtgcttcaccgtggaccggggcagcggcgtggtgaagtacagctgcctgtgcagcgctgtgcggcccaagtttgtgacctgtgatgctgagggcaccgtgtacttcacccagggcctgggcctgaacctggagaaccggcagaatgagcaccacctggagggcggcttcagcatcggctctgtgggcccagatggccagctgggccggcagatcagccacttcttctctgaaaatgaagacttccgctgcatcgccggcatgtgtgtggatgcccggggggacctgattgtggccgacagcagcaggaaggagatcctgcacttccccaagggcggcggctacagcgtgctgatccgggagggcctgacctgccctgtgggcatcgccctgacccccaagggccagctgctggtgctggactgctgggaccactgcatcaagatctacagctaccacctgcggcgctacagcaccccctag

SEQ ID NO: 174249 - DNA, 522 bp, synthetic construct
  misc_feature 1..522: note = Description of Artificial Sequence: Synthetic coding sequence
  source 1..522: mol_type = other DNA
atggctgctgctgctgccagccacctgaacctggatgccctgcgggaggtgctggagtgccccatctgcatggagagcttcacagaggagcagctgcggcccaagctgctgcactgcggccacaccatctgccggcagtgcctggagaagctgctggccagcagcatcaatggagtgcgctgccccttctgcagcaagatcacccgcatcaccagcctgacccagctgacagacaacctgactgtgctgaagatcatcgacacagctggcctgtctgaggccgtgggcctgctgatgtgccgcagctgtggccgccgcctgccccggcagttctgccgcagctgtggcctggtgctgtgtgagccctgccgggaggccgaccaccagcccccaggccactgcaccctgcctgtgaaggaggccgctgaggagcggcggcgggactttggagagaagctgacccggctgcgggagctgatgggagagctgcagaggaggaaggccgccctggagggcgtgtag

SEQ ID NO: 174250 - DNA, 1962 bp, synthetic construct; identical to SEQ ID NO: 174248
  misc_feature 1..1962: note = Description of Artificial Sequence: Synthetic coding sequence
  source 1..1962: mol_type = other DNA

SEQ ID NO: 174251 - DNA, 3384 bp, synthetic construct
  misc_feature 1..3384: note = Description of Artificial Sequence: Synthetic coding sequence
  source 1..3384: mol_type = other DNA
atggctgaaaataaaggaggaggagaggccgagagcggcggcggcggcagcggcagcgcccctgtgacagctggagctgctggccctgctgcccaggaggccgagccccccctgacagctgtgctggtggaggaggaggaggaggagggcggccgggccggggctgagggcggggccgccggcccagatgatggcggcgtggccgccgccagcagcggcagcgcccaggccgccagcagccctgctgcctctgtgggcactggagtggccggcggcgctgtgtccaccccagccccagccccagccagcgccccagcccctggccccagcgctggccccccacctggccccccagccagcctgctggacacctgtgctgtgtgccagcagagcctgcagagcagaagagaggccgagcccaagctgctgccctgcctgcacagcttctgcctgcgctgcctgcctgagcctgagcggcagctgtctgtgcccatccctgggggcagcaatggagacatccagcaggtgggcgtcatccgctgccctgtgtgccggcaggagtgccggcagattgacctggtggacaactactttgtgaaggacaccagcgaggcccccagcagcagtgatgagaagtctgagcaggtgtgcaccagctgtgaagataatgccagcgctgtgggcttctgtgtggagtgtggggagtggctgtgcaagacctgcatcgaggcccaccagagggtgaagttcaccaaggaccacctgatcaggaagaaggaggatgtgtctgagagcgtgggcgccagcggccagaggcctgtgttctgccctgtgcacaagcaggagcagctgaagctgttctgtgagacctgtgaccggctgacctgccgggactgccagctgctggagcacaaggagcaccgctaccagttcctggaggaggccttccagaaccagaagggggccatcgagaacctgctggccaagctgctggagaagaagaactacgtgcactttgctgccacccaggtgcagaaccgcatcaaggaggtgaatgagaccaacaagagggtggagcaggagatcaaggtggccatcttcaccctcatcaatgagatcaacaagaagggcaagagcctgctgcagcagctggagaatgtgaccaaggagcggcagatgaagctgctgcagcagcagaatgacatcaccggcctgagccggcaggtgaagcacgtgatgaacttcaccaactgggccatcgccagcggcagcagcacagccctgctgtacagcaagaggctcatcaccttccagctgcggcacatcctgaaggcccgctgtgaccctgtgcctgctgccaacggggccatccgcttccactgtgaccccaccttctgggccaagaatgtggtgaacctgggcaacctggtgattgagagcaagccagcccctggctacaccccaaatgtggtggtgggccaggtgcccccaggcaccaaccacatcagcaagaccccaggccagatcaacctggcccagctgcggctgcagcacatgcagcagcaggtgtatgcccagaagcaccagcagctgcagcagatgaggatgcagcagcccccagcccctgtgcccaccaccaccaccaccacccagcagcacccccggcaggccgccccccagatgctgcagcagcagccccccaggctcatctctgtgcagaccatgcagaggggcaacatgaactgtggggccttccaggcccaccagatgaggctggcccagaatgctgcccgcatccctggcatccccaggcacagcggcccccagtacagcatgatgcagccccacctgcagaggcagcacagcaaccctggccatgctggccccttccctgtggtgtctgtgcacaacaccaccatcaaccccaccagccccaccacagccaccatggccaatgccaacagaggccccaccagccccagcgtgacagccatcgagctgatccccagcgtgaccaaccctgagaacctgcccagcctgcctgacatcccccccatccagctggaggatgctggcagcagcagcctggacaacctgctgagccgctacatcagcggcagccacctgcccccccagcccaccagcaccatgaaccccagccctggccccagcgccctgagccctggcagcagcggcctgagcaacagccacacccctgtgcggccccccagcaccagcagcacaggcagccggggcagctgtggcagcagcggccgcacagctgagaagaccagcctgtccttcaagagtgaccaggtgaaggtgaagcaggagcctggaacagaagatgagatctgcagcttctctggaggagtgaagcaggagaagacagaagatggaagaagaagtgcctgcatgctgagcagccctgagagcagcctgaccccacccctgagcaccaacctgcacctggagagcgagctggatgccctggccagcctggagaaccacgtgaagattgagcctgctgacatgaatgaaagctgcaagcagagcggcctgagcagcctggtgaatggcaagagccccatccgcagcctgatgcacaggtctgccagaattggaggagatggcaacaacaaggatgatgaccccaatgaagactggtgtgctgtgtgccagaatggaggagacctgctgtgctgtgagaagtgccccaaggtgttccacctgacctgccacgtgcccaccctgctgtccttccccagcggggactggatctgcaccttctgccgggacatcggcaagccagaggtggagtatgactgtgacaacctgcagcacagcaagaagggcaagacagcccagggcctgagccctgtggaccagaggaaatgtgagcggctgctgctgtacctgtactgccacgagctgagcattgagttccaggagcctgtgcctgccagcatccccaactactacaagatcatcaagaagcccatggacctgagcacagtgaagaagaagctgcagaagaagcacagccagcactaccagatcccagatgactttgtggctgatgtgcggctcatcttcaagaactgtgagcgcttcaatgagatgatgaaggtggtgcaggtgtatgctgacacccaggagatcaacctgaaggctgacagcgaggtggcccaggccggcaaggctgtggccctgtactttgaggacaagctgacagagatctacagcgacaggacctttgcccccctgcctgagtttgagcaggaggaggatgatggagaggtgacagaagattctgatgaggacttcatccagcccaggaggaagaggctgaagagtgatgagaggcctgtgcacatcaagtag

SEQ ID NO: 174252 - DNA, 3333 bp, synthetic construct
  misc_feature 1..3333: note = Description of Artificial Sequence: Synthetic coding sequence
  source 1..3333: mol_type = other DNA
atggctgaaaataaaggaggaggagaggccgagagcggcggcggcggcagcggcagcgcccctgtgacagctggagctgctggccctgctgcccaggaggccgagccccccctgacagctgtgctggtggaggaggaggaggaggagggcggccgggccggggctgagggcggggccgccggcccagatgatggcggcgtggccgccgccagcagcggcagcgcccaggccgccagcagccctgctgcctctgtgggcactggagtggccggcggcgctgtgtccaccccagccccagccccagccagcgccccagcccctggccccagcgctggccccccacctggccccccagccagcctgctggacacctgtgctgtgtgccagcagagcctgcagagcagaagagaggccgagcccaagctgctgccctgcctgcacagcttctgcctgcgctgcctgcctgagcctgagcggcagctgtctgtgcccatccctgggggcagcaatggagacatccagcaggtgggcgtcatccgctgccctgtgtgccggcaggagtgccggcagattgacctggtggacaactactttgtgaaggacaccagcgaggcccccagcagcagtgatgagaagtctgagcaggtgtgcaccagctgtgaagataatgccagcgctgtgggcttctgtgtggagtgtggggagtggctgtgcaagacctgcatcgaggcccaccagagggtgaagttcaccaaggaccacctgatcaggaagaaggaggatgtgtctgagagcgtgggcgccagcggccagaggcctgtgttctgccctgtgcacaagcaggagcagctgaagctgttctgtgagacctgtgaccggctgacctgccgggactgccagctgctggagcacaaggagcaccgctaccagttcctggaggaggccttccagaaccagaagggggccatcgagaacctgctggccaagctgctggagaagaagaactacgtgcactttgctgccacccaggtgcagaaccgcatcaaggaggtgaatgagaccaacaagagggtggagcaggagatcaaggtggccatcttcaccctcatcaatgagatcaacaagaagggcaagagcctgctgcagcagctggagaatgtgaccaaggagcggcagatgaagctgctgcagcagcagaatgacatcaccggcctgagccggcaggtgaagcacgtgatgaacttcaccaactgggccatcgccagcggcagcagcacagccctgctgtacagcaagaggctcatcaccttccagctgcggcacatcctgaaggcccgctgtgaccctgtgcctgctgccaacggggccatccgcttccactgtgaccccaccttctgggccaagaatgtggtgaacctgggcaacctggtgattgagagcaagccagcccctggctacaccccaaatgtggtggtgggccaggtgcccccaggcaccaaccacatcagcaagaccccaggccagatcaacctggcccagctgcggctgcagcacatgcagcagcaggtgtatgcccagaagcaccagcagctgcagcagatgaggatgcagcagcccccagcccctgtgcccaccaccaccaccaccacccagcagcacccccggcaggccgccccccagatgctgcagcagcagccccccaggctcatctctgtgcagaccatgcagaggggcaacatgaactgtggggccttccaggcccaccagatgaggctggcccagaatgctgcccgcatccctggcatccccaggcacagcggcccccagtacagcatgatgcagccccacctgcagaggcagcacagcaaccctggccatgctggccccttccctgtggtgtctgtgcacaacaccaccatcaaccccaccagccccaccacagccaccatggccaatgccaacagaggccccaccagccccagcgtgacagccatcgagctgatccccagcgtgaccaaccctgagaacctgcccagcctgcctgacatcccccccatccagctggaggatgctggcagcagcagcctggacaacctgctgagccgctacatcagcggcagccacctgcccccccagcccaccagcaccatgaaccccagccctggccccagcgccctgagccctggcagcagcggcctgagcaacagccacacccctgtgcggccccccagcaccagcagcacaggcagccggggcagctgtggcagcagcggccgcacagctgagaagaccagcctgtccttcaagagtgaccaggtgaaggtgaagcaggagcctggaacagaagatgagatctgcagcttctctggaggagtgaagcaggagaagacagaagatggaagaagaagtgcctgcatgctgagcagccctgagagcagcctgaccccacccctgagcaccaacctgcacctggagagcgagctggatgccctggccagcctggagaaccacgtgaagattgagcctgctgacatgaatgaaagctgcaagcagagcggcctgagcagcctggtgaatggcaagagccccatccgcagcctgatgcacaggtctgccagaattggaggagatggcaacaacaaggatgatgaccccaatgaagactggtgtgctgtgtgccagaatggaggagacctgctgtgctgtgagaagtgccccaaggtgttccacctgacctgccacgtgcccaccctgctgtccttccccagcggggactggatctgcaccttctgccgggacatcggcaagccagaggtggagtatgactgtgacaacctgcagcacagcaagaagggcaagacagcccagggcctgagccctgtggaccagaggaaatgtgagcggctgctgctgtacctgtactgccacgagctgagcattgagttccaggagcctgtgcctgccagcatccccaactactacaagatcatcaagaagcccatggacctgagcacagtgaagaagaagctgcagaagaagcacagccagcactaccagatcccagatgactttgtggctgatgtgcggctcatcttcaagaactgtgagcgcttcaatgaagctgacagcgaggtggcccaggccggcaaggctgtggccctgtactttgaggacaagctgacagagatctacagcgacaggacctttgcccccctgcctgagtttgagcaggaggaggatgatggagaggtgacagaggacagtgatgaggacttcatccagcccaggaggaagaggctgaagagtgatgagaggcctgtgcacatcaagtag

SEQ ID NO: 174253 - DNA, 2667 bp, synthetic construct
  misc_feature 1..2667: note = Description of Artificial Sequence: Synthetic coding sequence
  source 1..2667: mol_type = other DNA
tgaagcgtgggcgccagcggccagaggcctgtgttctgccctgtgcacaagcaggagcagctgaagctgttctgtgagacctgtgaccggctgacctgccgggactgccagctgctggagcacaaggagcaccgctaccagttcctggaggaggccttccagaaccagaagggggccatcgagaacctgctggccaagctgctggagaagaagaactacgtgcactttgctgccacccaggtgcagaaccgcatcaaggaggtgaatgagaccaacaagagggtggagcaggagatcaaggtggccatcttcaccctcatcaatgagatcaacaagaagggcaagagcctgctgcagcagctggagaatgtgaccaaggagcggcagatgaagctgctgcagcagcagaatgacatcaccggcctgagccggcaggtgaagcacgtgatgaacttcaccaactgggccatcgccagcggcagcagcacagccctgctgtacagcaagaggctcatcaccttccagctgcggcacatcctgaaggcccgctgtgaccctgtgcctgctgccaatggagccatccgcttccactgtgaccccaccttctgggccaagaatgtggtgaacctgggcaacctggtgattgagagcaagccagcccctggctacacccccaacgtggtggtgggccaggtgcccccaggcaccaaccacatcagcaagaccccaggccagatcaacctggcccagctgcggctgcagcacatgcagcagcaggtgtatgcccagaagcaccagcagctgcagcagatgaggatgcagcagcccccagcccctgtgcccaccaccaccaccaccacccagcagcacccccggcaggccgccccccagatgctgcagcagcagccccccaggctcatctctgtgcagaccatgcagaggggcaacatgaactgtggggccttccaggcccaccagatgaggctggcccagaatgctgcccgcatccctggcatccccaggcacagcggcccccagtacagcatgatgcagccccacctgcagaggcagcacagcaaccctggccacgccggccccttccctgtggtgtctgtgcacaacaccaccatcaaccccaccagccccaccacagccaccatggccaatgccaacagaggccccaccagccccagcgtgacagccatcgagctgatccccagcgtgaccaaccctgagaacctgcccagcctgcctgacatcccccccatccaggccaacgtggtgcccatgatgcacagctggtatgaatttggagcccgggagaagacccaggaccagaatgtgctggaggatgctggcagcagcagcctggacaacctgctgagccgctacatcagcggcagccacctgcccccccagcccaccagcaccatgaaccccagccctggccccagcgccctgagccctggcagcagcggcctgagcaacagccacacccctgtgcggccccccagcaccagcagcacaggcagccggggcagctgtggcagcagcggccgcacagctgagaagaccagcctgtccttcaagagtgaccaggtgaaggtgaagcaggagcccggcacagaagatgagatctgcagcttcagcggcggcgtgaagcaggagaagacagaagatggccgccgcagcgcctgcatgctgagcagccctgagagcagcctgaccccacccctgagcaccaacctgcacctggagagcgagctggatgccctggccagcctggagaaccacgtgaagattgagcctgctgacatgaatgaaagctgcaagcagagcggcctgagcagcctggtgaatggcaagagccccatccgcagcctgatgcacaggtctgccagaattggaggagatggcaacaacaaggatgatgaccccaatgaagactggtgtgctgtgtgccagaatggaggagacctgctgtgctgtgagaagtgccccaaggtgttccacctgacctgccacgtgcccaccctgctgtccttccccagcggggactggatctgcaccttctgccgggacatcggcaagccagaggtggagtatgactgtgacaacctgcagcacagcaagaagggcaagacagcccagggcctgagccctgtggaccagaggaaatgtgagcggctgctgctgtacctgtactgccacgagctgagcattgagttccaggagcctgtgcctgccagcatccccaactactacaagatcatcaagaagcccatggacctgagcacagtgaagaagaagctgcagaagaagcacagccagcactaccagatcccagatgactttgtggctgatgtgcggctcatcttcaagaactgtgagcgcttcaatgagatgatgaaggtggtgcaggtgtatgctgacacccaggagatcaacctgaaggctgacagcgaggtggcccaggccggcaaggctgtggccctgtactttgaggacaagctgacagagatctacagcgacaggacctttgcccccctgcctgagtttgagcaggaggaggatgatggagaggtgacagaggacagtgatgaggacttcatccagcccaggaggaagaggctgaagagtgatgagaggcctgtgcacatcaagtag

SEQ ID NO: 174254 - DNA, 2280 bp, synthetic construct
  misc_feature 1..2280: note = Description of Artificial Sequence: Synthetic coding sequence
  source 1..2280: mol_type = other DNA
atgaagctgctgcagcagcagaatgacatcaccggcctgagccggcaggtgaagcacgtgatgaacttcaccaactgggccatcgccagcggcagcagcacagccctgctgtacagcaagaggctcatcaccttccagctgcggcacatcctgaaggcccgctgtgaccctgtgcctgctgccaacggggccatccgcttccactgtgaccccaccttctgggccaagaatgtggtgaacctgggcaacctggtgattgagagcaagccagcccctggctacaccccaaatgtggtggtgggccaggtgcccccaggcaccaaccacatcagcaagaccccaggccagatcaacctggcccagctgcggctgcagcacatgcagcagcaggtgtatgcccagaagcaccagcagctgcagcagatgaggatgcagcagcccccagcccctgtgcccaccaccaccaccaccacccagcagcacccccggcaggccgccccccagatgctgcagcagcagccccccaggctcatctctgtgcagaccatgcagaggggcaacatgaactgtggggccttccaggcccaccagatgaggctggcccagaatgctgcccgcatccctggcatccccaggcacagcggcccccagtacagcatgatgcagccccacctgcagaggcagcacagcaaccctggccatgctggccccttccctgtggtgtctgtgcacaacaccaccatcaaccccaccagccccaccacagccaccatggccaatgccaacagaggccccaccagccccagcgtgacagccatcgagctgatccccagcgtgaccaaccctgagaacctgcccagcctgcctgacatcccccccatccaggccaacgtggtgcccatgatgcacagctggtatgaatttggagcccgggagaagacccaggaccagaatgtgctggaggatgctggcagcagcagcctggacaacctgctgagccgctacatcagcggcagccacctgcccccccagcccaccagcaccatgaaccccagccctggccccagcgccctgagccctggcagcagcggcctgagcaacagccacacccctgtgcggccccccagcaccagcagcacaggcagccggggcagctgtggcagcagcggccgcacagctgagaagaccagcctgtccttcaagagtgaccaggtgaaggtgaagcaggagcctggaacagaagatgagatctgcagcttctctggaggagtgaagcaggagaagacagaagatggaagaagaagtgcctgcatgctgagcagccctgagagcagcctgaccccacccctgagcaccaacctgcacctggagagcgagctggatgccctggccagcctggagaaccacgtgaagattgagcctgctgacatgaatgaaagctgcaagcagagcggcctgagcagcctggtgaatggcaagagccccatccgcagcctgatgcacaggtctgccagaattggaggagatggcaacaacaaggatgatgaccccaatgaagactggtgtgctgtgtgccagaatggaggagacctgctgtgctgtgagaagtgccccaaggtgttccacctgacctgccacgtgcccaccctgctgtccttccccagcggggactggatctgcaccttctgccgggacatcggcaagccagaggtggagtatgactgtgacaacctgcagcacagcaagaagggcaagacagcccagggcctgagccctgtggaccagaggaaatgtgagcggctgctgctgtacctgtactgccacgagctgagcattgagttccaggagcctgtgcctgccagcatccccaactactacaagatcatcaagaagcccatggacctgagcacagtgaagaagaagctgcagaagaagcacagccagcactaccagatcccagatgactttgtggctgatgtgcggctcatcttcaagaactgtgagcgcttcaatgagatgatgaaggtggtgcaggtgtatgctgacacccaggagatcaacctgaaggctgacagcgaggtggcccaggccggcaaggctgtggccctgtactttgaggacaagctgacagagatctacagcgacaggacctttgcccccctgcctgagtttgagcaggaggaggatgatggagaggtgacagaagattctgatgaggacttcatccagcccaggaggaagaggctgaagagtgatgagaggcctgtgcacatcaagtag

SEQ ID NO: 174255 - DNA, 2529 bp, synthetic construct
  misc_feature 1..2529: note = Description of Artificial Sequence: Synthetic coding sequence
  source 1..2529: mol_type = other DNA
atgtgtggcagcgagcgcatcctgcaggccggcaacatcctggagatccgggtgggccaggccggggcccggcgggtggccaccatgaccagccctgtgctggtggacatccgggaggaggtgacctgccccatctgcctggagctgctgacagagcccctgagcattgactgtggccacagcttctgccaggcctgcatcacccccaacggccgggagagcgtcatcggccaggagggggagaggagctgccctgtgtgccagaccagctaccagcccggcaacctgcggcccaacagacacctggccaacatcgtgcggcggctgcgggaggtggtgctgggccctgggaagcagctgaaggctgtgctgtgtgccgaccacggggagaagctgcagctgttctgccaggaggatggcaaggtgatctgctggctgtgtgagaggagccaggagcaccggggccaccacaccttcctggtggaggaggtggcccaggagtaccaggagaagttccaggagagcctgaagaagctgaagaatgaggagcaggaggccgagaagctgacagccttcatccgggagaagaagacctcctggaagaaccagatggagcctgagcgctgccgcatccagacagagttcaaccagctgaggaacatcctggacagagtggagcagcgggagctgaagaagctggagcaggaggagaagaagggcctgcgcatcatcgaggaggccgagaatgacctggtgcaccagacccagagcctgcgggagctgatcagtgacctggagcggcgctgccagggcagcaccatggagctgctgcaggatgtgtctgatgtgacagagaggtctgagttctggaccctgaggaagccagaggccctgcccaccaagctgcgctccatgttccgggccccagacctgaagaggatgctgcgggtgtgccgggagctgacagatgtgcagagctactgggccatccagggcagcctgacccggcgggagcggcgggccagcggcgtgaggaccaggaggagccagggcagcagcgccatggccagcaagatcctgctgaatgtgcaggaggaggtgacctgccccatctgcctggagctgctgacagagcccctgagcctggactgtggccacagcctgtgccgggcctgcatcaccgtgagcaacaaggaggccgtgacctccatgggcggcaagagcagctgccctgtgtgtggcatctcctacagctttgagcacctgcaggccaaccagcacctggccaacatcgtggagcggctgaaggaggtgaagctgagcccagacaacgggaagaagagggacctgtgtgaccaccacggggagaagctgctgctcttctgcaaggaggacaggaaggtgatctgctggctgtgtgagaggagccaggagcaccggggccaccacacagtgctgacagaggaggtgttcaaggagtgccaggagaagctgcaggccgtgctgaagaggctgaagaaggaggaggaggaggccgagaagctggaggccgacatccgggaggagaagacctcctggaagtaccaggtgcagacagagcggcagaggatccagacagaatttgaccagctgcggagcatcctgaacaatgaggagcagcgggagctgcagaggctggaggaggaggagaagaagaccctggacaagtttgctgaggccgaggatgagctggtgcagcagaagcagctggtgcgggagctgatcagtgatgtggagtgccgcagccagtggagcaccatggagctgctgcaggacatgagcggcatcatgaagtggagcgagatctggaggctgaagaagcccaagatggtgtccaagaagctgaagacagtgttccacgccccagacctgagcaggatgctgcagatgttccgggagctgacagctgtgcgctgctactgggtggatgtgaccctgaacagcgtgaacctgaacctgaacctggtgctgtctgaggaccagaggcaggtgatctctgtgcccatctggcccttccagtgctacaactacggcgtgctgggcagccagtacttcagcagcggcaagcactactgggaggtggatgtgtccaagaagacagcctggatcctgggcgtgtactgcaggacctacagccgccacatgaagtatgtggtgagaagatgtgccaaccggcagaacctgtacaccaagtaccggcccctgtttggctactgggtgattggcctgcagaacaagtgcaagtatggagtgtttgaggagagcctgagcagtgaccctgaggtgctgaccctgtccatggctgtgcccccctgccgggtgggcgtcttcctggactatgaagctggcatcgtgtccttcttcaacgtgaccagccacggcagcctcatctacaagttcagcaagtgctgcttcagccagcctgtgtacccctacttcaacccctggaactgcccagcccccatgaccctgtgcccccccagcagctag

SEQ ID NO: 174256 - DNA, 1467 bp, synthetic construct
  misc_feature 1..1467: note = Description of Artificial Sequence: Synthetic coding sequence
  source 1..1467: mol_type = other DNA
atggccagcaagatcctgctgaatgtgcaggaggaggtgacctgccccatctgcctggagctgctgacagagcccctgagcctggactgtggccacagcctgtgccgggcctgcatcaccgtgagcaacaaggaggccgtgacctccatgggcggcaagagcagctgccctgtgtgtggcatctcctacagctttgagcacctgcaggccaaccagcacctggccaacatcgtggagcggctgaaggaggtgaagctgagcccagacaacgggaagaagagggacctgtgtgaccaccacggggagaagctgctgctcttctgcaaggaggacaggaaggtgatctgctggctgtgtgagaggagccaggagcaccggggccaccacacagtgctgacagaggaggtgttcaaggagtgccaggagaagctgcaggccgtgctgaagaggctgaagaaggaggaggaggaggccgagaagctggaggccgacatccgggaggagaagacctcctggaagtaccaggtgcagacagagcggcagaggatccagacagaatttgaccagctgcggagcatcctgaacaatgaggagcagcgggagctgcagaggctggaggaggaggagaagaagaccctggacaagtttgctgaggccgaggatgagctggtgcagcagaagcagctggtgcgggagctgatcagtgatgtggagtgccgcagccagtggagcaccatggagctgctgcaggacatgagcggcatcatgaagtggagcgagatctggaggctgaagaagcccaagatggtgtccaagaagctgaagacagtgttccacgccccagacctgagcaggatgctgcagatgttccgggagctgacagctgtgcgctgctactgggtggatgtgaccctgaacagcgtgaacctgaacctgaacctggtgctgtctgaggaccagaggcaggtgatctctgtgcccatctggcccttccagtgctacaactacggcgtgctgggcagccagtacttcagcagcggcaagcactactgggaggtggatgtgtccaagaagacagcctggatcctgggcgtgtactgcaggacctacagccgccacatgaagtatgtggtgagaagatgtgccaaccggcagaacctgtacaccaagtaccggcccctgtttggctactgggtgattggcctgcagaacaagtgcaagtatggagtgtttgaggagagcctgagcagtgaccctgaggtgctgaccctgtccatggctgtgcccccctgccgggtgggcgtcttcctggactatgaagctggcatcgtgtccttcttcaacgtgaccagccacggcagcctcatctacaagttcagcaagtgctgcttcagccagcctgtgtacccctacttcaacccctggaactgcccagcccccatgaccctgtgcccccccagcagctag

SEQ ID NO: 174257 - DNA, 1467 bp, synthetic construct; identical to SEQ ID NO: 174256
  misc_feature 1..1467: note = Description of Artificial Sequence: Synthetic coding sequence
  source 1..1467: mol_type = other DNA

SEQ ID NO: 174258 - DNA, 1467 bp, synthetic construct; identical to SEQ ID NO: 174256
  misc_feature 1..1467: note = Description of Artificial Sequence: Synthetic coding sequence
  source 1..1467: mol_type = other DNA

SEQ ID NO: 174259 - DNA, 2187 bp, synthetic construct
  misc_feature 1..2187: note = Description of Artificial Sequence: Synthetic coding sequence
  source 1..2187: mol_type = other DNA
atgtctgagagcggggagatgtctgaatttggctacatcatggagctgattgccaagggcaaggtgaccatcaagaacatcgagcgggagctgatctgcccagcctgcaaggagctgttcacccaccccctcatcctgccctgccagcacagcatctgccacaagtgtgtgaaggagctgctgctgaccctggatgacagcttcaatgatgtgggcagtgacaacagcaaccagagcagcccccggctgcggctgcccagccccagcatggacaagattgaccgcatcaacagacctggctggaagaggaacagcctgacccccaggaccaccgtcttcccctgccccggctgtgaacatgatgtggacctgggggagcggggcatcaatggcctcttcaggaacttcaccctggagaccatcgtggagcgctaccggcaggccgcccgggccgccacagccatcatgtgtgacctgtgcaagcccccaccccaggagagcaccaagagctgcatggactgcagcgccagctactgcaatgaatgcttcaagatccaccacccctggggcaccatcaaggcccagcacgagtatgtgggccccaccaccaacttccggcccaagatcctgatgtgcccagagcatgaaacagagcgcatcaacatgtactgtgagctgtgccggcggcctgtgtgccacctgtgcaagctgggcggcaaccacgccaaccaccgggtgaccaccatgagcagcgcctacaagaccctgaaggagaagctgagcaaggacatcgactacctgattggcaaggagagccaggtgaagagccagatcagcgagctgaacctgctgatgaaggagacagaatgtaatggagagcgggccaaggaggaggccatcacccactttgagaagctgtttgaggtgctggaggagaggaagagctctgtgctgaaggccatcgacagcagcaagaagctgcggctggacaagttccagacccagatggaggagtaccagggcctgctggagaacaacggcctggtgggctacgcccaggaggtgctgaaggagacagaccagagctgctttgtgcagacagccaagcagctgcacctgcgcatccagaaggccacagagagcctgaagagcttccggcctgctgcccagaccagctttgaggactatgtggtgaacaccagcaagcagacagagctgctgggggagctgtccttcttcagcagcggcattgatgtgcctgagatcaatgaggagcagagcaaggtgtacaacaatgccctgatcaactggcaccaccctgagaaggacaaggctgacagctatgtgctggagtacaggaagatcaacagagatgatgagatgtcctggaatgaaattgaggtgtgtggcaccagcaagatcatccaggacctggagaacagcagcacctacgccttccgggtgcgggcctacaagggcagcatctgcagcccctgcagccgggagctgatcctgcacaccccaccagcccctgtgttctccttcctgtttgatgagaagtgtggctacaacaatgagcacctgctgctgaacctgaagagggacagagtggagagcagagctggcttcaacctgctgctggccgctgagcgcatccaggtgggctactacaccagcctggactacatcatcggggacaccggcatcaccaagggcaagcacttctgggccttccgggtggagccctacagctacctggtgaaggtgggcgtggccagcagtgacaagctgcaggagtggctgcggagccccagagatgctgtgagccccaggtatgagcaggacagcggccatgacagcggctctgaagatgcctgctttgacagcagccagcccttcaccctggtgaccatcggcatgcagaagttcttcatccccaagagccccaccagcagcaatgaacctgagaacagagtgctgcccatgcccaccagcatcggcatcttcctggactgtgacaagggcaaggtggacttctatgacatggaccagatgaagtgcctgtatgagcggcaggtggactgcagccacaccctgtacccagcctttgccctgatgggcagcggcggcatccagctggaggagcccatcacagccaagtacctggagtaccaggaggacatgtag

SEQ ID NO: 174260 - DNA, 186 bp, synthetic construct
  misc_feature 1..186: note = Description of Artificial Sequence: Synthetic coding sequence
  source 1..186: mol_type = other DNA
atgtctgagagcggggagatgtctgaatttggctacatcatggagctgattgccaagggcaaggccagcgccatgggcctgcagcagacccatgagcacagccggctgaccagcaaaggaggagaggcccgctgcccctttgagatcagcgaggtgggcaagcagagcctgcccaggagaacatag

SEQ ID NO: 174261 - DNA, 183 bp, synthetic construct
  misc_feature 1..183: note = Description of Artificial Sequence: Synthetic coding sequence
  source 1..183: mol_type = other DNA
atgtctgagagcggggagatgtctgaatttggctacatcatggagctgattgccaagggcaagatgccagactggaggcggggctaccgctgccggcagggctgcggcaagaccacagagctggccacagccacagacttcagccagacaggcaacaagagcggcaagcacttcaagacctag

SEQ ID NO: 174262 - DNA, 2895 bp, synthetic construct
  misc_feature 1..2895: note = Description of Artificial Sequence: Synthetic coding sequence
  source 1..2895: mol_type = other DNA
atggatgagcagagcgtggagagcattgctgaggtgttccgctgcttcatctgcatggagaagctgagagatgcccggctgtgcccccactgcagcaagctgtgctgcttcagctgcatccgccgctggctgacagagcagagggcccagtgcccccactgccgggcccccctgcagctgcgggagctggtgaactgccgctgggccgaggaggtgacccagcagctggacaccctgcagctgtgcagcctgaccaagcatgaagaaaatgagaaggacaagtgtgagaaccaccacgagaagctgtctgtgttctgctggacctgcaagaagtgcatctgccaccagtgtgccctgtggggcggcatgcacggcggccacaccttcaagcccctggccgagatctatgagcagcacgtgaccaaggtgaatgaggaggtggccaagctgcggcggcggctgatggagctgatcagcctggtgcaggaggtggagagaaatgtggaggccgtgagaaatgccaaggatgagcgggtgcgggagatcagaaatgctgtggagatgatgattgcccggctggacacccagctgaagaacaagctgatcaccctgatgggccagaagaccagcctgacccaggagacagagctgctggagagcctgctgcaggaggtggagcaccagctgcggagctgcagcaagtctgagctgatcagcaagagcagcgagatcctgatgatgttccagcaggtgcacaggaagcccatggccagctttgtgaccacccctgtgcccccagacttcaccagcgagctggtgcccagctatgacagcgccacctttgtgctggagaacttcagcaccctgcggcagagagctgaccctgtgtacagcccccccctgcaggtgtctggcctgtgctggaggctgaaggtgtacccagatggaaatggagtggtgcggggctactacctgagcgtcttcctggagctgtctgctggcctgcctgagaccagcaaatatgagtacagagtggagatggtgcaccagagctgcaatgaccccaccaagaacatcatccgggagtttgccagtgactttgaggtgggggagtgctggggctacaaccgcttcttccggctggacctgctggccaatgaaggctacctgaacccccagaatgacaccgtcatcctgcgcttccaggtgcgcagccccaccttcttccagaagagccgggaccagcactggtacatcacccagctggaggccgcccagaccagctacatccagcagatcaacaacctgaaggagcggctgaccatcgagctgagcaggacccagaagagccgggacctgagccccccagacaaccacctgagcccccagaatgatgatgccctggagacccgggccaagaagagcgcctgcagcgacatgctgctggagggcggccccaccacagcctctgtgcgggaggccaaggaggatgaagaagatgaggagaagatccagaatgaagactaccaccacgagctgagtgatggagacctggacctggacctggtgtatgaagatgaggtgaaccagctggatggcagcagcagcagcgccagcagcacagccaccagcaacacagaggagaatgacattgatgaggagaccatgtctggagaaaatgatgtggagtacaacaacatggagctggaggagggggagctgatggaggatgctgctgctgctggccctgctggcagcagccacggctacgtgggcagcagcagccgcatcagcaggaggacccacctgtgcagcgctgccaccagcagcctgctggacatcgaccccctcatcctgatccacctgctggacctgaaggacaggagcagcattgagaacctgtggggcctgcagccccggcccccagccagcctgctgcagcccacagccagctacagcaggaaggacaaggaccagaggaagcagcaggccatgtggagggtgcccagcgacctgaagatgctgaagaggctgaagacccagatggccgaggtgcgctgcatgaagacagatgtgaagaacaccctgtctgagatcaagagcagcagcgctgccagcggggacatgcagaccagcctcttctctgctgaccaggccgccctggccgcctgtggcacagaaaattctggccgcctgcaggacctgggcatggagctgctggccaagagctctgtggccaactgctacatccggaacagcaccaacaagaagagcaacagccccaagccagcccggagctctgtggccggcagcctgagcctgcggcgggctgtggaccccggggagaacagccgcagcaaaggagactgccagaccctgtctgagggcagccctggcagcagccagagcggcagccgccacagcagcccccgggccctgattcatggcagcatcggggacatcctgcccaagacagaggaccggcagtgcaaggccctggacagtgatgctgtggtggtggccgtgttcagcggcctgcctgctgtggagaagaggaggaagatggtgaccctgggcgccaatgccaagggcggccacctggagggcctgcagatgacagacctggagaacaacagcgagactggagagctgcagcctgtgctgcctgagggcgccagcgctgcccctgaggagggcatgagcagtgacagcgacattgaatgtgacacagaaaatgaggagcaggaggagcacacctctgtgggcggcttccatgacagcttcatggtgatgacccagcccccagatgaggacacccacagcagcttcccagatggagagcagatcggccctgaggacctgtccttcaacacagatgagaacagcggccgctag

SEQ ID NO: 174263 - DNA, 2412 bp, synthetic construct
  misc_feature 1..2412: note = Description of Artificial Sequence: Synthetic coding sequence
  source 1..2412: mol_type = other DNA
atgcacggcggccacaccttcaagcccctggccgagatctatgagcagcacgtgaccaaggtgaatgaggaggtggccaagctgcggcggcggctgatggagctgatcagcctggtgcaggaggtggagagaaatgtggaggccgtgagaaatgccaaggatgagcgggtgcgggagatcagaaatgctgtggagatgatgattgcccggctggacacccagctgaagaacaagctgatcaccctgatgggccagaagaccagcctgacccaggagacagagctgctggagagcctgctgcaggaggtggagcaccagctgcggagctgcagcaagtctgagctgatcagcaagagcagcgagatcctgatgatgttccagcaggtgcacaggaagcccatggccagctttgtgaccacccctgtgcccccagacttcaccagcgagctggtgcccagctatgacagcgccacctttgtgctggagaacttcagcaccctgcggcagagagctgaccctgtgtacagcccccccctgcaggtgtctggcctgtgctggaggctgaaggtgtacccagatggaaatggagtggtgcggggctactacctgagcgtcttcctggagctgtctgctggcctgcctgagaccagcaaatatgagtacagagtggagatggtgcaccagagctgcaatgaccccaccaagaacatcatccgggagtttgccagtgactttgaggtgggggagtgctggggctacaaccgcttcttccggctggacctgctggccaatgaaggctacctgaacccccagaatgacaccgtcatcctgcgcttccaggtgcgcagccccaccttcttccagaagagccgggaccagcactggtacatcacccagctggaggccgcccagaccagctacatccagcagatcaacaacctgaaggagcggctgaccatcgagctgagcaggacccagaagagccgggacctgagccccccagacaaccacctgagcccccagaatgatgatgccctggagacccgggccaagaagagcgcctgcagcgacatgctgctggagggcggccccaccacagcctctgtgcgggaggccaaggaggatgaagaagatgaggagaagatccagaatgaagactaccaccacgagctgagtgatggagacctggacctggacctggtgtatgaagatgaggtgaaccagctggatggcagcagcagcagcgccagcagcacagccaccagcaacacagaggagaatgacattgatgaggagaccatgtctggagaaaatgatgtggagtacaacaacatggagctggaggagggggagctgatggaggatgctgctgctgctggccctgctggcagcagccacggctacgtgggcagcagcagccgcatcagcaggaggacccacctgtgcagcgctgccaccagcagcctgctggacatcgaccccctcatcctgatccacctgctggacctgaaggacaggagcagcattgagaacctgtggggcctgcagccccggcccccagccagcctgctgcagcccacagccagctacagcaggaaggacaaggaccagaggaagcagcaggccatgtggagggtgcccagcgacctgaagatgctgaagaggctgaagacccagatggccgaggtgcgctgcatgaagacagatgtgaagaacaccctgtctgagatcaagagcagcagcgctgccagcggggacatgcagaccagcctcttctctgctgaccaggccgccctggccgcctgtggcacagaaaattctggccgcctgcaggacctgggcatggagctgctggccaagagctctgtggccaactgctacatccggaacagcaccaacaagaagagcaacagccccaagccagcccggagctctgtggccggcagcctgagcctgcggcgggctgtggaccccggggagaacagccgcagcaaaggagactgccagaccctgtctgagggcagccctggcagcagccagagcggcagccgccacagcagcccccgggccctgattcatggcagcatcggggacatcctgcccaagacagaggaccggcagtgcaaggccctggacagtgatgctgtggtggtggccgtgttcagcggcctgcctgctgtggagaagaggaggaagatggtgaccctgggcgccaatgccaagggcggccacctggagggcctgcagatgacagacctggagaacaacagcgagactggagagctgcagcctgtgctgcctgagggcgccagcgctgcccctgaggaggacacccacagcagcttcccagatggagagcagatcggccctgaggacctgtccttcaacacagatgaaaattctggaagatag

SEQ ID NO: 174264 - DNA, 2793 bp, synthetic construct
  misc_feature 1..2793: note = Description of Artificial Sequence: Synthetic coding sequence
  source 1..2793: mol_type = other DNA
atggatgagcagagcgtggagcgctggctgacagagcagagggcccagtgcccccactgccgggcccccctgcagctgcgggagctggtgaactgccgctgggccgaggaggtgacccagcagctggacaccctgcagctgtgcagcctgaccaagcatgaagaaaatgagaaggacaagtgtgagaaccaccacgagaagctgtctgtgttctgctggacctgcaagaagtgcatctgccaccagtgtgccctgtggggcggcatgcacggcggccacaccttcaagcccctggccgagatctatgagcagcacgtgaccaaggtgaatgaggaggtggccaagctgcggcggcggctgatggagctgatcagcctggtgcaggaggtggagagaaatgtggaggccgtgagaaatgccaaggatgagcgggtgcgggagatcagaaatgctgtggagatgatgattgcccggctggacacccagctgaagaacaagctgatcaccctgatgggccagaagaccagcctgacccaggagacagagctgctggagagcctgctgcaggaggtggagcaccagctgcggagctgcagcaagtctgagctgatcagcaagagcagcgagatcctgatgatgttccagcaggtgcacaggaagcccatggccagctttgtgaccacccctgtgcccccagacttcaccagcgagctggtgcccagctatgacagcgccacctttgtgctggagaacttcagcaccctgcggcagagagctgaccctgtgtacagcccccccctgcaggtgtctggcctgtgctggaggctgaaggtgtacccagatggaaatggagtggtgcggggctactacctgagcgtcttcctggagctgtctgctggcctgcctgagaccagcaaatatgagtacagagtggagatggtgcaccagagctgcaatgaccccaccaagaacatcatccgggagtttgccagtgactttgaggtgggggagtgctggggctacaaccgcttcttccggctggacctgctggccaatgaaggctacctgaacccccagaatgacaccgtcatcctgcgcttccaggtgcgcagccccaccttcttccagaagagccgggaccagcactggtacatcacccagctggaggccgcccagaccagctacatccagcagatcaacaacctgaaggagcggctgaccatcgagctgagcaggacccagaagagccgggacctgagccccccagacaaccacctgagcccccagaatgatgatgccctggagacccgggccaagaagagcgcctgcagcgacatgctgctggagggcggccccaccacagcctctgtgcgggaggccaaggaggatgaagaagatgaggagaagatccagaatgaagactaccaccacgagctgagtgatggagacctggacctggacctggtgtatgaagatgaggtgaaccagctggatggcagcagcagcagcgccagcagcacagccaccagcaacacagaggagaatgacattgatgaggagaccatgtctggagaaaatgatgtggagtacaacaacatggagctggaggagggggagctgatggaggatgctgctgctgctggccctgctggcagcagccacggctacgtgggcagcagcagccgcatcagcaggaggacccacctgtgcagcgctgccaccagcagcctgctggacatcgaccccctcatcctgatccacctgctggacctgaaggacaggagcagcattgagaacctgtggggcctgcagccccggcccccagccagcctgctgcagcccacagccagctacagcaggaaggacaaggaccagaggaagcagcaggccatgtggagggtgcccagcgacctgaagatgctgaagaggctgaagacccagatggccgaggtgcgctgcatgaagacagatgtgaagaacaccctgtctgagatcaagagcagcagcgctgccagcggggacatgcagaccagcctcttctctgctgaccaggccgccctggccgcctgtggcacagaaaattctggccgcctgcaggacctgggcatggagctgctggccaagagctctgtggccaactgctacatccggaacagcaccaacaagaagagcaacagccccaagccagcccggagctctgtggccggcagcctgagcctgcggcgggctgtggaccccggggagaacagccgcagcaaaggagactgccagaccctgtctgagggcagccctggcagcagccagagcggcagccgccacagcagcccccgggccctgattcatggcagcatcggggacatcctgcccaagacagaggaccggcagtgcaaggccctggacagtgatgctgtggtggtggccgtgttcagcggcctgcctgctgtggagaagaggaggaagatggtgaccctgggcgccaatgccaagggcggccacctggagggcctgcagatgacagacctggagaacaacagcgagactggagagctgcagcctgtgctgcctgagggcgccagcgctgcccctgaggagggcatgagcagtgacagcgacattgaatgtgacacagaaaatgaggagcaggaggagcacacctctgtgggcggcttccatgacagcttcatggtgatgacccagcccccagatgaggacacccacagcagcttcccagatggagagcagatcggccctgaggacctgtccttcaacacagatgagaacagcggccgctag

SEQ ID NO: 174265 - DNA, 2895 bp, synthetic construct; identical to SEQ ID NO: 174262
  misc_feature 1..2895: note = Description of Artificial Sequence: Synthetic coding sequence
  source 1..2895: mol_type = other DNA

SEQ ID NO: 174266 - DNA, 1557 bp, synthetic construct
  misc_feature 1..1557: note = Description of Artificial Sequence: Synthetic coding sequence
  source 1..1557: mol_type = other DNA
atggccgagaccagcctgctggaggccggggccagcgctgccagcacagctgctgccctggagaacctgcaggtggaggccagctgcagcgtgtgcctggagtacctgaaggagcctgtgatcattgaatgtggccacaacttctgcaaggcctgcatcacccgctggtgggaggacctggagcgggacttcccctgccctgtgtgcaggaagaccagccgctaccgcagcctgcggcccaaccggcagctgggctccatggtggagatcgccaagcagctgcaggccgtgaagaggaagatcagagatgagagcctgtgcccccagcaccacgaggccctgagcctcttctgctatgaggaccaggaggccgtgtgcctgatctgtgccatcagccacacccaccgggcccacacagtggtgcccctggatgatgccacccaggagtacaaggagaagctgcagaagtgcctggagcccctggagcagaagctgcaggagatcacccgctgcaagagcagcgaggagaagaagccaggagagctgaagaggctggtggagagccggcggcagcagatcctgcgggagtttgaggagctgcaccggcggctggatgaggagcagcaggtgctgctgagccggctggaggaggaggagcaggacatcctgcagaggctgcgggagaatgctgcccacctgggggacaagagaagagacctggcccacctggccgctgaggtggagggcaagtgcctgcagagcggctttgagatgctgaaggatgtgaagagcaccctggagaagaacatccccaggaagtttggaggcagcctgagcaccatctgcccccgggaccacaaggccctgctgggcctggtgaaggagatcaacagatgtgagaaggtgaagaccatggaggtgacctctgtgtccattgagctggagaagaacttcagcaacttcccccggcagtactttgccctgaggaagatcctgaagcagctgattgctgatgtgaccctggaccctgagacagcccaccccaacctggtgctgtctgaggacaggaagtctgtgaagtttgtggagacccggctgcgggacctgcctgacaccccccggcgcttcaccttctacccctgtgtgctggccacagagggcttcaccagcggccgccactactgggaggtggaggtgggggacaagacccactgggccgtgggcgtgtgccgggacagcgtgtccaggaaaggagagctgacccccctgcctgagaccggctactggagggtgcggctgtggaatggagacaagtatgctgccaccaccacccccttcacccccctgcacatcaaggtgaagcccaagagggtgggcatcttcctggactatgaggccggcaccctgtccttctacaacgtgacagacaggagccacatctacaccttcacagacaccttcacagagaagctgtggcccctcttctacccaggcatccgggccggcaggaagaatgctgcccccctgaccatccggcccccaacagactgggagtag

SEQ ID NO: 174267 - DNA, 1467 bp, synthetic construct
  misc_feature 1..1467: note = Description of Artificial Sequence: Synthetic coding sequence
  source 1..1467: mol_type = other DNA
atggccgagaccagcctgctggaggccggggccagcgctgccagcacagctgctgccctggagaacctgcaggtggaggccagctgcagcgtgtgcctggagtacctgaaggagcctgtgatcattgaatgtggccacaacttctgcaaggcctgcatcacccgctggtgggaggacctggagcgggacttcccctgccctgtgtgcaggaagaccagccgctaccgcagcctgcggcccaaccggcagctgggctccatggtggagatcgccaagcagctgcaggccgtgaagaggaagatcagagatgagagcctgtgcccccagcaccacgaggccctgagcctcttctgctatgaggaccaggaggccgtgtgcctgatctgtgccatcagccacacccaccgggcccacacagtggtgcccctggatgatgccacccaggagtacaaggagaagctgcagaagtgcctggagcccctggagcagaagctgcaggagatcacccgctgcaagagcagcgaggagaagaagccaggagagctgaagaggctggtggagagccggcggcagcagatcctgcgggagtttgaggagctgcaccggcggctggatgaggagcagcaggtgctgctgagccggctggaggaggaggagcaggacatcctgcagaggctgcgggagaatgctgcccacctgggggacaagagaagagacctggcccacctggccgctgaggtggagggcaagtgcctgcagagcggctttgagatgctgaaggatgtgaagagcaccctggagaagtgtgagaaggtgaagaccatggaggtgacctctgtgtccattgagctggagaagaacttcagcaacttcccccggcagtactttgccctgaggaagatcctgaagcagctgattgctgatgtgaccctggaccctgagacagcccaccccaacctggtgctgtctgaggacaggaagtctgtgaagtttgtggagacccggctgcgggacctgcctgacaccccccggcgcttcaccttctacccctgtgtgctggccacagagggcttcaccagcggccgccactactgggaggtggaggtgggggacaagacccactgggccgtgggcgtgtgccgggacagcgtgtccaggaaaggagagctgacccccctgcctgagaccggctactggagggtgcggctgtggaatggagacaagtatgctgccaccaccacccccttcacccccctgcacatcaaggtgaagcccaagagggtgggcatcttcctggactatgaggccggcaccctgtccttctacaacgtgacagacaggagccacatctacaccttcacagacaccttcacagagaagctgtggcccctcttctacccaggcatccgggccggcaggaagaatgctgcccccctgaccatccggcccccaacagactgggagtag

SEQ ID NO: 174268 - DNA, 1467 bp, synthetic construct; identical to SEQ ID NO: 174267
  misc_feature 1..1467: note = Description of Artificial Sequence: Synthetic coding sequence
  source 1..1467: mol_type = other DNA

SEQ ID NO: 174269 - DNA, 1557 bp, synthetic construct; identical to SEQ ID NO: 174266
  misc_feature 1..1557: note = Description of Artificial Sequence: Synthetic coding sequence
  source 1..1557: mol_type = other DNA

SEQ ID NO: 174270 - DNA, 1467 bp, synthetic construct; identical to SEQ ID NO: 174267
  misc_feature 1..1467: note = Description of Artificial Sequence: Synthetic coding sequence
  source 1..1467: mol_type = other DNA

SEQ ID NO: 174271 - DNA, 1557 bp, synthetic construct; identical to SEQ ID NO: 174266
  misc_feature 1..1557: note = Description of Artificial Sequence: Synthetic coding sequence
  source 1..1557: mol_type = other DNA

SEQ ID NO: 174272 - DNA, 1467 bp, synthetic construct; identical to SEQ ID NO: 174267
  misc_feature 1..1467: note = Description of Artificial Sequence: Synthetic coding sequence
  source 1..1467: mol_type = other DNA

SEQ ID NO: 174273 - DNA, 1467 bp, synthetic construct; identical to SEQ ID NO: 174267
  misc_feature 1..1467: note = Description of Artificial Sequence: Synthetic coding sequence
  source 1..1467: mol_type = other DNA

SEQ ID NO: 174274 - DNA, 1467 bp, synthetic construct; identical to SEQ ID NO: 174267
  misc_feature 1..1467: note = Description of Artificial Sequence: Synthetic coding sequence
  source 1..1467: mol_type = other DNA

SEQ ID NO: 174275 - DNA, 435 bp, synthetic construct
  misc_feature 1..435: note = Description of Artificial Sequence: Synthetic coding sequence
  source 1..435: mol_type = other DNA
atggccgagaccagcctgctggaggccggggccagcgctgccagcacagctgctgccctggagaacctgcaggtggaggccagctgcagcgtgtgcctggagtacctgaaggagcctgtgatcattgaatgtggccacaacttctgcaaggcctgcatcacccgctggtgggaggacctggagcgggacttcccctgccctgtgtgcaggaagaccagccgctaccgcagcctgcggcccaaccggcagctgggctccatggtggagatcgccaagcagctgcaggccgtgaagaggaagatcagagatgagagcctgtgcccccagcaccacgaggccctgagcctcttctgctatgaggaccaggaggccgtgtgcctgatctgtgccatcagccacacccaccgggcccacacagtggtgcccctggactag

SEQ ID NO: 174276 - DNA, 684 bp, synthetic construct
  misc_feature 1..684: note = Description of Artificial Sequence: Synthetic coding sequence
  source 1..684: mol_type = other DNA
tgaaccagccgctaccgcagcctgcggcccaaccggcagctgggctccatggtggagatcgccaagcagctgcaggccgtgaagaggaagatcagagatgagagcctgtgcccccagcaccacgaggccctgagcctcttctgctatgaggaccaggaggccgtgtgcctgatctgtgccatcagccacacccaccgggcccacacagtggtgcccctggatgatgccacccaggagtacaaggagaagctgcagaagtgcctggagcccctggagcagaagctgcaggagatcacccgctgcaagagcagcgaggagaagaagccaggagagctgaagaggctggtggagagccggcggcagcagatcctgcgggagtttgaggagctgcaccggcggctggatgaggagcagcaggtgctgctgagccggctggaggaggaggagcaggacatcctgcagaggctgcgggagaatgctgcccacctgggggacaagagaagagacctggcccacctggccgctgaggtggagggcaagtgcctgcagagcggctttgagatgctgaaggatgtgaagagcaccctggagaagtgtgagaaggtgaagaccatggaggtgaccagcaccaccccctgcaccagcctgcacagcgagatcaatgacaacgtgcggggccgctag

SEQ ID NO: 174277 - DNA, 225 bp, synthetic construct
  misc_feature 1..225: note = Description of Artificial Sequence: Synthetic coding sequence
  source 1..225: mol_type = other DNA
atggccgagaccagcctgctggaggccggggccagcgctgccagcacagctgctgccctggagaacctgcaggtggaggccagctgcagcgtgtgcctggagtacctgaaggagcctgtgatcattgaatgtggccacaacttctgcaaggcctgcatcacccgctggtgggaggacctggagcgggacttcccctgccctgtgtgcaggaagaccagcaggtag

SEQ ID NO: 174278 - DNA, 1254 bp, synthetic construct
  misc_feature 1..1254: note = Description of Artificial Sequence: Synthetic coding sequence
  source 1..1254: mol_type = other DNA
atggtggagatcgccaagcagctgcaggccgtgaagaggaagatcagagatgagagcctgtgcccccagcaccacgaggccctgagcctcttctgctatgaggaccaggaggccgtgtgcctgatctgtgccatcagccacacccaccgggcccacacagtggtgcccctggatgatgccacccaggagtacaaggagaagctgcagaagtgcctggagcccctggagcagaagctgcaggagatcacccgctgcaagagcagcgaggagaagaagccaggagagctgaagaggctggtggagagccggcggcagcagatcctgcgggagtttgaggagctgcaccggcggctggatgaggagcagcaggtgctgctgagccggctggaggaggaggagcaggacatcctgcagaggctgcgggagaatgctgcccacctgggggacaagagaagagacctggcccacctggccgctgaggtggagggcaagtgcctgcagagcggctttgagatgctgaagcctgtgctgagcgcccgggaggagtgtgagaaggtgaagaccatggaggtgacctctgtgtccattgagctggagaagaacttcagcaacttcccccggcagtactttgccctgaggaagatcctgaagcagctgattgctgatgtgaccctggaccctgagacagcccaccccaacctggtgctgtctgaggacaggaagtctgtgaagtttgtggagacccggctgcgggacctgcctgacaccccccggcgcttcaccttctacccctgtgtgctggccacagagggcttcaccagcggccgccactactgggaggtggaggccgcccactgtgtgctggcccaggaccctgagaaccaggccctggcccgcttctactgctacacagagaggaccatcgccaagaggctggtgctgcggcgggaccccagcgtgaagaggaccctgtgccggggctgcagcagcctgctggtgcccggcctgacctgcacccagaggcagaggcgctgccggggccagcgctggacagtgcagacctgcctgacctgccagaggagccagcgcttcctgaatgaccccggccacctgctgtggggagacaggcctgaggcccagctgggcagccaggccgacagcaagcccctgcagcccctgcccaacacagcccacagcatcagtgaccggctgcctgaggagaagatgcagacccagggcagcagcaaccagtag

SEQ ID NO: 174279 - DNA, 1557 bp, synthetic construct; identical to SEQ ID NO: 174266
  misc_feature 1..1557: note = Description of Artificial Sequence: Synthetic coding sequence
  source 1..1557: mol_type = other DNA

SEQ ID NO: 174280 - DNA, 1467 bp, synthetic construct; identical to SEQ ID NO: 174267
  misc_feature 1..1467: note = Description of Artificial Sequence: Synthetic coding sequence
  source 1..1467: mol_type = other DNA

SEQ ID NO: 174281 - DNA, 435 bp, synthetic construct; identical to SEQ ID NO: 174275
  misc_feature 1..435: note = Description of Artificial Sequence: Synthetic coding sequence
  source 1..435: mol_type = other DNA

SEQ ID NO: 174282 - DNA, 225 bp, synthetic construct; identical to SEQ ID NO: 174277
  misc_feature 1..225: note = Description of Artificial Sequence: Synthetic coding sequence
  source 1..225: mol_type = other DNA

SEQ ID NO: 174283 - DNA, 147 bp, synthetic construct
  misc_feature 1..147: note = Description of Artificial Sequence: Synthetic coding sequence
  source 1..147: mol_type = other DNA
atggccgagaccagcctgctggaggccggggccagcgctgccagcacagctgctgccctggagaacctgcaggtggaggccagctgcagcgtgtgcctggagtacctgaaggagcctgtgatcattgaatgtggccacaacttctag

SEQ ID NO: 174284 - DNA, 1467 bp, synthetic construct; identical to SEQ ID NO: 174267
  misc_feature 1..1467: note = Description of Artificial Sequence: Synthetic coding sequence
  source 1..1467: mol_type = other DNA

SEQ ID NO: 174285 - DNA, 684 bp, synthetic construct; identical to SEQ ID NO: 174276
  misc_feature 1..684: note = Description of Artificial Sequence: Synthetic coding sequence
  source 1..684: mol_type = other DNA

SEQ ID NO: 174286 - DNA, 147 bp, synthetic construct; identical to SEQ ID NO: 174283
  misc_feature 1..147: note = Description of Artificial Sequence: Synthetic coding sequence
  source 1..147: mol_type = other DNA

SEQ ID NO: 174287 - DNA, 147 bp, synthetic construct; identical to SEQ ID NO: 174283
  misc_feature 1..147: note = Description of Artificial Sequence: Synthetic coding sequence
  source 1..147: mol_type = other DNA

SEQ ID NO: 174288 - DNA, 180 bp, synthetic construct
  misc_feature 1..180: note = Description of Artificial Sequence: Synthetic coding sequence
  source 1..180: mol_type = other DNA
atggccgagaccagcctgctggaggccggggccagcgctgccagcacagctgctgccctggagaacctgcaggtggaggccagctgcagcgtgtgcctggagtacctgaaggagcctgtgatcattgaatgtggccacaacttctgcaaggcctgcatcacccgctggtgggaggactag

SEQ ID NO: 174289 - DNA, 180 bp, synthetic construct; identical to SEQ ID NO: 174288
  misc_feature 1..180: note = Description of Artificial Sequence: Synthetic coding sequence
  source 1..180: mol_type = other DNA

SEQ ID NO: 174290 - DNA, 435 bp, synthetic construct; identical to SEQ ID NO: 174275
  misc_feature 1..435: note = Description of Artificial Sequence: Synthetic coding sequence
  source 1..435: mol_type = other DNA

SEQ ID NO: 174291 - DNA, 1557 bp, synthetic construct; identical to SEQ ID NO: 174266
  misc_feature 1..1557: note = Description of Artificial Sequence: Synthetic coding sequence
  source 1..1557: mol_type = other DNA

SEQ ID NO: 174292 - DNA, 684 bp, synthetic construct; identical to SEQ ID NO: 174276
  misc_feature 1..684: note = Description of Artificial Sequence: Synthetic coding sequence
  source 1..684: mol_type = other DNA

SEQ ID NO: 174293 - DNA, 684 bp, synthetic construct; identical to SEQ ID NO: 174276
  misc_feature 1..684: note = Description of Artificial Sequence: Synthetic coding sequence
  source 1..684: mol_type = other DNA

SEQ ID NO: 174294 - DNA, 147 bp, synthetic construct; identical to SEQ ID NO: 174283
  misc_feature 1..147: note = Description of Artificial Sequence: Synthetic coding sequence
  source 1..147: mol_type = other DNA

SEQ ID NO: 174295 - DNA, 1557 bp, synthetic construct; identical to SEQ ID NO: 174266
  misc_feature 1..1557: note = Description of Artificial Sequence: Synthetic coding sequence
  source 1..1557: mol_type = other DNA

SEQ ID NO: 174296 - DNA, 225 bp, synthetic construct; identical to SEQ ID NO: 174277
  misc_feature 1..225: note = Description of Artificial Sequence: Synthetic coding sequence
  source 1..225: mol_type = other DNA

SEQ ID NO: 174297 - DNA, 180 bp, synthetic construct; identical to SEQ ID NO: 174288
  misc_feature 1..180: note = Description of Artificial Sequence: Synthetic coding sequence
  source 1..180: mol_type = other DNA

SEQ ID NO: 174298 - DNA, 147 bp, synthetic construct; identical to SEQ ID NO: 174283
  misc_feature 1..147: note = Description of Artificial Sequence: Synthetic coding sequence
  source 1..147: mol_type = other DNA

SEQ ID NO: 174299 - DNA, 786 bp, synthetic construct
  misc_feature 1..786: note = Description of Artificial Sequence: Synthetic coding sequence
  source 1..786: mol_type = other DNA
atggccgagaccagcctgctggaggccggggccagcgctgccagcacagctgctgccctggagaacctgcaggtggaggccagctgcagcgtgtgcctggagtacctgaaggagcctgtgatcattgaatgtggccacaacttctgcaaggcctgcatcacccgctggtgggaggacctggagcgggacttcccctgccctgtgtgcaggaagaccagccgctaccgcagcctgcggcccaaccggcagctgggctccatggtggagatcgccaagcagctgcaggccgtgaagaggaagatcagagatgagagcctgtgcccccagcaccacgaggccctgagcctcttctgctatgaggaccaggaggccgtgtgcctgatctgtgccatcagccacacccaccgggcccacacagtggtgcccctggatgatgccacccaggagtacaaggagaagctgcagaagtgcctggagcccctggagcagaagctgcaggagatcacccgctgcaagagcagcgaggagaagaagccaggagagctgaagaggctggtggagagccggcggcagcagatcctgcgggagtttgaggagctgcaccggcggctggatgaggagcagcaggtgctgctgagccggctggaggaggaggagcaggacatcctgcagaggctgcgggagaatgctgcccacctgggggacaagagaagagacctggcccacctggccgctgaggtggagggcaagtgcctgcagagcggctttgagatgctgaaggtgtag

SEQ ID NO: 174300 - DNA, 180 bp, synthetic construct; identical to SEQ ID NO: 174288
  misc_feature 1..180: note = Description of Artificial Sequence: Synthetic coding sequence
  source 1..180: mol_type = other DNA

SEQ ID NO: 174301 - DNA, 435 bp, synthetic construct; identical to SEQ ID NO: 174275
  misc_feature 1..435: note = Description of Artificial Sequence: Synthetic coding sequence
  source 1..435: mol_type = other DNA

SEQ ID NO: 174302 - DNA, 1467 bp, synthetic construct; identical to SEQ ID NO: 174267
  misc_feature 1..1467: note = Description of Artificial Sequence: Synthetic coding sequence
  source 1..1467: mol_type = other DNA

SEQ ID NO: 174303 - DNA, 1467 bp, synthetic construct; identical to SEQ ID NO: 174267
  misc_feature 1..1467: note = Description of Artificial Sequence: Synthetic coding sequence
  source 1..1467: mol_type = other DNA

SEQ ID NO: 174304 - DNA, 786 bp, synthetic construct; identical to SEQ ID NO: 174299
  misc_feature 1..786: note = Description of Artificial Sequence: Synthetic coding sequence
  source 1..786: mol_type = other DNA

SEQ ID NO: 174305 - DNA, 1467 bp, synthetic construct; identical to SEQ ID NO: 174267
  misc_feature 1..1467: note = Description of Artificial Sequence: Synthetic coding sequence
  source 1..1467: mol_type = other DNA

SEQ ID NO: 174306 - DNA, 180 bp, synthetic construct; identical to SEQ ID NO: 174288
  misc_feature 1..180: note = Description of Artificial Sequence: Synthetic coding sequence
  source 1..180: mol_type = other DNA

SEQ ID NO: 174307 - DNA, 180 bp, synthetic construct; identical to SEQ ID NO: 174288
  misc_feature 1..180: note = Description of Artificial Sequence: Synthetic coding sequence
  source 1..180: mol_type = other DNA

SEQ ID NO: 174308 - DNA, 684 bp, synthetic construct; identical to SEQ ID NO: 174276
  misc_feature 1..684: note = Description of Artificial Sequence: Synthetic coding sequence
  source 1..684: mol_type = other DNA

SEQ ID NO: 174309 - DNA, 1467 bp, synthetic construct; identical to SEQ ID NO: 174267
  misc_feature 1..1467: note = Description of Artificial Sequence: Synthetic coding sequence
  source 1..1467: mol_type = other DNA

SEQ ID NO: 174310 - DNA, 225 bp, synthetic construct; identical to SEQ ID NO: 174277
  misc_feature 1..225: note = Description of Artificial Sequence: Synthetic coding sequence
  source 1..225: mol_type = other DNA

SEQ ID NO: 174311 - DNA, 684 bp, synthetic construct; identical to SEQ ID NO: 174276
  misc_feature 1..684: note = Description of Artificial Sequence: Synthetic coding sequence
  source 1..684: mol_type = other DNA

SEQ ID NO: 174312 - DNA, 1467 bp, synthetic construct; identical to SEQ ID NO: 174267
  misc_feature 1..1467: note = Description of Artificial Sequence: Synthetic coding sequence
  source 1..1467: mol_type = other DNA

SEQ ID NO: 174313 - DNA, 1467 bp, synthetic construct; identical to SEQ ID NO: 174267
  misc_feature 1..1467: note = Description of Artificial Sequence: Synthetic coding sequence
  source 1..1467: mol_type = other DNA

SEQ ID NO: 174314 - DNA, 786 bp, synthetic construct; identical to SEQ ID NO: 174299
  misc_feature 1..786: note = Description of Artificial Sequence: Synthetic coding sequence
  source 1..786: mol_type = other DNA

SEQ ID NO: 174315 - DNA, 225 bp, synthetic construct; identical to SEQ ID NO: 174277
  misc_feature 1..225: note = Description of Artificial Sequence: Synthetic coding sequence
  source 1..225: mol_type = other DNA

SEQ ID NO: 174316 - DNA, 180 bp, synthetic construct; identical to SEQ ID NO: 174288
  misc_feature 1..180: note = Description of Artificial Sequence: Synthetic coding sequence
  source 1..180: mol_type = other DNA

SEQ ID NO: 174317 - DNA, 786 bp, synthetic construct; identical to SEQ ID NO: 174299
  misc_feature 1..786: note = Description of Artificial Sequence: Synthetic coding sequence
  source 1..786: mol_type = other DNA

SEQ ID NO: 174318 - DNA, 1467 bp, synthetic construct; identical to SEQ ID NO: 174267
  misc_feature 1..1467: note = Description of Artificial Sequence: Synthetic coding sequence
  source 1..1467: mol_type = other DNA

SEQ ID NO: 174319 - DNA, 1557 bp, synthetic construct; identical to SEQ ID NO: 174266
  misc_feature 1..1557: note = Description of Artificial Sequence: Synthetic coding sequence
  source 1..1557: mol_type = other DNA

SEQ ID NO: 174320 - DNA, 1467 bp, synthetic construct; identical to SEQ ID NO: 174267
  misc_feature 1..1467: note = Description of Artificial Sequence: Synthetic coding sequence
  source 1..1467: mol_type = other DNA

SEQ ID NO: 174321 - DNA, 786 bp, synthetic construct; identical to SEQ ID NO: 174299
  misc_feature 1..786: note = Description of Artificial Sequence: Synthetic coding sequence
  source 1..786: mol_type = other DNA

SEQ ID NO: 174322 - DNA, 225 bp, synthetic construct; identical to SEQ ID NO: 174277
  misc_feature 1..225: note = Description of Artificial Sequence: Synthetic coding sequence
  source 1..225: mol_type = other DNA

SEQ ID NO: 174323 - DNA, 1236 bp, synthetic construct
  misc_feature 1..1236: note = Description of Artificial Sequence: Synthetic coding sequence
  source 1..1236: mol_type = other DNA
atggccgagaccagcctgctggaggccggggccagcgctgccagcacagctgctgccctggagaacctgcaggtggaggccagctgcagcgtgtgcctggagtacctgaaggagcctgtgatcattgaatgtggccacaacttctgcaaggcctgcatcacccgctggtgggaggacctggagcgggacttcccctgccctgtgtgcaggaagaccagccgctaccgcagcctgcggcccaaccggcagctgggctccatggtggagatcgccaagcagctgcaggccgtgaagaggaagatcagagatgagagcctgtgcccccagcaccacgaggccctgagcctcttctgctatgaggaccaggaggccgtgtgcctgatctgtgccatcagccacacccaccgggcccacacagtggtgcccctggatgatgccacccaggagtacaaggagaagctgcagaagtgcctggagcccctggagcagaagctgcaggagatcacccgctgcaagagcagcgaggagaagaagccaggagagctgaagaggctggtggagagccggcggcagcagatcctgcgggagtttgaggagctgcaccggcggctggatgaggagcagcaggtgctgctgagccggctggaggaggaggagcaggacatcctgcagaggctgcgggagaatgctgcccacctgggggacaagagaagagacctggcccacctggccgctgaggtggagggcaagtgcctgcagagcggctttgagatgctgaagcctgtgctgagcgcccgggaggagtgtgagaaggtgaagaccatggaggtgacctctgtgtccattgagctggagaagaacttcagcaacttcccccggcagtactttgccctgaggaagatcctgaagcagctgattgctgatgtgaccctggaccctgagacagcccaccccaacctggtgctgtctgaggacaggaagtctgtgaagtttgtggagacccggctgcgggacctgcctgacaccccccggcgcttcaccttctacccctgtgtgctggccacagagggcttcaccagcggccgccactactgggaggtggaggtgggggacaagacccactgggccgtgggcgtgtgccgggacagcgtgtccaggaaaggaggctgcggctacggcatgggcaccaacatgcagcccccaccccacctgctgcccctgtgcaccagcaggtag

SEQ ID NO: 174324 - DNA, 1467 bp, synthetic construct; identical to SEQ ID NO: 174267
  misc_feature 1..1467: note = Description of Artificial Sequence: Synthetic coding sequence
  source 1..1467: mol_type = other DNA

SEQ ID NO: 174325 - DNA, 786 bp, synthetic construct; identical to SEQ ID NO: 174299
  misc_feature 1..786: note = Description of Artificial Sequence: Synthetic coding sequence
  source 1..786: mol_type = other DNA

SEQ ID NO: 174326 - DNA, 147 bp, synthetic construct; identical to SEQ ID NO: 174283
  misc_feature 1..147: note = Description of Artificial Sequence: Synthetic coding sequence
  source 1..147: mol_type = other DNA

SEQ ID NO: 174327 - DNA, 786 bp, synthetic construct; identical to SEQ ID NO: 174299
  misc_feature 1..786: note = Description of Artificial Sequence: Synthetic coding sequence
  source 1..786: mol_type = other DNA

SEQ ID NO: 174328 - DNA, 1467 bp, synthetic construct; identical to SEQ ID NO: 174267
  misc_feature 1..1467: note = Description of Artificial Sequence: Synthetic coding sequence
  source 1..1467: mol_type = other DNA

SEQ ID NO: 174329 - DNA, 225 bp, synthetic construct; identical to SEQ ID NO: 174277
  misc_feature 1..225: note = Description of Artificial Sequence: Synthetic coding sequence
  source 1..225: mol_type = other DNA

SEQ ID NO: 174330 - DNA, 1467 bp, synthetic construct; identical to SEQ ID NO: 174267
  misc_feature 1..1467: note = Description of Artificial Sequence: Synthetic coding sequence
  source 1..1467: mol_type = other DNA

SEQ ID NO: 174331 - DNA, 1557 bp, synthetic construct; identical to SEQ ID NO: 174266
  misc_feature 1..1557: note = Description of Artificial Sequence: Synthetic coding sequence
  source 1..1557: mol_type = other DNA

SEQ ID NO: 174332 - DNA, 1467 bp, synthetic construct; identical to SEQ ID NO: 174267
  misc_feature 1..1467: note = Description of Artificial Sequence: Synthetic coding sequence
  source 1..1467: mol_type = other DNA

SEQ ID NO: 174333 - DNA, 435 bp, synthetic construct; identical to SEQ ID NO: 174275
  misc_feature 1..435: note = Description of Artificial Sequence: Synthetic coding sequence
  source 1..435: mol_type = other DNA

SEQ ID NO: 174334 - DNA, 435 bp, synthetic construct; identical to SEQ ID NO: 174275
  misc_feature 1..435: note = Description of Artificial Sequence: Synthetic coding sequence
  source 1..435: mol_type = other DNA

SEQ ID NO: 174335 - DNA, 684 bp, synthetic construct; identical to SEQ ID NO: 174276
  misc_feature 1..684: note = Description of Artificial Sequence: Synthetic coding sequence
  source 1..684: mol_type = other DNA

SEQ ID NO: 174336 - DNA, 147 bp, synthetic construct; identical to SEQ ID NO: 174283
  misc_feature 1..147: note = Description of Artificial Sequence: Synthetic coding sequence
  source 1..147: mol_type = other DNA

SEQ ID NO: 174337 - DNA, 435 bp, synthetic construct; identical to SEQ ID NO: 174275
  misc_feature 1..435: note = Description of Artificial Sequence: Synthetic coding sequence
  source 1..435: mol_type = other DNA

SEQ ID NO: 174338 - DNA, 1467 bp, synthetic construct; identical to SEQ ID NO: 174267
  misc_feature 1..1467: note = Description of Artificial Sequence: Synthetic coding sequence
  source 1..1467: mol_type = other DNA

SEQ ID NO: 174339 - DNA, 1467 bp, synthetic construct
  misc_feature 1..1467: note = Description of Artificial Sequence: Synthetic coding sequence
  source 1..1467: mol_type = other DNA
atggccgagaccagcctgctggaggccggggccagcgctgccagcacagctgctgccctggagaacctgcaggtggaggccagctgcagcgtgtgcctggagtacctgaaggagcctgtgatcattgaatgtggccacaacttctgcaaggcctgcatcacccgctggtgggaggacctggagcgggacttcccctgccctgtgtgcaggaagaccagccgctaccgcagcctgcggcccaaccggcagctgggctccatggtggagatcgccaagcagctgcaggccgtgaagaggaagatcagagatgagagcctgtgcccccagcaccacgaggccctgagcctcttctgctatgaggaccaggaggccgtgtgcctgatctgtgccatcagccacacccaccgggcccacacagtggtgcccctggatgatgccacccaggagtacaaggagaagctgcagaagtgcctggagcccctggagcagaagctgcaggagatcacccgctgcaagagcagcgaggagaagaagccaggagagctgaagaggctggtggagagccggcggcagcagatcctgcgggagtttgaggagctgcaccggcggctggatgaggagcagcaggtgctgctgagccggctggaggaggaggagcaggacatcctgcagaggctgcgggagaatgctgcccacctgggggacaagagaagagacctggcccacctggccgctgaggtggagggcaagtgcctgcagagcggctttgagatgctgaagcctgtgctgagcgcccgggaggagtgtgagaaggtgaagaccatggaggtgacctctgtgtccattgagctggagaagaacttcagcaacttcccccggcagtactttgccctgaggaagatcctgaagcagctgattgctgatgtgaccctggaccctgagacagcccaccccaacctggtgctgtctgaggacaggaagtctgtgaagtttgtggagacccggctgcgggacctgcctgacaccccccggcgcttcaccttctacccctgtgtgctggccacagagggcttcaccagcggccgccactactgggaggtggaggtgggggacaagacccactgggccgtgggcgtgtgccgggacagcgtgtccaggaaaggagagctgacccccctgcctgagaccggctactggagggtgcggctgtggaatggagacaagtatgctgccaccaccacccccttcacccccctgcacatcaaggtgaagcccaagagggtgggcatcttcctggactatgaggccggcaccctgtccttctacaacgtgacagacaggagccacatctacaccttcacagacaccttcacagagaagctgtggcccctcttctacccaggcatccgggccggcaggaagaatgctgcccccctgaccatccggcccccaacagactgggagtag

SEQ ID NO: 174340 - DNA, 1557 bp, synthetic construct
  misc_feature 1..1557: note = Description of Artificial Sequence: Synthetic coding sequence
  source 1..1557: mol_type = other DNA
atggccgagaccagcctgctggaggccggggccagcgctgccagcacagctgctgccctggagaacctgcaggtggaggccagctgcagcgtgtgcctggagtacctgaaggagcctgtgatcattgaatgtggccacaacttctgcaaggcctgcatcacccgctggtgggaggacctggagcgggacttcccctgccctgtgtgcaggaagaccagccgctaccgcagcctgcggcccaaccggcagctgggctccatggtggagatcgccaagcagctgcaggccgtgaagaggaagatcagagatgagagcctgtgcccccagcaccacgaggccctgagcctcttctgctatgaggaccaggaggccgtgtgcctgatctgtgccatcagccacacccaccgggcccacacagtggtgcccctggatgatgccacccaggagtacaaggagaagctgcagaagtgcctggagcccctggagcagaagctgcaggagatcacccgctgcaagagcagcgaggagaagaagccaggagagctgaagaggctggtggagagccggcggcagcagatcctgcgggagtttgaggagctgcaccggcggctggatgaggagcagcaggtgctgctgagccggctggaggaggaggagcaggacatcctgcagaggctgcgggagaatgctgcccacctgggggacaagagaagagacctggcccacctggccgctgaggtggagggcaagtgcctgcagagcggctttgagatgctgaagcctgtgctgagcgcccgggagaagaacatccccaggaagtttggaggcagcctgagcaccatctgcccccgggaccacaaggccctgctgggcctggtgaaggagatcaacagatgtgagaaggtgaagaccatggaggtgacctctgtgtccattgagctggagaagaacttcagcaacttcccccggcagtactttgccctgaggaagatcctgaagcagctgattgctgatgtgaccctggaccctgagacagcccaccccaacctggtgctgtctgaggacaggaagtctgtgaagtttgtggagacccggctgcgggacctgcctgacaccccccggcgcttcaccttctacccctgtgtgctggccacagagggcttcaccagcggccgccactactgggaggtggaggtgggggacaagacccactgggccgtgggcgtgtgccgggacagcgtgtccaggaaaggagagctgacccccctgcctgagaccggctactggagggtgcggctgtggaatggagacaagtatgctgccaccaccacccccttcacccccctgcacatcaaggtgaagcccaagagggtgggcatcttcctggactatgaggccggcaccctgtccttctacaacgtgacagacaggagccacatctacaccttcacagacaccttcacagagaagctgtggcccctcttctacccaggcatccgggccggcaggaagaatgctgcccccctgaccatccggcccccaacagactgggagtag

SEQ ID NO: 174341 - DNA, 1236 bp, synthetic construct; identical to SEQ ID NO: 174323
  misc_feature 1..1236: note = Description of Artificial Sequence: Synthetic coding sequence
  source 1..1236: mol_type = other DNA

SEQ ID NO: 174342 - DNA, 1557 bp, synthetic construct; identical to SEQ ID NO: 174340
  misc_feature 1..1557: note = Description of Artificial Sequence: Synthetic coding sequence
  source 1..1557: mol_type = other DNA

SEQ ID NO: 174343 - DNA, 1467 bp, synthetic construct; identical to SEQ ID NO: 174339
  misc_feature 1..1467: note = Description of Artificial Sequence: Synthetic coding sequence
  source 1..1467: mol_type = other DNA

SEQ ID NO: 174344 - DNA, 1557 bp, synthetic construct; identical to SEQ ID NO: 174266
  misc_feature 1..1557: note = Description of Artificial Sequence: Synthetic coding sequence
  source 1..1557: mol_type = other DNA

SEQ ID NO: 174345 - DNA, 1467 bp, synthetic construct; identical to SEQ ID NO: 174339
  misc_feature 1..1467: note = Description of Artificial Sequence: Synthetic coding sequence
  source 1..1467: mol_type = other DNA

SEQ ID NO: 174346 - DNA, 1467 bp, synthetic construct; identical to SEQ ID NO: 174339
  misc_feature 1..1467: note = Description of Artificial Sequence: Synthetic coding sequence
  source 1..1467: mol_type = other DNA

SEQ ID NO: 174347 - DNA, 1467 bp, synthetic construct; identical to SEQ ID NO: 174339
  misc_feature 1..1467: note = Description of Artificial Sequence: Synthetic coding sequence
  source 1..1467: mol_type = other DNA

SEQ ID NO: 174348 - DNA, 1557 bp, synthetic construct; identical to SEQ ID NO: 174266
  misc_feature 1..1557: note = Description of Artificial Sequence: Synthetic coding sequence
  source 1..1557: mol_type = other DNA

SEQ ID NO: 174349 - DNA, 1236 bp, synthetic construct; identical to SEQ ID NO: 174323
  misc_feature 1..1236: note = Description of Artificial Sequence: Synthetic coding sequence
  source 1..1236: mol_type = other DNA

SEQ ID NO: 174350 - DNA, 1557 bp, synthetic construct; identical to SEQ ID NO: 174340
  misc_feature 1..1557: note = Description of Artificial Sequence: Synthetic coding sequence
  source 1..1557: mol_type = other DNA

SEQ ID NO: 174351 - DNA, 1236 bp, synthetic construct; identical to SEQ ID NO: 174323
  misc_feature 1..1236: note = Description of Artificial Sequence: Synthetic coding sequence
  source 1..1236: mol_type = other DNA

SEQ ID NO: 174352 - DNA, 1236 bp, synthetic construct; identical to SEQ ID NO: 174323
  misc_feature 1..1236: note = Description of Artificial Sequence: Synthetic coding sequence
  source 1..1236: mol_type = other DNA

SEQ ID NO: 174353 - DNA, 1557 bp, synthetic construct; identical to SEQ ID NO: 174266
  misc_feature 1..1557: note = Description of Artificial Sequence: Synthetic coding sequence
  source 1..1557: mol_type = other DNA

SEQ ID NO: 174354 - DNA, 1557 bp, synthetic construct; identical to SEQ ID NO: 174340
  misc_feature 1..1557: note = Description of Artificial Sequence: Synthetic coding sequence
  source 1..1557: mol_type = other DNA

SEQ ID NO: 174355 - DNA, 1557 bp, synthetic construct; identical to SEQ ID NO: 174340
  misc_feature 1..1557: note = Description of Artificial Sequence: Synthetic coding sequence
  source 1..1557: mol_type = other DNA

SEQ ID NO: 174356 - DNA, 1557 bp, synthetic construct; identical to SEQ ID NO: 174266
  misc_feature 1..1557: note = Description of Artificial Sequence: Synthetic coding sequence
  source 1..1557: mol_type = other DNA

SEQ ID NO: 174357 - DNA, 1557 bp, synthetic construct; identical to SEQ ID NO: 174340
  misc_feature 1..1557: note = Description of Artificial Sequence: Synthetic coding sequence
  source 1..1557: mol_type = other DNA

SEQ ID NO: 174358 - DNA, 1254 bp, synthetic construct
  misc_feature 1..1254: note = Description of Artificial Sequence: Synthetic coding sequence
  source 1..1254: mol_type = other DNA
atggtggagatcgccaagcagctgcaggccgtgaagaggaagatcagagatgagagcctgtgcccccagcaccacgaggccctgagcctcttctgctatgaggaccaggaggccgtgtgcctgatctgtgccatcagccacacccaccgggcccacacagtggtgcccctggatgatgccacccaggagtacaaggagaagctgcagaagtgcctggagcccctggagcagaagctgcaggagatcacccgctgcaagagcagcgaggagaagaagccaggagagctgaagaggctggtggagagccggcggcagcagatcctgcgggagtttgaggagctgcaccggcggctggatgaggagcagcaggtgctgctgagccggctggaggaggaggagcaggacatcctgcagaggctgcgggagaatgctgcccacctgggggacaagagaagagacctggcccacctggccgctgaggtggagggcaagtgcctgcagagcggctttgagatgctgaagcctgtgctgagcgcccgggaggagtgtgagaaggtgaagaccatggaggtgacctctgtgtccattgagctggagaagaacttcagcaacttcccccggcagtactttgccctgaggaagatcctgaagcagctgattgctgatgtgaccctggaccctgagacagcccaccccaacctggtgctgtctgaggacaggaagtctgtgaagtttgtggagacccggctgcgggacctgcctgacaccccccggcgcttcaccttctacccctgtgtgctggccacagagggcttcaccagcggccgccactactgggaggtggaggccgcccactgtgtgctggcccaggaccctgagaaccaggccctggcccgcttctactgctacacagagaggaccatcgccaagaggctggtgctgcggcgggaccccagcgtgaagaggaccctgtgccggggctgcagcagcctgctggtgcccggcctgacctgcacccaccggcagaggcgctgccggggccagcgctggacagtgcagacctgcctgacctgccagaggagccagcgcttcctgaatgaccccggccacctgctgtggggagacaggcctgaggcccagctgggcagccaggccgacagcaagcccctgcagcccctgcccaacacagcccacagcatcagtgaccggctgcctgaggagaagatgcagacccagggcagcagcaaccagtag

SEQ ID NO: 174359 - DNA, 1254 bp, synthetic construct; identical to SEQ ID NO: 174358
  misc_feature 1..1254: note = Description of Artificial Sequence: Synthetic coding sequence
  source 1..1254: mol_type = other DNA

SEQ ID NO: 174360 - DNA, 1236 bp, synthetic construct; identical to SEQ ID NO: 174323
  misc_feature 1..1236: note = Description of Artificial Sequence: Synthetic coding sequence
  source 1..1236: mol_type = other DNA

SEQ ID NO: 174361 - DNA, 1254 bp, synthetic construct; identical to SEQ ID NO: 174358
  misc_feature 1..1254: note = Description of Artificial Sequence: Synthetic coding sequence
  source 1..1254: mol_type = other DNA

SEQ ID NO: 174362 - DNA, 1557 bp, synthetic construct; identical to SEQ ID NO: 174340
  misc_feature 1..1557: note = Description of Artificial Sequence: Synthetic coding sequence
  source 1..1557: mol_type = other DNA

SEQ ID NO: 174363 - DNA, 1254 bp, synthetic construct
  misc_feature 1..1254: note = Description of Artificial Sequence: Synthetic coding sequence
  source 1..1254: mol_type = other DNA
atggtggagatcgccaagcagctgcaggccgtgaagaggaagatcagagatgagagcctgtgcccccagcaccacgaggccctgagcctcttctgctatgaggaccaggaggccgtgtgcctgatctgtgccatcagccacacccaccgggcccacacagtggtgcccctggatgatgccacccaggagtacaaggagaagctgcagaagtgcctggagcccctggagcagaagctgcaggagatcacccgctgcaagagcagcgaggagaagaagccaggagagctgaagaggctggtggagagccggcggcagcagatcctgcgggagtttgaggagctgcaccggcggctggatgaggagcagcaggtgctgctgagccggctggaggaggaggagcaggacatcctgcagaggctgcgggagaatgctgcccacctgggggacaagagaagagacctggcccacctggccgctgaggtggagggcaagtgcctgcagagcggctttgagatgctgaagcctgtgctgagcgcccgggaggagtgtgagaaggtgaagaccatggaggtgacctctgtgtccattgagctggagaagaacttcagcaacttcccccggcagtactttgccctgaggaagatcctgaagcagctgattgctgatgtgaccctggaccctgagacagcccaccccaacctggtgctgtctgaggacaggaagtctgtgaagtttgtggagacccggctgcgggacctgcctgacaccccccggcgcttcaccttctacccctgtgtgctggccacagagggcttcaccagcggccgccactactgggaggtggaggccgcccactgtgtgctggcccaggaccctgagaaccaggccctggcccgcttctactgctacacagagaggaccatcgccaagaggctggtgctgcggcgggaccccagcgtgaagaggaccctgtgccggggctgcagcagcctgctggtgcccggcctgacctgcacccagaggcagaggcgctgccggggccagcgctggacagtgcagacctgcctgacctgccagaggagccagcgcttcctgaatgaccccggccacctgctgtggggagacaggcctgaggcccagctgggcagccaggccgacagcaagcccctgcagcccctgcccaacacagcccacagcatcagtgaccggctgcctgaggagaagatgcagaccaagggcagcagcaaccagtag

SEQ ID NO: 174364 - DNA, 1236 bp, synthetic construct; identical to SEQ ID NO: 174323
  misc_feature 1..1236: note = Description of Artificial Sequence: Synthetic coding sequence
  source 1..1236: mol_type = other DNA

SEQ ID NO: 174365 - DNA, 1254 bp, synthetic construct; identical to SEQ ID NO: 174278
  misc_feature 1..1254: note = Description of Artificial Sequence: Synthetic coding sequence
  source 1..1254: mol_type = other DNA

SEQ ID NO: 174366 - DNA, 1557 bp, synthetic construct; identical to SEQ ID NO: 174266
  misc_feature 1..1557: note = Description of Artificial Sequence: Synthetic coding sequence
  source 1..1557: mol_type = other DNA

SEQ ID NO: 174367 - DNA, 1557 bp, synthetic construct; identical to SEQ ID NO: 174266
  misc_feature 1..1557: note = Description of Artificial Sequence: Synthetic coding sequence
  source 1..1557: mol_type = other DNA

SEQ ID NO: 174368 - DNA, 1467 bp, synthetic construct; identical to SEQ ID NO: 174339
  misc_feature 1..1467: note = Description of Artificial Sequence: Synthetic coding sequence
  source 1..1467: mol_type = other DNA

SEQ ID NO: 174369 - DNA, 1467 bp, synthetic construct; identical to SEQ ID NO: 174339
  misc_feature 1..1467: note = Description of Artificial Sequence: Synthetic coding sequence
  source 1..1467: mol_type = other DNA

SEQ ID NO: 174370 - DNA, 1254 bp, synthetic construct; identical to SEQ ID NO: 174278
  misc_feature 1..1254: note = Description of Artificial Sequence: Synthetic coding sequence
  source 1..1254: mol_type = other DNA

SEQ ID NO: 174371 - DNA, 1893 bp, synthetic construct
  misc_feature 1..1893: note = Description of Artificial Sequence: Synthetic coding sequence
  source 1..1893: mol_type = other DNA
atggctgctgtggccatgacccccaaccctgtgcagaccctgcaggaggaggccgtgtgtgccatctgcctggactacttcacagatcctgtgtccatcggctgcggccacaacttctgccgggtgtgtgtgacccagctgtggggcggagaagatgaggaggacagagatgagctggaccgggaggaggaggaggaggatggagaggaggaggaggtggaggccgtgggcgctggggccggctgggacacccccatgagagatgaagattatgaaggagacatggaggaggaggtggaggaggaggaggagggcgtcttctggaccagcggcatgagccgcagctcctgggacaacatggactatgtgtgggaggaggaggatgaggaggaggacctggactactacctgggggacatggaggaggaggacctgcggggggaggatgaagaagatgaggaggaggtgctggaggaggtggaggaggaggacctggaccctgtgacccccctgcccccacctccagccccccggcgctgcttcacctgcccccagtgcaggaagagcttcccccggcgctccttccggcccaacctgcagctggccaacatggtgcaggtgatccggcagatgcaccccaccccaggccggggcagccgggtgacagaccagggcatctgccccaagcaccaggaggccctgaagctgttctgtgaggtggatgaggaggccatctgtgtggtgtgccgggagagccgcagccacaagcagcacagcgtggtgcccctggaggaggtggtgcaggagtacaaggccaagctgcagggccacgtggagcccctgaggaagcacctggaggccgtgcagaagatgaaggccaaggaggagaggagagtgacagagctgaagagccagatgaagtctgagctggccgctgtggccagcgagtttggccgcctgacccgcttcctggccgaggagcaggccggcctggagcggcggctgcgggagatgcatgaggcccagctgggccgggccggggctgctgccagccggctggccgagcaggccgcccagctgagccggctgctggccgaggcccaggagaggagccagcagggcggcctgcggctgctgcaggacatcaaggagaccttcaacagatgtgaggaggtgcagctgcagcccccagaggtgtggagcccagacccctgccagccccacagccatgacttcctgacagatgccatcgtgaggaagatgagcaggatgttctgccaggccgcccgggtggacctgaccctggaccctgacacagcccacccagccctgatgctgagcccagaccggcggggcgtgcggctggccgagcggcggcaggaggtggccgaccaccccaagcgcttctctgctgactgctgcgtgctgggcgcccagggcttccgcagcggccgccactactgggaggtggaggtgggcggcagaagaggctgggccgtgggcgccgcccgggagagcacccaccacaaggagaaggtgggccctgggggcagctctgtgggcagcggagatgccagcagcagccgccaccaccacagaagaagaaggctgcacctgccccagcagcccctgctgcagcgggaggtgtggtgtgtgggcaccaacgggaagcgctaccaggcccagagcagcacagagcagaccctgctgagccccagcgagaagcccaggagatttggagtgtacctggactatgaagctggccgcctgggcttctacaatgctgagaccctggcccacgtgcacaccttctctgctgccttcctgggggagagggtcttccccttcttccgggtgctgagcaagggcacccgcatcaagctgtgcccctag

SEQ ID NO: 174372 - DNA, 1557 bp, synthetic construct
  misc_feature 1..1557: note = Description of Artificial Sequence: Synthetic coding sequence
  source 1..1557: mol_type = other DNA
atggctgctgtggccatgacccccaaccctgtgcagaccctgcaggaggaggccgtgtgtgccatctgcctggactacttcacagatcctgtgtccatcggctgcggccacaacttctgccgggtgtgtgtgacccagctgtggggcggagaagatgaggaggacagagatgagctggaccgggaggaggaggaggaggatggagaggaggaggaggtggaggccgtgggcgctggggccggctgggacacccccatgagagatgaagattatgaaggagacatggaggaggaggtggaggaggaggaggagggcgtcttctggaccagcggcatgagccgcagctcctgggacaacatggactatgtgtgggaggaggaggatgaggaggaggacctggactactacctgggggacatggaggaggaggacctgcggggggaggatgaagaagatgaggaggaggtgctggaggaggtggaggaggaggacctggaccctgtgacccccctgcccccacctccagccccccggcgctgcttcacctgcccccagtgcaggaagagcttcccccggcgctccttccggcccaacctgcagctggccaacatggtgcaggtgatccggcagatgcaccccaccccaggccggggcagccgggtgacagaccagggcatctgccccaagcaccaggaggccctgaagctgttctgtgaggtggatgaggaggccatctgtgtggtgtgccgggagagccgcagccacaagcagcacagcgtggtgcccctggaggaggtggtgcaggagtacaaggccaagctgcagggccacgtggagcccctgaggaagcacctggaggccgtgcagaagatgaaggccaaggaggagaggagagtgacagagctgaagagccagatgaagtctgagctggccgctgtggccagcgagtttggccgcctgacccgcttcctggccgaggagcaggccggcctggagcggcggctgcgggagatgcatgaggcccagctgggccgggccggggctgctgccagccggctggccgagcaggccgcccagctgagccggctgctggccgaggcccaggagaggagccagcagggcggcctgcggctgctgcaggacatcaaggagaccttcaacagatgtgaggaggtgcagctgcagcccccagaggtgtggagcccagacccctgccagccccacagccatgacttcctgacagatgccatcgtgaggaagatgagcaggatgttctgccaggccgcccgggtggacctgaccctggaccctgacacagcccacccagccctgatgctgagcccagaccggcggggcgtgcggctggccgagcggcggcaggaggtggccgaccaccccaagcgcttctctgctgactgctgcgtgctgggcgcccagggcttccgcagcggccgccactactgggaggagcccaaggagcccagctggcccccagcccagcccagcctgacctactacgtgtgccccacagacaggcctgagttctccttcacctag

SEQ ID NO: 174373 - DNA, 453 bp, synthetic construct
  misc_feature 1..453: note = Description of Artificial Sequence: Synthetic coding sequence
  source 1..453: mol_type = other DNA
ctgcaggaggaggccgtgtgtgccatctgcctggactacttcacagatcctgtgtccatcggctgcggccacaacttctgccgggtgtgtgtgacccagctgtggggcagaagaggaggcggcagcggcggctaccctgtgacccccctgcccccacctccagccccccggcgctgcttcacctgcccccagtgcaggaagagcttccccaggaggagcttccggcccaacctgcagctggccaacatggtgcaggtgatccggcagatgcaccccaccccaggccggggcagccgggtgacagaccagggcatctgccccaagcaccaggaggccctgaagctgttctgtgaggtggatgaggaggccatctgtgtggtgtgccgggagagccgcagccacaagcagcacagcgtggtgcccctggaggaggtggtgcaggagtacaagtag

SEQ ID NO: 174374 - DNA, 948 bp, synthetic construct
  misc_feature 1..948: note = Description of Artificial Sequence: Synthetic coding sequence
  source 1..948: mol_type = other DNA
atgaaggccaaggaggagaggagagtgacagagctgaagagccagatgaagtctgagctggccgctgtggccagcgagtttggccgcctgacccgcttcctggccgaggagcaggccggcctggagcggcggctgcgggagatgcatgaggcccagctgggccgggccggggctgctgccagccggctggccgagcaggccgcccagctgagccggctgctggccgaggcccaggagaggagccagcagggcggcctgcggctgctgcagcaggacatcaaggagaccttcaacagatatgccatcgtgaggaagatgagcaggatgttctgccaggccgcccgggtggacctgaccctggaccctgacacagcccacccagccctgatgctgagcccagacagaagaggagtgcggctggccgagcggcggcaggaggtggccgaccaccccaagcgcttctctgctgactgctgcgtgctgggcgcccagggcttccgcagcggccgccactactgggaggtggaggtgggcggccggcggggctgggccgtgggcgccgcccgggagagcacccaccacaaggagaaggtgggccctgggggcagctctgtgggcagcggagatgccagcagcagccgccaccaccacagaagaagaaggctgcacctgccccagcagcccctgctgcagcgggaggtgtggtgtgtgggcaccaacgggaagcgctaccaggcccagagcagcacagagcagaccctgctgagccccagcgagaagccccggcgcttcggcgtgtacctggactatgaggccggccgcctgggcttctacaatgctgagaccctggcccacgtgcacaccttctctgctgccttcctgggggagagggtcttccccttcttccgggtgctgagcaagggcacccgcatcaagctgtgcccctag

SEQ ID NO: 174375 - DNA, 1035 bp, synthetic construct
  misc_feature 1..1035: note = Description of Artificial Sequence: Synthetic coding sequence
  source 1..1035: mol_type = other DNA
atggccagcggcgtgggcgccgcctttgaggagctgccccatgatggcacctgtgatgaatgtgagccagatgaggcccctggagctgaggaggtgtgcagagaatgtggcttctgctactgcagaagacatgctgaggcccaccggcagaagttcctgagccaccacctggccgagtatgtgcacggcagccaggcctggaccccaccagcagatggagagggcgctgggaaggaggaggccgaggtgaaggtggagcaggagcgggagattgaaagtgaagctggggaggagagcgagagcgaggaggagagcgagagcgaggaggagagcgagacagaggaggagagtgaagatgaaagtgatgaggagagtgaagaagattctgaggaggagatggaggatgagcaggagagcgaggccgaggaggacaaccaggaggagggggagagcgaggccgagggggagacagaagctgagagcgagtttgatcctgagattgagatggaggccgagcgggtggccaagaggaagtgcccagaccacggcctggacctgagcacctactgccaggaggaccggcagctgatctgtgtgctgtgccctgtgattggagcccaccagggccaccagctgagcaccctggatgaggcctttgaggagctgcggagcaaggacagcggcggcctgaaggccgccatgattgagctggtggagcggctgaagttcaagagcagtgaccccaaggtgacccgggaccagatgaagatgttcatccagcaggagttcaagaaggtgcagaaggtgattgctgatgaggagcagaaggccctgcacctggtggacatccaggaggccatggccacagcccacgtgacagagatcctggccgacatccagagccacatggaccggctgatgacccagatggcccaggccaaggagcagctggacaccagcaatgaatctgctgagcccaaggccgagggagatgaggagggccccagcggggccagcgaggaggaggacacctag

SEQ ID NO: 174376 - DNA, 1743 bp, synthetic construct
  misc_feature 1..1743: note = Description of Artificial Sequence: Synthetic coding sequence
  source 1..1743: mol_type = other DNA
atgtctgaaaataggaagcccctgctgggctttgtgtccaagctgaccagcggcacagccctgggcaacagcggcaagacccactgccccctgtgcctgggcctcttcaaggccccccggctgctgccctgcctgcacacagtgtgcaccacctgcctggagcagctggagcccttctctgtggtggacatccggggcggggacagcgacaccagcagcgagggcagcatcttccaggagctgaagcccaggagcctgcagagccagatcggcatcctgtgccctgtgtgtgatgcccaggtggacctgcccatgggcggcgtgaaggccctgaccatcgaccacctggccgtgaatgatgtgatgctggagagcctgcggggggagggccagggcctggtgtgtgacctgtgcaatgaccgggaggtggagaagcgctgccagacctgcaaggccaacctgtgccacttctgctgccaggcccaccggcggcagaagaagaccacctaccacaccatggtggacctgaaggacctgaagggctacagcagaattggcaagcccatcctgtgccctgtgcaccctgctgaggagctgcggctcttctgtgagttctgtgacaggcctgtgtgccaggactgtgtggtgggggagcaccgggagcacccctgtgacttcaccagcaatgtcatccacaagcacggggacagcgtgtgggagctgctgaagggcacccagccccacgtggaggccctggaggaggccctggcccagatccacatcatcaacagcgccctgcagaagagggtggaggccgtggccgcagatgtgaggaccttcagcgagggctacatcaaggccatcgaggagcaccgggacaagctgctgaagcagctggaggacatccgggcccagaaggagaacagcctgcagctgcagaaggcccagctggagcagctgctggccgacatgaggactggagtggagttcacagagcacctgctgaccagcggcagtgacctggagatcctgatcaccaagagggtggtggtggagcggctgaggaagctgaacaaggtgcagtacagcaccaggcctggggtgaatgacaagatccgcttctgcccccaggagaaggccggccagtgccggggctatgagatctacggcaccatcaacaccaaggaggtggaccctgccaagtgtgtgctgcagggcgaggacctgcaccgggcccgggagaagcagacagccagcttcaccctgctgtgcaaggatgctgctggggagatcatgggccggggcggggacaacgtgcaggtggccgtggtgcccaaggacaagaaggacagccctgtgaggaccatggtgcaggacaacaaggatggcacctactacatctcctacacccccaaggagcccggggtgtacacagtgtgggtgtgcatcaaggagcagcacgtgcagggcagccccttcaccgtgatggtgcggaggaagcaccggccccacagcggggtcttccactgctgcaccttctgcagcagcggcggccagaagacagcccgctgtgcctgtggcggcaccatgcctgggggctacctgggctgcggccacggccacaagggccaccctggccacccccactggagctgctgcggcaagttcaatgagaagtcagaatgtacctggacaggaggccagagcgcccccaggagcctgctgaggacagtggccctgtag

SEQ ID NO: 174377 - DNA, 1572 bp, synthetic construct
  misc_feature 1..1572: note = Description of Artificial Sequence: Synthetic coding sequence
  source 1..1572: mol_type = other DNA
atgctgtctggagtgaccctggagggcggcggggcccggagcggggagggccgccgcagcaggacagagctgaagcccaggagcctgcagagccagatcggcatcctgtgccctgtgtgtgatgcccaggtggacctgcccatgggcggcgtgaaggccctgaccatcgaccacctggccgtgaatgatgtgatgctggagagcctgcggggggagggccagggcctggtgtgtgacctgtgcaatgaccgggaggtggagaagcgctgccagacctgcaaggccaacctgtgccacttctgctgccaggcccaccggcggcagaagaagaccacctaccacaccatggtggacctgaaggacctgaagggctacagccgcatcggcaagcccatcctgtgccctgtgcaccctgctgaggagctgcggctcttctgtgagttctgtgacaggcctgtgtgccaggactgtgtggtgggggagcaccgggagcacccctgtgacttcaccagcaatgtcatccacaagcatggagacagcgtgtgggagctgctgaagggcacccagccccacgtggaggccctggaggaggccctggcccagatccacatcatcaacagcgccctgcagaagagggtggaggccgtggccgcagatgtgaggaccttcagcgagggctacatcaaggccatcgaggagcaccgggacaagctgctgaagcagctggaggacatccgggcccagaaggagaacagcctgcagctgcagaaggcccagctggagcagctgctggccgacatgaggactggagtggagttcacagagcacctgctgaccagcggcagtgacctggagatcctgatcaccaagagggtggtggtggagcggctgaggaagctgaacaaggtgcagtacagcaccaggcctggggtgaatgacaagatccgcttctgcccccaggagaaggccggccagtgccggggctatgagatctacggcaccatcaacaccaaggaggtggaccctgccaagtgtgtgctgcagggcgaggacctgcaccgggcccgggagaagcagacagccagcttcaccctgctgtgcaaggatgctgctggggagatcatgggccggggcggggacaacgtgcaggtggccgtggtgcccaaggacaagaaggacagccctgtgaggaccatggtgcaggacaacaaggatggcacctactacatctcctacacccccaaggagcccggggtgtacacagtgtgggtgtgcatcaaggagcagcacgtgcagggcagccccttcaccgtgatggtgcggaggaagcaccggccccacagcggggtcttccactgctgcaccttctgcagcagcggcggccagaagacagcccgctgtgcctgtggcggcaccatgcctgggggctacctgggctgcggccacggccacaagggccaccctggccacccccactggagctgctgcggcaagttcaatgagaagtctgagtgcacctggacaggaggccagagcgcccccaggagcctgctgaggacagtggccctgtag

SEQ ID NO: 174378 - DNA, 1689 bp, synthetic construct
  misc_feature 1..1689: note = Description of Artificial Sequence: Synthetic coding sequence
  source 1..1689: mol_type = other DNA
atgtctgaaaataggaagcccctgctgggctttgtgtccaagctgaccagcggcacagccctgggcaacagcggcaagacccactgccccctgtgcctgggcctcttcaaggccccccggctgctgccctgcctgcacacagtgtgcaccacctgcctggagcagctggagcccttctctgtggtggacatccggggcggggacagcgacaccagcagcgagggcagcatcttccaggagctgaagcccaggagcctgcagagccagatcggcatcctgtgccctgtgtgtgatgcccaggtggacctgcccatgggcggcgtgaaggccctgaccatcgaccacctggccgtgaatgatgtgatgctggagagcctgcggggggagggccagggcctggtgtgtgacctgtgcaatgaccgggaggtggagaagcgctgccagacctgcaaggccaacctgtgccacttctgctgccaggcccaccggcggcagaagaagaccacctaccacaccatggtggacctgaaggacctgaagggctacagcagaattggcaagcccatcctgtgccctgtgcaccctgctgaggagctgcggctcttctgtgagttctgtgacaggcctgtgtgccaggactgtgtggtgggggagcaccgggagcacccctgtgacttcaccagcaatgtcatccacaagcacggggacagcgtgtgggagctgctgaagggcacccagccccacgtggaggccctggaggaggccctggcccagatccacatcatcaacagcgccctgcagaagagggtggaggccgtggccgcagatgtgaggaccttcagcgagggctacatcaaggccatcgaggagcaccgggacaagctgctgaagcagctggaggacatccgggcccagaaggagaacagcctgcagctgcagaaggcccagctggagcagctgctggccgacatgaggactggagtggagttcacagagcacctgctgaccagcggcagtgacctggagatcctgatcaccaagagggtggtggtggagcggctgaggaagctgaacaaggtgcagtacagcaccaggcctggggtgaatgacaagatccgcttctgcccccaggagaaggccggccagtgccggggctatgagatctatgacctgcaccgggcccgggagaagcagacagccagcttcaccctgctgtgcaaggatgctgctggggagatcatgggccggggcggggacaacgtgcaggtggccgtggtgcccaaggacaagaaggacagccctgtgaggaccatggtgcaggacaacaaggatggcacctactacatctcctacacccccaaggagcccggggtgtacacagtgtgggtgtgcatcaaggagcagcacgtgcagggcagccccttcaccgtgatggtgcggaggaagcaccggccccacagcggggtcttccactgctgcaccttctgcagcagcggcggccagaagacagcccgctgtgcctgtggcggcaccatgcctgggggctacctgggctgcggccacggccacaagggccaccctggccacccccactggagctgctgcggcaagttcaatgagaagtcagaatgtacctggacaggaggccagagcgcccccaggagcctgctgaggacagtggccctgtag

SEQ ID NO: 174379 - DNA, 1917 bp, synthetic construct
  misc_feature 1..1917: note = Description of Artificial Sequence: Synthetic coding sequence
  source 1..1917: mol_type = other DNA
atggatggcagcggccccttcagctgccccatctgcctggagcccctgcgggagcctgtgaccctgccctgtggccacaacttctgcctggcctgcctgggcgccctgtggccccacagaggagccagcggggccggcggccctgggggcgccgcccgctgccccctgtgccaggagcccttcccagatggcctgcagctgaggaagaaccacaccctgtctgagctgctgcagctgcggcagggcagcggccctggcagcggccctggccctgccccagccctggcccctgagcccagcgcccccagcgccctgcccagcgtgcctgagcccagcgccccctgtgcccctgagccctggccagctggggaggagcctgtgcgctgtgatgcctgcccagagggcgccgccctgcctgctgccctgagctgcctgagctgcctggccagcttctgcccagcccacctgggcccccatgagaggagccctgccctgcggggccaccggctggtgccccccctgcggcggctggaggagagcctgtgccccaggcacctgcggcccctggagcgctactgcagagctgagcgggtgtgcctgtgtgaggcctgtgccgcccaggagcaccggggccacgagctggtgcccctggagcaggagcgggccctgcaggaggccgagcagagcaaggtgctgtctgctgtggaggacaggatggatgagctgggcgccggcatcgcccagagcagaagaacagtggccctgatcaagtctgctgctgtggccgagcgggagcgggtgtcccggctgtttgctgatgctgctgctgccctgcagggcttccagacccaggtgctgggcttcatcgaggagggggaggccgccatgctgggccgcagccagggcgacctgcggcggcaggaggagcagaggagccggctgagccgggcccggcagaacctgagccaggtgcctgaggccgacagcgtgtccttcctgcaggagctgctggccctgcggctggccctggaggatggctgcggccctggccctggccccccccgggagctgtccttcaccaagagcagccaggccgtgcgggctgtgcgggacatgctggccgtggcctgtgtgaaccagtgggagcagctgcggggccctggaggaaatgaagatggcccccagaagctggacagcgaggctgatgctgagccccaggacctggagagcaccaacctgctggagagcgaggccccccgggactacttcctgaagtttgcctacatcgtggacctggacagcgacacagctgacaagttcctgcagctgtttggcaccaagggcgtgaagagggtgctgtgccccatcaactaccccctgagccccacccgcttcacccactgtgagcaggtgctgggggagggcgccctggaccggggcacctactactgggaggtggagatcatcgagggctgggtgtccatgggcgtgatggccgaggacttcagcccccaggagccctatgaccggggccgcctgggcagaaatgcccacagctgctgcctgcagtggaatggccgctccttctctgtgtggttccacggcctggaggcccccctgccccaccccttcagccccaccgtgggcgtgtgcctggagtatgctgaccgggccctggccttctatgctgtgagagatggcaagatgagcctgctgcggcggctgaaggccagccggcccaggagaggaggcatcccagccagccccatcgaccccttccagagccggctggacagccactttgctggcctcttcacccaccggctgaagccagccttcttcctggagagcgtggatgcccacctgcagatcggccccctgaagaagagctgcatctctgtgctgaagagaagatag

SEQ ID NO: 174380 - DNA, 1482 bp, synthetic construct
  misc_feature 1..1482: note = Description of Artificial Sequence: Synthetic coding sequence
  source 1..1482: mol_type = other DNA
atggccagcggcatcctggtgaatgtgaaggaggaggtgacctgccccatctgcctggagctgctgacccagcccctgagcctggactgtggccacagcttctgccaggcctgcctgacagccaaccacaagaagtccatgctggacaagggggagagcagctgccctgtgtgccgcatctcctaccagcctgagaacatccggcccaacagacatgtggccaacatcgtggagaagctgcgggaggtgaagctgagccctgagggccagaaggtggaccactgtgcccggcacggggagaagctgctgctcttctgccaggaggatggcaaggtgatctgctggctgtgtgagaggagccaggagcaccggggccaccacaccttcctgacagaggaggtggcccgggagtaccaggtgaagctgcaggccgccctggagatgctgcggcagaagcagcaggaggccgaggagctggaggccgacatccgggaggagaaggcctcctggaagacccagatccagtatgacaagaccaacgtgctggccgactttgagcagctgcgggacatcctggactgggaggagagcaatgagctgcagaacctggagaaggaggaggaggacatcctgaagagcctgaccaacagcgagacagagatggtgcagcagacccagagcctgcgggagctgatcagtgacctggagcaccggctgcagggctctgtgatggagctgctgcagaaggtgtctgggaagatcctgaggacagaaaatgtgaccctgaagaagccagagaccttccccaagaaccagaggagggtcttccgggccccagacctgaagggcatgctggaggtgttccgggagctgacagatgtgcggcgctactgggtggatgtgacagtggcccccaacaacatcagctgtgctgtgatcagcgaggacaagaggcaggtgagcagccccaagccccagatcatctatggagcccggggcacccgctaccagacctttgtgaacttcaactactgcaccggcatcctgggcagccagagcatcaccagcggcaagcactactgggaggtggatgtgtccaagaagacagcctggatcctgggcgtgtgtgccggcttccagccagatgccatgtgcaacatcgagaagaatgaaaactaccagcccaagtatggctactgggtgattggcctggaggagggcgtgaagtgcagcgccttccaggacagcagcttccacacccccagcgtgcccttcatcgtgcccctgagcgtcatcatctgcccagacagagtgggcgtcttcctggactatgaggcctgcaccgtgtccttcttcaacatcaccaaccacggcttcctgatctacaagttcagccactgcagcttcagccagcccgtcttcccctacctgaaccccaggaaatgtggggtgcccatgaccctgtgcagccccagcagctag

SEQ ID NO: 174381 - DNA, 981 bp, synthetic construct
  misc_feature 1..981: note = Description of Artificial Sequence: Synthetic coding sequence
  source 1..981: mol_type = other DNA
atggccagcggcatcctggtgaatgtgaaggaggaggtgacctgccccatctgcctggagctgctgacccagcccctgagcctggactgtggccacagcttctgccaggcctgcctgacagccaaccacaagaagtccatgctggacaagggggagagcagctgccctgtgtgccgcatctcctaccagcctgagaacatccggcccaacagacatgtggccaacatcgtggagaagctgcgggaggtgaagctgagccctgagggccagaaggtggaccactgtgcccggcacggggagaagctgctgctcttctgccaggaggatggcaaggtgatctgctggctgtgtgagaggagccaggagcaccggggccaccacaccttcctgacagaggaggtggcccgggagtaccaggtgaagctgcaggccgccctggagatgctgcggcagaagcagcaggaggccgaggagctggaggccgacatccgggaggagaaggcctcctggaagacccagatccagtatgacaagaccaacgtgctggccgactttgagcagctgcgggacatcctggactgggaggagagcaatgagctgcagaacctggagaaggaggaggaggacatcctgaagagcctgaccaacagcgagacagagatggtgcagcagacccagagcctgcgggagctgatcagtgacctggagcaccggctgcagggctctgtgatggagctgctgcagggcgtggatggagtcatcaagaggacagaaaatgtgaccctgaagaagccagagaccttccccaagaaccagaggagggtcttccgggccccagacctgaagggcatgctggaggtgttccgggagctgacagatgtgcggcgctactggggctggagcgccatggcccggagccgcttcaccgccaccagcaccagccagatccaggccatcctgctgccccagccccccaagtag

SEQ ID NO: 174382 - DNA, 1482 bp, synthetic construct
  misc_feature 1..1482: note = Description of Artificial Sequence: Synthetic coding sequence
  source 1..1482: mol_type = other DNA
atggccagcggcatcctggtgaatgtgaaggaggaggtgacctgccccatctgcctggagctgctgacccagcccctgagcctggactgtggccacagcttctgccaggcctgcctgacagccaaccacaagaagtccatgctggacaagggggagagcagctgccctgtgtgccgcatctcctaccagcctgagaacatccggcccaacagacatgtggccaacatcgtggagaagctgcgggaggtgaagctgagccctgagggccagaaggtggaccactgtgcccggcacggggagaagctgctgctcttctgccaggaggatggcaaggtgatctgctggctgtgtgagaggagccaggagcaccggggccaccacaccttcctgacagaggaggtggcccgggagtaccaggtgaagctgcaggccgccctggagatgctgcggcagaagcagcaggaggccgaggagctggaggccgacatccgggaggagaaggcctcctggaagacccagatccagtatgacaagaccaacgtgctggccgactttgagcagctgcgggacatcctggactgggaggagagcaatgagctgcagaacctggagaaggaggaggaggacatcctgaagagcctgaccaacagcgagacagagatggtgcagcagacccagagcctgcgggagctgatcagtgacctggagcaccggctgcagggctctgtgatggagctgctgcagggcgtggatggagtcatcaagaggacagaaaatgtgaccctgaagaagccagagaccttccccaagaaccagaggagggtcttccgggccccagacctgaagggcatgctggaggtgttccgggagctgacagatgtgcggcgctactgggtggatgtgacagtggcccccaacaacatcagctgtgctgtgatcagcgaggacaagaggcaggtgagcagccccaagccccagatcatctatggagcccggggcacccgctaccagacctttgtgaacttcaactactgcaccggcatcctgggcagccagagcatcaccagcggcaagcactactgggaggtggatgtgtccaagaagacagcctggatcctgggcgtgtgtgccggcttccagccagatgccatgtgcaacatcgagaagaatgaaaactaccagcccaagtatggctactgggtgattggcctggaggagggcgtgaagtgcagcgccttccaggacagcagcttccacacccccagcgtgcccttcatcgtgcccctgagcgtcatcatctgcccagacagagtgggcgtcttcctggactatgaggcctgcaccgtgtccttcttcaacatcaccaaccacggcttcctgatctacaagttcagccactgcagcttcagccagcccgtcttcccctacctgaaccccaggaaatgtggggtgcccatgaccctgtgcagccccagcagctag

SEQ ID NO: 174383 - DNA, 1044 bp, synthetic construct
  misc_feature 1..1044: note = Description of Artificial Sequence: Synthetic coding sequence
  source 1..1044: mol_type = other DNA
atggccagcggcatcctggtgaatgtgaaggaggaggtgacctgccccatctgcctggagctgctgacccagcccctgagcctggactgtggccacagcttctgccaggcctgcctgacagccaaccacaagaagtccatgctggacaagggggagagcagctgccctgtgtgccgcatctcctaccagcctgagaacatccggcccaacagacatgtggccaacatcgtggagaagctgcgggaggtgaagctgagccctgagggccagaaggtggaccactgtgcccggcacggggagaagctgctgctcttctgccaggaggatggcaaggtgatctgctggctgtgtgagaggagccaggagcaccggggccaccacaccttcctgacagaggaggtggcccgggagtaccaggtgaagctgcaggccgccctggagatgctgcggcagaagcagcaggaggccgaggagctggaggccgacatccgggaggagaaggcctcctggaagacccagatccagtatgacaagaccaacgtgctggccgactttgagcagctgcgggacatcctggactgggaggagagcaatgagctgcagaacctggagaaggaggaggaggacatcctgaagagcctgaccaacagcgagacagagatggtgcagcagacccagagcctgcgggagctgatcagtgacctggagcaccggctgcagggctctgtgatggagctgctgcagggcgtggatggagtcatcaagaggacagaaaatgtgaccctgaagaagccagagaccttccccaagaaccagaggagggtcttccgggccccagacctgaagggcatgctggaggtgttccgggagctgacagatgtgcggcgctactggggcaaggagaagagccactaccacaagccaccctgtggcctgagcctgctgctgagcctgtccttccgcatcctgtgcagcctgctgggcagctgcttcaagatctatgacagccccagcaagacccacatcacctaccccagcctgtag

SEQ ID NO: 174384 - DNA, 984 bp, synthetic construct
  misc_feature 1..984: note = Description of Artificial Sequence: Synthetic coding sequence
  source 1..984: mol_type = other DNA
atggccagcggcatcctggtgaatgtgaaggaggaggtgacctgccccatctgcctggagctgctgacccagcccctgagcctggactgtggccacagcttctgccaggcctgcctgacagccaaccacaagaagtccatgctggacaagggggagagcagctgccctgtgtgccgcatctcctaccagcctgagaacatccggcccaacagacatgtggccaacatcgtggagaagctgcgggaggtgaagctgagccctgagggccagaaggtggaccactgtgcccggcacggggagaagctgctgctcttctgccaggaggatggcaaggtgatctgctggctgtgtgagaggagccaggagcaccggggccaccacaccttcctgacagaggaggtggcccgggagtaccaggtgaagctgcaggccgccctggagatgctgcggcagaagcagcaggaggccgaggagctggaggccgacatccgggaggagaaggcctcctggaagacccagatccagtatgacaagaccaacgtgctggccgactttgagcagctgcgggacatcctggactgggaggagagcaatgagctgcagaacctggagaaggaggaggaggacatcctgaagagcctgaccaacagcgagacagagatggtgcagcagacccagagcctgcgggagctgatcagtgacctggagcaccggctgcagggctctgtgatggagctgctgcaggccggcgtgcagtgcctgatcctgaggacagaaaatgtgaccctgaagaagccagagaccttccccaagaaccagaggagggtcttccgggccccagacctgaagggcatgctggaggtgttccgggagctgacagatgtgcggcgctactggggctggagcgccatggcccggagccgcttcaccgccaccagcaccagccagatccaggccatcctgctgccccagccccccaagtag

SEQ ID NO: 174385 - DNA, 981 bp, synthetic construct; identical to SEQ ID NO: 174381
  misc_feature 1..981: note = Description of Artificial Sequence: Synthetic coding sequence
  source 1..981: mol_type = other DNA

SEQ ID NO: 174386 - DNA, 630 bp, synthetic construct
  misc_feature 1..630: note = Description of Artificial Sequence: Synthetic coding sequence
  source 1..630: mol_type = other DNA
atggccagcggcatcctggtgaatgtgaaggaggaggtgacctgccccatctgcctggagctgctgacccagcccctgagcctggactgtggccacagcttctgccaggcctgcctgacagccaaccacaagaagtccatgctggacaagggggagagcagctgccctgtgtgccgcatctcctaccagcctgagaacatccggcccaacagacatgtggccaacatcgtggagaagctgcgggaggtgaagctgagccctgagggccagaaggtggaccactgtgcccggcacggggagaagctgctgctcttctgccaggaggatggcaaggtgatctgctggctgtgtgagaggagccaggagcaccggggccaccacaccttcctgacagaggaggtggcccgggagtaccaggtgaagctgcaggccgccctggagatgctgcggcagaagcagcaggaggccgaggagctggaggccgacatccgggaggagaaggcctcctggaagacccagatccagtatgacaagaccaacgtgctggccgactttgagcagctgcgggacatcctggactgggaggagagcaatgagctgcagaacctggagaaggaggaggaggactag

SEQ ID NO: 174387 - DNA, 219 bp, synthetic construct
  misc_feature 1..219: note = Description of Artificial Sequence: Synthetic coding sequence
  source 1..219: mol_type = other DNA
atggccagcggcatcctggtgaatgtgaaggaggaggtgacctgccccatctgcctggagctgctgacccagcccctgagcctggactgtggccacagcttctgccaggcctgcctgacagccaaccacaagaagtccatgctggacaagggggagagcagctgccctgtgtgccgcatctcctaccagcctgagaacatccggcccaacagacactag

SEQ ID NO: 174388 - DNA, 816 bp, synthetic construct
  misc_feature 1..816: note = Description of Artificial Sequence: Synthetic coding sequence
  source 1..816: mol_type = other DNA
atggccagcggcatcctggtgaatgtgaaggaggaggtgacctgccccatctgcctggagctgctgacccagcccctgagcctggactgtggccacagcttctgccaggcctgcctgacagccaaccacaagaagtccatgctggacaagggggagagcagctgccctgtgtgccgcatctcctaccagcctgagaacatccggcccaacagacatgtggccaacatcgtggagaagctgcgggaggtgaagctgagccctgagggccagaaggtggaccactgtgcccggcacggggagaagctgctgctcttctgccaggaggatggcaaggtgatctgctggctgtgtgagaggagccaggagcaccggggccaccacaccttcctgacagaggaggtggcccgggagtaccaggtgaagctgcaggccgccctggagatgctgcggcagaagcagcaggaggccgaggagctggaggccgacatccgggaggagaaggcctcctggaagacccagatccagtatgacaagaccaacgtgctggccgactttgagcagctgcgggacatcctggactgggaggagagcaatgagctgcagaacctggagaaggaggaggaggacatcctgaagagcctgaccaacagcgagacagagatggtgcagcagacccagagcctgcgggagctgatcagtgacctggagcaccggctgcagggctctgtgatggagctgctgcaggatggagagcgggacctggaggaggccaggaacttcagcaagaagagcaaggagagcgtgagcagcagctag

SEQ ID NO: 174389 - DNA, 1464 bp, synthetic construct
  misc_feature 1..1464: note = Description of Artificial Sequence: Synthetic coding sequence
  source 1..1464: mol_type = other DNA
atggcctggcaggtgtccctgctggagctggaggactggctgcagtgccccatctgcctggaggtgttcaaggagcccctgatgctgcagtgtggccacagctactgcaagggctgcctggtgtccctgagctgccacctggatgctgagctgcgctgccctgtgtgccggcaggccgtggatggcagcagcagcctgcccaacgtgtccctggcccgggtgattgaggccctgcggctgcccggggaccctgagcccaaggtgtgtgtgcaccacaggaaccccctgagcctcttctgtgagaaggaccaggagctgatctgtggcctgtgtggcctgctgggcagccaccagcaccaccctgtgacccctgtgtccacagtgtacagcaggatgaaggaggagctggccgccctgatcagcgagctgaagcaggagcagaagaaggtggatgagctgattgccaagctggtgaacaacagaacccgcatcgtgaatgaaagtgatgtgttctcctgggtgatccggcgggagttccaggagctgcaccacctggtggatgaggagaaggcccgctgcctggagggcattggaggccacacccggggcctggtggccagcctggacatgcagctggagcaggcccagggcacccgggagcggctggcccaggccgagtgtgtgctggagcagtttggaaatgaagaccaccacaagttcatcaggaagttccacagcatggccagcagagctgagatgccccaggcccggcccctggagggcgccttcagccccatctccttcaagccaggcctgcaccaggccgacatcaagctgactgtgtggaagaggctcttcaggaaggtgctgcctgcccctgagcccctgaagctggaccctgccacagcccaccccctgctggagctgagcaaaggaaacacagtggtgcagtgtggcctgctggcccagaggcgggccagccagcctgagagatttgactacagcacctgtgtgctggccagccggggcttcagctgtggccgccactactgggaggtggtggtgggcagcaagagtgactggaggctgggcgtcatcaagggcacagccagcaggaagggcaagctgaacagaagccctgagcacggcgtgtggctgattggcctgaaggagggccgggtgtatgaggcctttgcctgcccccgggtgcccctgcctgtggccggccacccccaccgcatcggcctgtacctgcactatgagcagggcgagctgaccttctttgatgctgacagaccagatgacctgcggcccctgtacaccttccaggccgacttccagggcaagctgtaccccatcctggacacctgctggcatgagcggggcagcaacagcctgcccatggtgctgcccccacccagcggccctggccccctgagccctgagcagcccaccaagctgtag

SEQ ID NO: 174390 - DNA, 1464 bp, synthetic construct; identical to SEQ ID NO: 174389
  misc_feature 1..1464: note = Description of Artificial Sequence: Synthetic coding sequence
  source 1..1464: mol_type = other DNA

SEQ ID NO: 174391 - DNA, 1467 bp, synthetic construct
  misc_feature 1..1467: note = Description of Artificial Sequence: Synthetic coding sequence
  source 1..1467: mol_type = other DNA
atgaccagccctgtgctggtggacatccgggaggaggtgacctgccccatctgcctggagctgctgacagagcccctgagcattgactgtggccacagcttctgccaggcctgcatcacccccaacggccgggagagcgtcatcggccaggagggggagaggagctgccctgtgtgccagaccagctaccagcccggcaacctgcggcccaacagacacctggccaacatcgtgcggcggctgcgggaggtggtgctgggccctgggaagcagctgaaggctgtgctgtgtgccgaccacggggagaagctgcagctgttctgccaggaggatggcaaggtgatctgctggctgtgtgagaggagccaggagcaccggggccaccacaccttcctggtggaggaggtggcccaggagtaccaggagaagttccaggagagcctgaagaagctgaagaatgaggagcaggaggccgagaagctgacagccttcatccgggagaagaagacctcctggaagaaccagatggagcctgagcgctgccgcatccagacagagttcaaccagctgaggaacatcctggacagagtggagcagcgggagctgaagaagctggagcaggaggagaagaagggcctgcgcatcatcgaggaggccgagaatgacctggtgcaccagacccagagcctgcgggagctgatcagtgacctggagcggcgctgccagggcagcaccatggagctgctgcaggatgtgtctgatgtgacagagaggtctgagttctggaccctgaggaagccagaggccctgcccaccaagctgcgctccatgttccgggccccagacctgaagaggatgctgcgggtgtgccgggagctgacagatgtgcagagctactgggtggatgtgaccctgaacccccacacagccaacctgaacctggtgctggccaagaacagacggcaggtgcgctttgtgggcgccaaggtgtctggccccagctgcctggagaagcactatgactgcagcgtgctgggcagccagcacttcagcagcggcaagcactactgggaggtggatgtggccaagaagacagcctggatcctgggcgtgtgcagcaacagcctgggccccaccttctccttcaaccactttgcccagaaccacagcgcctacagccgctaccagccccagagcggctactgggtgattggcctgcagcacaaccacgagtaccgggcctatgaggacagcagccccagcctgctgctgtccatgacagtgcccccaagaagagtgggcgtcttcctggactatgaagctggcaccgtgtccttctacaacgtgaccaaccacggcttccccatctacaccttcagcaagtactacttccccaccaccctgtgcccctacttcaacccctgcaactgtgtgatccccatgaccctgcggcggcccagcagctag

SEQ ID NO: 174392 - DNA, 1551 bp, synthetic construct
  misc_feature 1..1551: note = Description of Artificial Sequence: Synthetic coding sequence
  source 1..1551: mol_type = other DNA
atgtgtggcagcgagcgcatcctgcaggccggcaacatcctggagatccgggtgggccaggccggggcccggcgggtggccaccatgaccagccctgtgctggtggacatccgggaggaggtgacctgccccatctgcctggagctgctgacagagcccctgagcattgactgtggccacagcttctgccaggcctgcatcacccccaacggccgggagagcgtcatcggccaggagggggagaggagctgccctgtgtgccagaccagctaccagcccggcaacctgcggcccaacagacacctggccaacatcgtgcggcggctgcgggaggtggtgctgggccctgggaagcagctgaaggctgtgctgtgtgccgaccacggggagaagctgcagctgttctgccaggaggatggcaaggtgatctgctggctgtgtgagaggagccaggagcaccggggccaccacaccttcctggtggaggaggtggcccaggagtaccaggagaagttccaggagagcctgaagaagctgaagaatgaggagcaggaggccgagaagctgacagccttcatccgggagaagaagacctcctggaagaaccagatggagcctgagcgctgccgcatccagacagagttcaaccagctgaggaacatcctggacagagtggagcagcgggagctgaagaagctggagcaggaggagaagaagggcctgcgcatcatcgaggaggccgagaatgacctggtgcaccagacccagagcctgcgggagctgatcagtgacctggagcggcgctgccagggcagcaccatggagctgctgcaggatgtgtctgatgtgacagagaggtctgagttctggaccctgaggaagccagaggccctgcccaccaagctgcgctccatgttccgggccccagacctgaagaggatgctgcgggtgtgccgggagctgacagatgtgcagagctactgggtggatgtgaccctgaacccccacacagccaacctgaacctggtgctggccaagaacagacggcaggtgcgctttgtgggcgccaaggtgtctggccccagctgcctggagaagcactatgactgcagcgtgctgggcagccagcacttcagcagcggcaagcactactgggaggtggatgtggccaagaagacagcctggatcctgggcgtgtgcagcaacagcctgggccccaccttctccttcaaccactttgcccagaaccacagcgcctacagccgctaccagccccagagcggctactgggtgattggcctgcagcacaaccacgagtaccgggcctatgaggacagcagccccagcctgctgctgtccatgacagtgcccccaagaagagtgggcgtcttcctggactatgaagctggcaccgtgtccttctacaacgtgaccaaccacggcttccccatctacaccttcagcaagtactacttccccaccaccctgtgcccctacttcaacccctgcaactgtgtgatccccatgaccctgcggcggcccagcagctag

SEQ ID NO: 174393 - DNA, 1389 bp, synthetic construct
  misc_feature 1..1389: note = Description of Artificial Sequence: Synthetic coding sequence
  source 1..1389: mol_type = other DNA
atgaccagccctgtgctggtggacatccgggaggaggtgacctgccccatctgcctggagctgctgacagagcccctgagcattgactgtggccacagcttctgccaggcctgcatcacccccaacggccgggagagcgtcatcggccaggagggggagaggagctgccctgtgtgccagaccagctaccagcccggcaacctgcggcccaacagacacctggccaacatcgtgcggcggctgcgggaggaggatggcaaggtgatctgctggctgtgtgagaggagccaggagcaccggggccaccacaccttcctggtggaggaggtggcccaggagtaccaggagaagttccaggagagcctgaagaagctgaagaatgaggagcaggaggccgagaagctgacagccttcatccgggagaagaagacctcctggaagaaccagatggagcctgagcgctgccgcatccagacagagttcaaccagctgaggaacatcctggacagagtggagcagcgggagctgaagaagctggagcaggaggagaagaagggcctgcgcatcatcgaggaggccgagaatgacctggtgcaccagacccagagcctgcgggagctgatcagtgacctggagcggcgctgccagggcagcaccatggagctgctgcaggatgtgtctgatgtgacagagaggtctgagttctggaccctgaggaagccagaggccctgcccaccaagctgcgctccatgttccgggccccagacctgaagaggatgctgcgggtgtgccgggagctgacagatgtgcagagctactgggtggatgtgaccctgaacccccacacagccaacctgaacctggtgctggccaagaacagacggcaggtgcgctttgtgggcgccaaggtgtctggccccagctgcctggagaagcactatgactgcagcgtgctgggcagccagcacttcagcagcggcaagcactactgggaggtggatgtggccaagaagacagcctggatcctgggcgtgtgcagcaacagcctgggccccaccttctccttcaaccactttgcccagaaccacagcgcctacagccgctaccagccccagagcggctactgggtgattggcctgcagcacaaccacgagtaccgggcctatgaggacagcagccccagcctgctgctgtccatgacagtgcccccaagaagagtgggcgtcttcctggactatgaagctggcaccgtgtccttctacaacgtgaccaaccacggcttccccatctacaccttcagcaagtactacttccccaccaccctgtgcccctacttcaacccctgcaactgtgtgatccccatgaccctgcggcggcccagcagctag

SEQ ID NO: 174394 - DNA, 1188 bp, synthetic construct
  misc_feature 1..1188: note = Description of Artificial Sequence: Synthetic coding sequence
  source 1..1188: mol_type = other DNA
atgtgtggcagcgagcggccctggaggaagacagctgccctgctgagcggcggctgggagggccacctgctggcctgtgagaggagccaggagcaccggggccaccacaccttcctggtggaggaggtggcccaggagtaccaggagaagttccaggagagcctgaagaagctgaagaatgaggagcaggaggccgagaagctgacagccttcatccgggagaagaagacctcctggaagaaccagatggagcctgagcgctgccgcatccagacagagttcaaccagctgaggaacatcctggacagagtggagcagcgggagctgaagaagctggagcaggaggagaagaagggcctgcgcatcatcgaggaggctgaaaatgacctggtgcaccagacccagagcctgcgggagctgatcagtgacctggagcggcgctgccagggcagcaccatggagctgctgcaggatgtgtctgatgtgacagagaggtctgagttctggaccctgaggaagccagaggccctgcccaccaagctgcgctccatgttccgggccccagacctgaagaggatgctgcgggtgtgccgggagctgacagatgtgcagagctactgggtggatgtgaccctgaacccccacacagccaacctgaacctggtgctggccaagaacagacggcaggtgcgctttgtgggcgccaaggtgtctggccccagctgcctggagaagcactatgactgcagcgtgctgggcagccagcacttcagcagcggcaagcactactgggaggtggatgtggccaagaagacagcctggatcctgggcgtgtgcagcaacagcctgggccccaccttctccttcaaccactttgcccagaaccacagcgcctacagccgctaccagccccagagcggctactgggtgattggcctgcagcacaaccacgagtaccgggcctatgaggacagcagccccagcctgctgctgtccatgacagtgcccccccggcgggtgggcgtcttcctggactatgaggccggcaccgtgtccttctacaacgtgaccaaccacggcttccccatctacaccttcagcaagtactacttccccaccaccctgtgcccctacttcaacccctgcaactgtgtgatccccatgaccctgcggcggcccagcagctag

SEQ ID NO: 174395 - DNA, 942 bp, synthetic construct
  misc_feature 1..942: note = Description of Artificial Sequence: Synthetic coding sequence
  source 1..942: mol_type = other DNA
atggagcctgagcgctgccgcatccagacagagttcaaccagctgaggaacatcctggacagagtggagcagcgggagctgaagaagctggagcaggaggagaagaagggcctgcgcatcatcgaggaggctgaaaatgacctggtgcaccagacccagagcctgcgggagctgatcagtgacctggagcggcgctgccagggcagcaccatggagctgctgcaggatgtgtctgatgtgacagagaggtctgagttctggaccctgaggaagccagaggccctgcccaccaagctgcgctccatgttccgggccccagacctgaagaggatgctgcgggtgtgccgggagctgacagatgtgcagagctactgggtggatgtgaccctgaacccccacacagccaacctgaacctggtgctggccaagaacagacggcaggtgcgctttgtgggcgccaaggtgtctggccccagctgcctggagaagcactatgactgcagcgtgctgggcagccagcacttcagcagcggcaagcactactgggaggtggatgtggccaagaagacagcctggatcctgggcgtgtgcagcaacagcctgggccccaccttctccttcaaccactttgcccagaaccacagcgcctacagccgctaccagccccagagcggctactgggtgattggcctgcagcacaaccacgagtaccgggcctatgaggacagcagccccagcctgctgctgtccatgacagtgcccccccggcgggtgggcgtcttcctggactatgaggccggcaccgtgtccttctacaacgtgaccaaccacggcttccccatctacaccttcagcaagtactacttccccaccaccctgtgcccctacttcaacccctgcaactgtgtgatccccatgaccctgcggcggcccagcagctag

SEQ ID NO: 174396 - DNA, 942 bp, synthetic construct; identical to SEQ ID NO: 174395
  misc_feature 1..942: note = Description of Artificial Sequence: Synthetic coding sequence
  source 1..942: mol_type = other DNA

SEQ ID NO: 174397 - DNA, 942 bp, synthetic construct; identical to SEQ ID NO: 174395
  misc_feature 1..942: note = Description of Artificial Sequence: Synthetic coding sequence
  source 1..942: mol_type = other DNA

SEQ ID NO: 174398 - DNA, 942 bp, synthetic construct; identical to SEQ ID NO: 174395
  misc_feature 1..942: note = Description of Artificial Sequence: Synthetic coding sequence
  source 1..942: mol_type = other DNA

SEQ ID NO: 174399 - DNA, 3651 bp, synthetic construct
  misc_feature 1..3651: note = Description of Artificial Sequence: Synthetic coding sequence
  source 1..3651: mol_type = other DNA
atggccaggaactgcagcgagtgcaaggagaagagagctgcccacatcctgtgcacctactgcaaccgctggctgtgcagcagctgcacagaggagcaccgccacagccctgtgcctgggggccccttcttcccccgggcccagaagggcagccctggggtgaatggaggccctggggacttcaccctgtactgccccctgcacacccaggaggtgctgaagctgttctgtgagacctgtgacatgctgacctgccacagctgcctggtggtggagcacaaggagcaccgctgccgccacgtggaggaggtgctgcagaaccagaggatgctgctggagggcgtgaccacccaggtggcccacaagaagagcagcctgcagaccagcgccaagcagatcgaggaccgcatctttgaggtgaagcaccagcacaggaaggtggagaaccagatcaagatggccaagatggtgctgatgaatgagctgaacaagcaggccaacggcctcatcgaggagctggagggcatcaccaatgaaaggaagaggaagctggagcagcagctgcagagcatcatggtgctgaaccggcagtttgagcacgtgcagaacttcatcaactgggccgtgtgcagcaagacctctgtgcccttcctgttcagcaaggagctgattgtgttccagatgcagaggctgctggagaccagctgcaacacagaccccggcagcccctggagcatccgcttcacctgggagcccaacttctggaccaagcagctggccagcctgggctgcatcaccacagaaggaggccagatgagcagagcagatgccccagcctacggcggcctgcagggcagcagccccttctaccagagccaccagagccctgtggcccagcaggaggccctgagccaccccagccacaagttccagagccctgctgtgtgcagcagctctgtgtgctgcagccactgcagccctgtgagccccagcctgaagggccaggtgcccccacccagcatccacccagcccacagcttccggcagcccccagagatggtgccccagcagctgggcagcctgcagtgcagcgccctgctgccccgggagaaggagctggcctgcagcccccacccccccaagctgctgcagccctggctggagacccagccccctgtggagcaggagagcaccagccagaggctgggccagcagctgaccagccagcctgtgtgcatcgtgcccccccaggatgtgcagcagggcgcccacgcccagcccaccctgcagacccccagcatccaggtgcagtttggccaccaccagaagctgaagctgagccacttccagcagcagccccagcagcagctgcccccacctcctccacccctgccccaccccccaccacccctgcccccaccaccccagcagccccacccccccctgccccccagccagcacctggccagcagccagcacgagagccccccaggccctgcctgcagccagaacatggacatcatgcaccacaagtttgagctggaggagatgcagaaggacctggagctgctgctgcaggcccagcagcccagcctgcagctgagccagaccaagagcccccagcacctgcagcagaccatcgtgggccagatcaactacatcgtgcggcagcctgcccctgtgcagagccagagccaggaggagaccctgcaggccacagatgagcccccagccagccagggcagcaagccagccctgcccctggacaagaacacagctgctgccctgccccaggccagcggggaggagacccccctgtctgtgccccctgtggacagcaccatccagcacagcagccccaacgtggtgaggaagcacagcaccagcctgagcatcatgggcttcagcaacaccctggagatggagctgagcagcacccggctggagcggcccctggagccccagatccagagcgtgagcaacctgacagctggggccccccaggccgtgcccagcctgctgagcgccccacccaagatggtgagcagcctgacctctgtgcagaaccaggccatgcccagcctgaccaccagccacctgcagacagtgcccagcctggtgcacagcaccttccagagcatgcccaacctgatcagtgacagcccccaggccatggccagcctggccagtgaccacccccaggccggccccagcctgatgagcggccacacccaggccgtgcccagcctggccacctgccccctgcagagcatcccccctgtgtctgacatgcagcctgagaccggcagcagcagcagcagcggccgcaccagcggcagcctgtgccccagagatggagctgaccccagcctggagaatgccctgtgcaaggtgaagctggaggagcccatcaacctgtctgtgaagaagccacccctggcccctgtggtgtccaccagcacagccctgcagcagtaccagaaccccaaggaatgtgaaaattttgagcagggcgccctggagctggatgccaaggagaaccagagcatccgggccttcaacagcgagcacaagatcccctacgtgcggctggagcggctgaagatctgtgccgccagcagcggggagatgcctgtgttcaagctgaagccccagaagaatgaccaggacggcagcttcctgctgatcattgaatgtggcacagagagcagctccatgagcatcaaggtgtcccaggaccggctgtctgaggccacccaggcccctggcctggagggcaggaaggtgacagtgaccagcctggccggccagaggcctcctgaggtggagggcaccagccctgaggagcacaggctcatccccaggacccctggggccaagaagggccccccagcccccattgaaaatgaagacttctgtgctgtgtgcctgaatggaggagagctgctgtgctgtgaccgctgccccaaggtgttccacctgagctgccacgtgcctgccctgctgtccttccctggaggagagtgggtgtgcaccctgtgccgcagcctgacccagcctgagatggagtatgactgtgaaaatgcctgctacaaccagcccggcatgagggccagccctggcctgtccatgtatgaccagaagaagtgtgagaagctggtgctgagcctgtgctgcaacaacctgagcctgcccttccacgagcctgtgagccccctggcccggcactactaccagatcatcaagaggcccatggacctgagcatcatccggaggaagctgcagaagaaggaccctgcccactacaccaccccagaggaggtggtgtctgatgtgcggctgatgttctggaactgtgccaagttcaactacccagattctgaggtggccgaggccggccgctgcctggaggtgttctttgagggctggctgaaggagatctacccagagaagagatttgcccagccccggcaggaggacagcgacagcgaggaggtgagcagcgagagcggctgcagcaccccccagggcttcccctggccaccctacatgcaggagggcatccagcccaagagaagaagaagacacatggagaatgaaagagccaagaggatgtccttccggctggccaacagcatcagccaggtgtag

SEQ ID NO: 174400 - DNA, 1458 bp, synthetic construct
  misc_feature 1..1458: note = Description of Artificial Sequence: Synthetic coding sequence
  source 1..1458: mol_type = other DNA
atggaccccacagccctggtggaggccatcgtggaggaggtggcctgccccatctgcatgaccttcctgcgggagcccatgagcattgactgtggccacagcttctgccacagctgcctgagcggcctgtgggagatccctggagagagccagaactggggctacacctgccccctgtgccgggcccctgtgcagcccaggaacctgcggcccaactggcagctggccaacgtggtggagaaggtgcggctgctgcggctgcaccctggcatgggcctgaagggggacctgtgtgaaagacatggagagaagctgaagatgttctgcaaggaggatgtgctgatcatgtgtgaggcctgcagccagagccctgagcacgaggcccacagcgtggtgcccatggaggatgtggcctgggagtacaagtgggagctgcacgaggccctggagcacctgaagaaggagcaggaggaggcctggaagctggaggtgggggagaggaagaggacagccacctggaagatccaggtggagaccaggaagcagagcatcgtgtgggagtttgagaagtaccagaggctgctggagaagaagcagcccccccaccggcagctgggcgctgaggtggccgccgccctggccagcctgcagcgggaggccgctgagaccatgcagaagctggagctgaaccacagcgagctgatccagcagagccaggtgctgtggaggatgattgctgagctgaaggagaggagccagaggcctgtgcgctggatgctgcaggacatccaggaggtgctgaacagaagcaagtcctggagcctgcagcagcctgagcccatcagcctggagctgaagacagactgccgggtgctgggcctgcgggagatcctgaagacctacgccgcagatgtgcggctggaccctgacacagcctacagccggctgattgtgtctgaggacaggaagagggtgcactatggagacaccaaccagaagctgcctgacaaccctgagcgcttctaccgctacaacatcgtgctgggcagccagtgcatcagcagcggccgccactactgggaggtggaggtgggggacagaagtgagtggggcctgggcgtgtgcaagcagaatgtggacaggaaggaggtggtgtacctgagcccccactacggcttctgggtgatccggctgaggaaaggaaatgagtaccgggccggcacagatgagtaccccatcctgagcctgcctgtgcccccaagaagagtgggcatctttgtggactatgaggcccatgacatctccttctacaacgtgacagactgtggcagccacatcttcaccttcccccgctaccccttccctggccgcctgctgccctacttcagcccctgctacagcatcggcaccaacaacacagcccccctggccatctgcagcctggatggagaggactag

SEQ ID NO: 174401 - DNA, 621 bp, synthetic construct
  misc_feature 1..621: note = Description of Artificial Sequence: Synthetic coding sequence
  source 1..621: mol_type = other DNA
atgcagaagctggagctgaagacagactgccgggtgctgggcctgcgggagatcctgaagacctatgctgctgatgtgcggctggaccctgacacagcctacagccgcctcatcgtgtctgaggacaggaagagggtgcactacggggacaccaaccagaagctgcctgacaaccctgagcgcttctaccgctacaacatcgtgctgggcagccagtgcatcagcagcggccgccactactgggaggtggaggtgggggacagaagtgagtggggcctgggcgtgtgcaagcagaatgtggacaggaaggaggtggtgtacctgagcccccactacggcttctgggtgatccggctgaggaaaggaaatgagtacagagctggaacagatgagtaccccatcctgagcctgcctgtgcccccccggcgggtgggcatctttgtggactatgaggcccatgacatctccttctacaacgtgacagactgtggcagccacatcttcaccttcccccgctaccccttccctggccgcctgctgccctacttcagcccctgctacagcatcggcaccaacaacacagcccccctggccatctgcagcctggatggagaagattag

SEQ ID NO: 174402 - DNA, 1536 bp, synthetic construct
  misc_feature 1..1536: note = Description of Artificial Sequence: Synthetic coding sequence
  source 1..1536: mol_type = other DNA
atggctgctgtgggccccaggacaggccctggcaccggggctgaggccctggccctggccgctgagctgcagggcgaggccacctgcagcatctgcctggagctgttccgggagcctgtgtctgtggagtgtggccacagcttctgccgggcctgcatcggccgctgctgggagaggcctggggccggctctgtgggcgccgccacccgggccccacccttccccctgccctgcccccagtgccgggagcccgcccggcccagccagctgcggcccaaccggcagctggccgctgtggccaccctgctgcggcgcttcagcctgcctgctgctgcccctggagagcacggcagccaggccgccgccgcccgggctgctgctgcccgctgtggccagcacggggagcccttcaagctgtactgccaggatgatggccgggccatctgtgtggtgtgtgaccgggcccgggagcaccgggagcacgctgtgctgcccctggatgaagctgtgcaggaggccaaggagctgctggagagccggctgcgggtgctgaagaaggagctggaggactgtgaggtgttccgcagcacagagaagaaggagagcaaggagctgctgaagcagatggctgctgagcaggagaaggtgggcgctgagttccaggccctgcgggccttcctggtggagcaggagggccgcctgctgggccgcctggaggagctgagccgggaggtggcccagaagcagaatgaaaacctggcccagctgggcgtggagatcacccagctgagcaagctgagcagccagatccaggagacagcccagaagccagacctggacttcctgcaggagttcaagagcaccctgagccgctgcagcaatgtgcccggccccaagcccaccaccgtgtcctctgagatgaagaacaaggtgtggaatgtgtccctgaagacctttgtgctgaagggcatgctgaagaagttcaaggaggacctgcggggggagctggagaaggaggagaaggtggagctgaccctggaccctgacacagccaaccccaggctcatcctgagcctggacctgaagggcgtgcggctgggggagcgggcccaggacctgcccaaccacccctgccgctttgacaccaacaccagggtgctggccagctgtggcttcagcagcggccgccaccactgggaggtggaggtgggcagcaaggatggctgggcctttggagtggcccgggagagcgtgcggaggaagggcctgacccccttcaccccagaggagggcgtgtgggccctgcagctgaatggaggccagtactgggccgtgaccagccctgagaggagccccctgagctgtggccacctgagccgggtgcgggtggccctggacctggaggtgggcgctgtgtccttctatgctgtggaggacatgaggcacctgtacaccttccgggtgaacttccaggagagggtcttccccctcttctctgtgtgcagcacaggcacctacctgcgcatctggccctag

SEQ ID NO: 174403 - DNA, 666 bp, synthetic construct
  misc_feature 1..666: note = Description of Artificial Sequence: Synthetic coding sequence
  source 1..666: mol_type = other DNA
atggctgctgtgggccccaggacaggccctggcaccggggctgaggccctggccctggccgctgagctgcagggcgaggccacctgcagcatctgcctggagctgttccgggagcctgtgtctgtggagtgtggccacagcttctgccgggcctgcatcggccgctgctgggagaggcctggggccggctctgtgggcgccgccacccgggccccacccttccccctgccctgcccccagtgccgggagcccgcccggcccagccagctgcggcccaaccggcagctggccgctgtggccaccctgctgcggcgcttcagcctgcctgctgctgcccctggagagcacggcagccaggccgccgccgcccgggctgctgctgcccgctgtggccagcacggggagcccttcaagctgtactgccaggatgatggccgggccatctgtgtggtgtgtgaccgggcccgggagcaccgggagcacgctgtgctgcccctggatgaagctgtgcaggaggccaaggagctgctggagagccggctgcgggtgctgaagaaggagctggaggactgtgaggtgttccgcagcacagagaagaaggagagcaaggagctgctggtgtcccaggccccagctggccccccctgggacatcacagaggcctag

SEQ ID NO: 174404 - DNA, 912 bp, synthetic construct
  misc_feature 1..912: note = Description of Artificial Sequence: Synthetic coding sequence
  source 1..912: mol_type = other DNA
atggctgctgagcaggagaaggtgggcgctgagttccaggccctgcgggccttcctggtggagcaggagggccgcctgctgggccgcctggaggagctgagccgggaggtggcccagaagcagaatgaaaacctggcccagctgggcgtggagatcacccagctgagcaagctgagcagccagatccaggagacagcccagaagccagacctggacttcctgcaggagttcaagagcaccctgagccgctgcagcaatgtgcccggccccaagcccaccaccgtgtcctctgagatgaagaacaaggtgtggaatgtgtccctgaagacctttgtgctgaagggcatgctgaagaagttcaaggaggacctgcggggggagctggagaaggaggagaaggtggagctgaccctggaccctgacacagccaaccccaggctcatcctgagcctggacctgaagggcgtgcggctgggggagcgggcccaggacctgcccaaccacccctgccgctttgacaccaacaccagggtgctggccagctgtggcttcagcagcggccgccaccactgggaggtggaggtgggcagcaaggatggctgggcctttggagtggcccgggagagcgtgcggaggaagggcctgacccccttcaccccagaggagggcgtgtgggccctgcagctgaatggaggccagtactgggccgtgaccagccctgagaggagccccctgagctgtggccacctgagccgggtgcgggtggccctggacctggaggtgggcgctgtgtccttctatgctgtggaggacatgaggcacctgtacaccttccgggtgaacttccaggagagggtcttccccctcttctctgtgtgcagcacaggcacctacctgcgcatctggccctag

SEQ ID NO: 174405 - DNA, 912 bp, synthetic construct; identical to SEQ ID NO: 174404
  misc_feature 1..912: note = Description of Artificial Sequence: Synthetic coding sequence
  source 1..912: mol_type = other DNA

SEQ ID NO: 174406 - DNA, 990 bp, synthetic construct
  misc_feature 1..990: note = Description of Artificial Sequence: Synthetic coding sequence
  source 1..990: mol_type = other DNA
atgacccaggccaccggccagatgctgtgcctgcacgtgcaggtgcccctgcagctgctgctgctgggccagaagcagatggctgctgagcaggagaaggtgggcgctgagttccaggccctgcgggccttcctggtggagcaggagggccgcctgctgggccgcctggaggagctgagccgggaggtggcccagaagcagaatgaaaacctggcccagctgggcgtggagatcacccagctgagcaagctgagcagccagatccaggagacagcccagaagccagacctggacttcctgcaggagttcaagagcaccctgagccgctgcagcaatgtgcccggccccaagcccaccaccgtgtcctctgagatgaagaacaaggtgtggaatgtgtccctgaagacctttgtgctgaagggcatgctgaagaagttcaaggaggacctgcggggggagctggagaaggaggagaaggtggagctgaccctggaccctgacacagccaaccccaggctcatcctgagcctggacctgaagggcgtgcggctgggggagcgggcccaggacctgcccaaccacccctgccgctttgacaccaacaccagggtgctggccagctgtggcttcagcagcggccgccaccactgggaggtggaggtgggcagcaaggatggctgggcctttggagtggcccgggagagcgtgcggaggaagggcctgacccccttcaccccagaggagggcgtgtgggccctgcagctgaatggaggccagtactgggccgtgaccagccctgagaggagccccctgagctgtggccacctgagccgggtgcgggtggccctggacctggaggtgggcgctgtgtccttctatgctgtggaggacatgaggcacctgtacaccttccgggtgaacttccaggagagggtcttccccctcttctctgtgtgcagcacaggcacctacctgcgcatctggccctag

SEQ ID NO: 174407 - DNA, 912 bp, synthetic construct; identical to SEQ ID NO: 174404
  misc_feature 1..912: note = Description of Artificial Sequence: Synthetic coding sequence
  source 1..912: mol_type = other DNA

SEQ ID NO: 174408 - DNA, 1434 bp, synthetic construct
  misc_feature 1..1434: note = Description of Artificial Sequence: Synthetic coding sequence
  source 1..1434: mol_type = other DNA
atgtctgctgcccctggcctgctgcaccaggagctgagctgccccctgtgcctgcagctgtttgatgcccctgtgacagcagaatgtggccacagcttctgccgggcctgcctgggccgggtggccggggagcctgctgctgatggcaccgtgctgtgcccctgctgccaggcccccacccggccccaggccctgagcaccaacctgcagctggcccggctggtggagggcctggcccaggtgccccagggccactgtgaggagcacctggaccccctgagcatctactgtgagcaggaccgggccctggtgtgtggggtgtgtgccagcctgggcagccaccggggccaccggctgctgcctgctgctgaggcccacgcccggctgaagacccagctgccccagcagaagctgcagctgcaggaggcctgcatgaggaaggagaagtctgtggccgtgctggagcaccagctggtggaggtggaggagaccgtgcggcagttcagaggagctgtgggggagcagctgggcaagatgagggtcttcctggccgccctggagggcagcctggaccgggaggccgagcgggtgcggggggaggccggcgtggccctgcggcgggagctgggcagcctgaacagctacctggagcagctgcggcagatggagaaggtgctggaggaggtggccgacaagccccagacagagttcctgatgaagtactgcctggtgaccagccggctgcagaagatcctggccgagagccccccaccagcccggctggacatccagctgcccatcatcagtgatgacttcaagttccaggtgtggaggaagatgttccgggccctgatgcctgccctggaggagctgacctttgaccccagcagcgcccaccccagcctggtggtgagcagcagtggaagaagagtggagtgcagcgagcagaaggcccctcctgctggggaggacccccggcagtttgacaaggctgtggccgtggtggcccaccagcagctgtctgagggggagcactactgggaggtggatgtgggggacaagccccgctgggccctgggcgtgattgctgctgaggccccccggcggggccgcctgcatgctgtgcccagccagggcctgtggctgctgggcctgcgggagggcaagatcctggaggcccacgtggaggccaaggagccccgggccctgcggagccctgagcggcggcccaccagaattggcctgtacctgagctttggagatggagtgctgtccttctatgatgccagtgatgctgatgccctggtgcccctgtttgccttccacgagcggctgcccaggcctgtgtaccccttctttgatgtgtgctggcatgacaagggcaagaatgcccagcccctgctgctggtgggccctgagggcgctgaggcctag

SEQ ID NO: 174409 - DNA, 753 bp, synthetic construct
  misc_feature 1..753: note = Description of Artificial Sequence: Synthetic coding sequence
  source 1..753: mol_type = other DNA
atggcctggcaggtgtccctgctggagctggaggaccggctgcagtgccccatctgcctggaggtgttcaaggagagcctgatgctgcagtgtggccacagctactgcaagggctgcctggtgtccctgagctaccacctggacaccaaggtgcgctgccccatgtgctggcaggtggtggatggcagcagcagcctgcccaacgtgtccctggcctgggtgattgaggccctgcggctgcccggggaccctgagcccaaggtgtgtgtgcaccacaggaaccccctgagcctcttctgtgagaaggaccaggagctgatctgtggcctgtgtggcctgctgggcagccaccagcaccaccctgtgacccctgtgtccacagtgtgcagcaggatgaaggaggagctggccgccctcttcagcgagctgaagcaggagcagaagaaggtggatgagctgattgccaagctggtgaagaacagaacccgcatcgtgaatgaaagtgatgtgttctcctgggtgatccggcgggagttccaggagctgcggcaccctgtggatgaggagaaggcccgctgcctggagggcattggaggccacacccggggcctggtggccagcctggacatgcagctggagcaggcccagggcacccgggagcggctggcccaggccgagtgtgtgctggagcagtttggaaatgaagaccaccacgagttcatctggaagttccacagcatggccagcaggtag

SEQ ID NO: 174410 - DNA, 849 bp, synthetic construct
  misc_feature 1..849: note = Description of Artificial Sequence: Synthetic coding sequence
  source 1..849: mol_type = other DNA
atggcctggcaggtgtccctgctggagctggaggaccggctgcagtgccccatctgcctggaggtgttcaaggagagcctgatgctgcagtgtggccacagctactgcaagggctgcctggtgtccctgagctaccacctggacaccaaggtgcgctgccccatgtgctggcaggtggtggatggcagcagcagcctgcccaacgtgtccctggcctgggtgattgaggccctgcggctgcccggggaccctgagcccaaggtgtgtgtgcaccacaggaaccccctgagcctcttctgtgagaaggaccaggagctgatctgtggcctgtgtggcctgctgggcagccaccagcaccaccctgtgacccctgtgtccacagtgtgcagcaggatgaaggaggagctggccgccctcttcagcgagctgaagcaggagcagaagaaggtggatgagctgattgccaagctggtgaagaacagaacccgcatcgtgaatgaaagtgatgtgttctcctgggtgatccggcgggagttccaggagctgcggcaccctgtggatgaggagaaggcccgctgcctggagggcattggaggccacacccggggcctggtggccagcctggacatgcagctggagcaggcccagggcacccgggagcggctggcccaggccgagtgtgtgctggagcagtttggaaatgaagaccaccacgagttcatctggaagttccacagcatggccagccggctgaccaagacagaggagctggagaagaagtggagaaatggcctggccgccagccacagcctgccccagcaggtgcggccccagaggaggaccccctag

SEQ ID NO: 174411 - DNA, 753 bp, synthetic construct; identical to SEQ ID NO: 174409
  misc_feature 1..753: note = Description of Artificial Sequence: Synthetic coding sequence
  source 1..753: mol_type = other DNA

SEQ ID NO: 174412 - DNA, 750 bp, synthetic construct
  misc_feature 1..750: note = Description of Artificial Sequence: Synthetic coding sequence
  source 1..750: mol_type = other DNA
atggcctggcaggtgtccctgctggagctggaggaccggctgcagtgccccatctgcctggaggtgttcaaggagagcctgatgctgcagtgtggccacagctactgcaagggctgcctggtgtccctgagctaccacctggacaccaaggtgcgctgccccatgtgctggcaggtggtggatggcagcagcagcctgcccaacgtgtccctggcctgggtgattgaggccctgcggctgcccggggaccctgagcccaaggtgtgtgtgcaccacaggaaccccctgagcctcttctgtgagaaggaccaggagctgatctgtggcctgtgtggcctgctgggcagccaccagcaccaccctgtgacccctgtgtccacagtgtgcagcaggatgaaggaggagctggccgccctcttcagcgagctgaagcaggagcagaagaaggtggatgagctgattgccaagctggtgaagaacagaacccgcatcgtgaatgaaagtgatgtgttctcctgggtgatccggcgggagttccaggagctgcggcaccctgtggatgaggagaaggcccgctgcctggagggcattggaggccacacccggggcctggtggccagcctggacatgcagctggagcaggcccagggcacccgggagcggctggcccaggccgagtgtgtgctggagcagtttggaaatgaagaccaccacgagttcatctggttccacagcatggccagcaggtag

SEQ ID NO: 174413 - DNA, 753 bp, synthetic construct
  misc_feature 1..753: note = Description of Artificial Sequence: Synthetic coding sequence
  source 1..753: mol_type = other DNA
atggcctggcaggtgtccctgctggagctggaggactggctgcagtgccccatctgcctggaggtgttcaaggagagcctgatgctgcagtgtggccacagctactgcaagggctgcctggtgtccctgagctaccacctggacaccaaggtgcgctgccccatgtgctggcaggtggtggatggcagcagcagcctgcccaacgtgtccctggcctgggtgattgaggccctgcggctgcccggggaccctgagcccaaggtgtgtgtgcaccacaggaaccccctgagcctcttctgtgagaaggaccaggagctgatctgtggcctgtgtggcctgctgggcagccaccagcaccaccctgtgacccctgtgtccacagtgtgcagcaggatgaaggaggagctggccgccctcttcagcgagctgaagcaggagcagaagaaggtggatgagctgattgccaagctggtgaagaacagaacccgcatcgtgaatgaaagtgatgtgttctcctgggtgatccggcgggagttccaggagctgcggcaccctgtggatgaggagaaggcccgctgcctggagggcattggaggccacacccggggcctggtggccagcctggacatgcagctggagcaggcccagggcacccgggagcggctggcccaggccgagtgtgtgctggagcagtttggaaatgaagaccaccacgagttcatctggaagttccacagcatggccagcaggtag

SEQ ID NO: 174414 - DNA, 750 bp, synthetic construct
  misc_feature 1..750: note = Description of Artificial Sequence: Synthetic coding sequence
  source 1..750: mol_type = other DNA
atggcctggcaggtgtccctgctggagctggaggactggctgcagtgccccatctgcctggaggtgttcaaggagagcctgatgctgcagtgtggccacagctactgcaagggctgcctggtgtccctgagctaccacctggacaccaaggtgcgctgccccatgtgctggcaggtggtggatggcagcagcagcctgcccaacgtgtccctggcctgggtgattgaggccctgcggctgcccggggaccctgagcccaaggtgtgtgtgcaccacaggaaccccctgagcctcttctgtgagaaggaccaggagctgatctgtggcctgtgtggcctgctgggcagccaccagcaccaccctgtgacccctgtgtccacagtgtgcagcaggatgaaggaggagctggccgccctcttcagcgagctgaagcaggagcagaagaaggtggatgagctgattgccaagctggtgaagaacagaacccgcatcgtgaatgaaagtgatgtgttctcctgggtgatccggcgggagttccaggagctgcggcaccctgtggatgaggagaaggcccgctgcctggagggcattggaggccacacccggggcctggtggccagcctggacatgcagctggagcaggcccagggcacccgggagcggctggcccaggccgagtgtgtgctggagcagtttggaaatgaagaccaccacgagttcatctggttccacagcatggccagcaggtag

SEQ ID NO: 174415 - DNA, 1656 bp, synthetic construct
  misc_feature 1..1656: note = Description of Artificial Sequence: Synthetic coding sequence
  source 1..1656: mol_type = other DNA
atggccgagaactggaagaactgctttgaggaggagctgatctgccccatctgcctgcacgtgtttgtggagcctgtgcagctgccctgcaagcacaacttctgccggggctgcattggagaggcctgggccaaggacagcggcctggtgcgctgcccagagtgcaaccaggcctacaaccagaagccaggcctggagaagaacctgaagctgaccaacatcgtggagaagttcaatgccctgcacgtggagaagcccccagctgccctgcactgtgtgttctgccggcggggcccccccctgcctgcccagaaggtgtgcctgcgctgtgaggccccctgctgccagagccacgtgcagacccacctgcagcagcccagcacagcccggggccacctgctggtggaggctgatgatgtgcgggcctggagctgcccccagcacaatgcctaccgcctgtaccactgtgaggccgagcaggtggccgtgtgccagtactgctgctactacagcggggcccaccagggccacagcgtgtgtgatgtggagatcagaagaaatgagatcaggaagatgctgatgaagcagcaggaccggctggaggagcgggagcaggacatcgaggaccagctgtacaagctggagagtgacaagaggctggtggaggagaaggtgaaccagctgaaggaggaggtgcggctgcagtatgagaagctgcaccagctgctggatgaggacctgcggcagacagtggaggtgctggacaaggcccaggccaagttctgcagtgaaaatgctgcccaggccctgcacctgggggagaggatgcaggaggccaagaagctgctgggcagcctgcagctgctgtttgacaagacagaagatgtgtccttcatgaagaacaccaagtctgtgaagatcctgatggacaggacccagacctgcaccagcagcagcctgagccccaccaagattggccacctgaacagcaagctgttcctgaatgaggtggccaagaaggagaagcagctgaggaagatgctggagggccccttcagcacccctgtgcccttcctgcagagcgtgcccctgtacccctgtggggtgagcagcagcggggctgagaagaggaagcacagcacagccttccctgaggccagcttcctggagaccagcagcggccctgtgggcggccagtacggggctgctggaacagccagcggggagggccagagcggccagcccctgggcccctgcagcagcacccagcacctggtggccctgcctggaggagcccagcctgtgcacagcagccctgtgttcccccccagccagtaccccaacggcagcgctgcccagcagcccatgctgccccagtatggaggcaggaagatcctggtgtgcagcgtggacaactgctactgcagctctgtggccaaccacggcggccaccagccctaccccaggagcggccacttcccctggacagtgcccagccaggagtacagccaccccctgccccccaccccatctgtgccccagagcctgcccagcctggccgtgcgggactggctggatgccagccagcagcccggccaccaggacttctacagagtgtatggccagcccagcaccaagcactacgtgaccagctag

SEQ ID NO: 174416 - DNA, 1653 bp, synthetic construct
  misc_feature 1..1653: note = Description of Artificial Sequence: Synthetic coding sequence
  source 1..1653: mol_type = other DNA
atggccgagaactggaagaactgctttgaggaggagctgatctgccccatctgcctgcacgtgtttgtggagcctgtgcagctgccctgcaagcacaacttctgccggggctgcattggagaggcctgggccaaggacagcggcctggtgcgctgcccagagtgcaaccaggcctacaaccagaagccaggcctggagaagaacctgaagctgaccaacatcgtggagaagttcaatgccctgcacgtggagaagcccccagctgccctgcactgtgtgttctgccggcggggcccccccctgcctgcccagaaggtgtgcctgcgctgtgaggccccctgctgccagagccacgtgcagacccacctgcagcagcccagcacagcccggggccacctgctggtggaggctgatgatgtgcgggcctggagctgcccccagcacaatgcctaccgcctgtaccactgtgaggccgagcaggtggccgtgtgccagtactgctgctactacagcggggcccaccagggccacagcgtgtgtgatgtggagatcagaagaaatgagatccgcatgctgatgaagcagcaggaccggctggaggagcgggagcaggacatcgaggaccagctgtacaagctggagagtgacaagaggctggtggaggagaaggtgaaccagctgaaggaggaggtgcggctgcagtatgagaagctgcaccagctgctggatgaggacctgcggcagacagtggaggtgctggacaaggcccaggccaagttctgcagtgaaaatgctgcccaggccctgcacctgggggagaggatgcaggaggccaagaagctgctgggcagcctgcagctgctgtttgacaagacagaagatgtgtccttcatgaagaacaccaagtctgtgaagatcctgatggacaggacccagacctgcaccagcagcagcctgagccccaccaagattggccacctgaacagcaagctgttcctgaatgaggtggccaagaaggagaagcagctgaggaagatgctggagggccccttcagcacccctgtgcccttcctgcagagcgtgcccctgtacccctgtggggtgagcagcagtggagctgagaagaggaagcacagcacagccttccctgaggccagcttcctggagaccagcagcggccctgtgggcggccagtatggagctgctggaacagccagcggggagggccagagcggccagcccctgggcccctgcagcagcacccagcacctggtggccctgcccggcggggcccagcctgtgcacagcagccctgtgtttcctcccagccagtacccaaatggatctgctgcccagcagcccatgctgccccagtatggaggcaggaagatcctggtgtgcagcgtggacaactgctactgcagctctgtggccaaccacggcggccaccagccctaccccaggagcggccacttcccctggacagtgcccagccaggagtacagccaccccctgccccccacccccagcgtgccccagagcctgcccagcctggccgtgcgggactggctggatgccagccagcagcccggccaccaggacttctacagagtgtatggccagcccagcaccaagcactacgtgaccagctag

SEQ ID NO: 174417 - DNA, 2133 bp, synthetic construct
  misc_feature 1..2133: note = Description of Artificial Sequence: Synthetic coding sequence
  source 1..2133: mol_type = other DNA
atggaggagatggaggaggagctgaagtgccctgtgtgtggcagcttctaccgggagcccatcatcctgccctgcagccacaacctgtgccaggcctgtgccaggaacatcctggtgcagaccccagagagcgagagcccccagagccacagagctgctggcagcggcgtgtctgactatgactacctggacctggacaagatgagcctgtacagcgaggccgacagcggctacggcagctatggaggctttgccagcgcccccaccaccccctgccagaagagccccaatggagtgcgggtcttccccccagccatgcctcctccagccacccacctgagccctgccctggcccctgtgcccaggaacagctgcatcacctgcccccagtgccacaggagcctcatcctggatgaccggggcctgcggggcttccccaagaacagagtgctggagggcgtgattgaccgctaccagcagagcaaggccgccgccctgaagtgccagctgtgtgagaaggcccccaaggaggccaccgtgatgtgtgagcagtgtgatgtgttctactgtgacccctgccgcctgcgctgccaccccccccggggccccctggccaagcaccggctggtgcccccagcccagggccgggtgtcccggcggctgagccccaggaaggtgtccacctgcacagaccacgagctggagaaccacagcatgtactgtgtgcagtgcaagatgcctgtgtgctaccagtgcctggaggagggcaagcacagcagccatgaggtgaaggccctgggcgccatgtggaagctgcacaagagccagctgagccaggccctgaatggcctgagtgaccgggccaaggaggccaaggagttcctggtgcagctgaggaacatggtgcagcagatccaggagaacagcgtggagtttgaggcctgcctggtggcccagtgtgatgccctgattgatgccctgaacagaaggaaggcccagctgctggcccgggtgaacaaggagcacgagcacaagctgaaggtggtgcgggaccagatcagccactgcaccgtgaagctgcggcagaccaccggcctgatggagtactgcctggaggtgatcaaggaaaatgaccccagcggcttcctgcagatcagtgatgccctgatcagaagagtgcacctgacagaggaccagtggggcaagggcaccctgacccccaggatgaccacagactttgacctgagcctggacaacagccccctgctgcagagcatccaccagctggactttgtgcaggtgaaggccagcagccctgtgcctgccacccccatcctgcagctggaggagtgctgcacccacaacaacagcgccaccctgtcctggaagcagccccccctgagcacagtgcctgcagatggctacatcctggagctggatgatggaaatggaggccagttccgggaggtgtatgtgggcaaggagaccatgtgcaccgtggatggcctgcacttcaacagcacctacaatgcccgggtgaaggccttcaacaagacaggagtgagcccctacagcaagaccctggtgctgcagaccagcgaggtggcctggtttgcctttgaccccggcagcgcccacagcgacatcatcctgagcaatgacaacctgactgtgacctgcagcagctatgatgacagagtggtgctgggcaagacaggcttcagcaagggcatccactactgggagctgactgtggacagatatgacaaccacccagaccctgccttcggcgtggccaggatggatgtgatgaaggatgtgatgctgggcaaggatgacaaggcctgggccatgtatgtggacaacaacagatcctggttcatgcacaacaacagccacaccaacagaacagaaggaggcatcaccaagggggccaccatcggcgtgctgctggacctgaacaggaagaacctgaccttcttcatcaatgatgagcagcagggccccatcgcctttgacaacgtggagggcctcttcttccctgctgtgtccctgaacagaaatgtgcaggtgaccctgcacacaggcctgcctgtgcctgacttctacagcagccgggccagcatcgcctag

SEQ ID NO: 174418 - DNA, 2409 bp, synthetic construct
  misc_feature 1..2409: note = Description of Artificial Sequence: Synthetic coding sequence
  source 1..2409: mol_type = other DNA
atggaggagatggaggaggagctgaagtgccctgtgtgtggcagcttctaccgggagcccatcatcctgccctgcagccacaacctgtgccaggcctgtgccaggaacatcctggtgcagaccccagagagcgagagcccccagagccacagagctgctggcagcggcgtgtctgactatgactacctggacctggacaagatgagcctgtacagcgaggccgacagcggctacggcagctatggaggctttgccagcgcccccaccaccccctgccagaagagccccaatggagtgcgggtcttccccccagccatgcctcctccagccacccacctgagccctgccctggcccctgtgcccaggaacagctgcatcacctgcccccagtgccacaggagcctcatcctggatgaccggggcctgcggggcttccccaagaacagagtgctggagggcgtgattgaccgctaccagcagagcaaggccgccgccctgaagtgccagctgtgtgagaaggcccccaaggaggccaccgtgatgtgtgagcagtgtgatgtgttctactgtgacccctgccgcctgcgctgccaccccccccggggccccctggccaagcaccggctggtgcccccagcccagggccgggtgtcccggcggctgagccccaggaaggtgtccacctgcacagaccacgagctggagaaccacagcatgtactgtgtgcagtgcaagatgcctgtgtgctaccagtgcctggaggagggcaagcacagcagccatgaggtgaaggccctgggcgccatgtggaagctgcacaagagccagctgagccaggccctgaatggcctgagtgaccgggccaaggaggccaaggagttcctggtgcagctgaggaacatggtgcagcagatccaggagaacagcgtggagtttgaggcctgcctggtggcccagtgtgatgccctgattgatgccctgaacagaaggaaggcccagctgctggcccgggtgaacaaggagcacgagcacaagctgaaggtggtgcgggaccagatcagccactgcaccgtgaagctgcggcagaccaccggcctgatggagtactgcctggaggtgatcaaggaaaatgaccccagcggcttcctgcagatcagtgatgccctgatcagaagagtgcacctgacagaggaccagtggggcaagggcaccctgacccccaggatgaccacagactttgacctgagcctggacaacagccccctgctgcagagcatccaccagctggactttgtgcaggtgaaggtgcctgccacccccatcctgcagctggaggagtgctgcacccacaacaacagcgccaccctgtcctggaagcagccccccctgagcacagtgcctgcagatggctacatcctggagctggatgatggaaatggaggccagttccgggaggtgtatgtgggcaaggagaccatgtgcaccgtggatggcctgcacttcaacagcacctacaatgcccgggtgaaggccttcaacaagacaggagtgagcccctacagcaagaccctggtgctgcagaccagcgaggacacagacagcgaggagcagaccctgcccttccctgtgcccagcgagcggctgcccctgcggaggatgagccccttcagcagcaccctgaacctgcagcccagcttccctggccgcagctactttgacttccgcagcagcccccaccagctgagcctgcacagcagcctgcagagcctgaatgcccctggctgcaactttgagacccagagcgccccctacagccagctggtggacatcaagaagctgctggccgtggcctggtttgcctttgatcctggcagcgcccacagcgacatcatcctgagcaatgacaacctgactgtgacctgcagcagctatgatgacagagtggtgctgggcaagacaggcttcagcaagggcatccactactgggagctgactgtggacagatatgacaaccacccagaccctgcctttggagtggccaggatggatgtgatgaaggatgtgatgctgggcaaggatgacaaggcctgggccatgtatgtggacaacaacagatcctggttcatgcacaacaacagccacaccaacagaacagagggcggcatcaccaagggggccaccatcggcgtgctgctggacctgaacaggaagaacctgaccttcttcatcaatgatgagcagcagggccccatcgcctttgacaacgtggagggcctcttcttccctgctgtgtccctgaacagaaatgtgcaggtgtccaccctgcccctgcggctgaacagctgctgctggctgcctgtgcagaggctgcccagggctgtgcagagcaacagaagagagggcagctag

SEQ ID NO: 174419 - DNA, 1653 bp, synthetic construct
  misc_feature 1..1653: note = Description of Artificial Sequence: Synthetic coding sequence
  source 1..1653: mol_type = other DNA
atggaggagatggaggaggagctgaagtgccctgtgtgtggcagcttctaccgggagcccatcatcctgccctgcagccacaacctgtgccaggcctgtgccaggaacatcctggtgcagaccccagagagcgagagcccccagagccacagagctgctggcagcggcgtgtctgactatgactacctggacctggacaagatgagcctgtacagcgaggccgacagcggctacggcagctatggaggctttgccagcgcccccaccaccccctgccagaagagccccaatggagtgcgggtcttccccccagccatgcctcctccagccacccacctgagccctgccctggcccctgtgcccaggaacagctgcatcacctgcccccagtgccacaggagcctcatcctggatgaccggggcctgcggggcttccccaagaacagagtgctggagggcgtgattgaccgctaccagcagagcaaggccgccgccctgaagtgccagctgtgtgagaaggcccccaaggaggccaccgtgatgtgtgagcagtgtgatgtgttctactgtgacccctgccgcctgcgctgccaccccccccggggccccctggccaagcaccggctggtgcccccagcccagggccgggtgtcccggcggctgagccccaggaaggtgtccacctgcacagaccacgagctggagaaccacagcatgtactgtgtgcagtgcaagatgcctgtgtgctaccagtgcctggaggagggcaagcacagcagccatgaggtgaaggccctgggcgccatgtggaagctgcacaagagccagctgagccaggccctgaatggcctgagtgaccgggccaaggaggccaaggagttcctggtgcagctgaggaacatggtgcagcagatccaggagaacagcgtggagtttgaggcctgcctggtggcccagtgtgatgccctgattgatgccctgaacagaaggaaggcccagctgctggcccgggtgaacaaggagcacgagcacaagctgaaggtggtgcgggaccagatcagccactgcaccgtgaagctgcggcagaccaccggcctgatggagtactgcctggaggtgatcaaggaaaatgaccccagcggcttcctgcagatcagtgatgccctgatcagaagagtgcacctgacagaggaccagtggggcaagggcaccctgacccccaggatgaccacagactttgacctgagcctggacaacagccccctgctgcagagcatccaccagctggactttgtgcaggtgaaggccagcagccctgtgcctgccacccccatcctgcagctggaggagtgctgcacccacaacaacagcgccaccctgtcctggaagcagccccccctgagcacagtgcctgcagatggctacatcctggagctggatgatggaaatggaggccagttccgggaggtgtatgtgggcaaggagaccatgtgcaccgtggatggcctgcacttcaacagcacctacaatgcccgggtgaaggccttcaacaagacaggagtgagcccctacagcaagaccctggtgctgcagaccagcgagggcaaggccctgcagcagtaccccagcgagcgggagctgcggggcatctag

SEQ ID NO: 174420 - DNA, 3750 bp, synthetic construct
  misc_feature 1..3750: note = Description of Artificial Sequence: Synthetic coding sequence
  source 1..3750: mol_type = other DNA
atggccacagctgccacagaggagcccttccccttccacggcctgctgcccaagaaggagactggagctgccagcttcctgtgccgctacccagaatatgatggccggggcgtgctgattgctgtgctggacacaggagtggaccccggggcccctggcatgcaggtgaccacagatggcaagcccaagatcgtggacatcatcgacaccactggaagtggagatgtgaacacagccacagaggtggagcccaaggatggagaaattgtgggcctgagcggccgggtgctgaagatcccagcctcctggaccaaccccagcggcaagtaccacatcggcatcaagaatggctatgacttctaccccaaggccctgaaggagcgcatccagaaggagaggaaggagaagatctgggaccctgtgcaccgggtggccctggccgaggcctgcaggaagcaggaggagtttgatgtggccaacaacggcagcagccaggccaacaagctgatcaaggaggagctgcagagccaggtggagctgctgaacagctttgagaagaagtacagcgaccccggccctgtgtatgactgcctggtgtggcatgatggagaggtgtggagggcctgcatcgacagcaatgaagatggagacctgagcaagagcacagtgctgaggaactacaaggaggcccaggagtatggcagctttggaacagctgagatgctgaactacagcgtgaacatctatgatgatggcaacctgctgagcatcgtgaccagcggcggggcccacggcacccacgtggccagcattgctgctggccacttccctgaggagcctgagagaaatggagtggcccctggggcccagatcctgagcatcaagatcggggacacccggctgagcaccatggagaccggcaccggcctcatccgggccatgattgaagtcatcaaccacaagtgtgacctggtgaactacagctatggagaggccacccactggcccaacagcggccgcatctgtgaggtgatcaatgaggccgtgtggaagcacaacatcatctacgtgtcctctgctggcaacaacggcccctgcctgagcacagtgggctgccctgggggcaccaccagctctgtgattggagtgggcgcctacgtgtccccagacatgatggtggccgagtacagcctgcgggagaagctgcctgccaaccagtacacctggagcagccggggccccagcgcagatggagccctgggcgtgtccatcagcgcccctggaggagccatcgcctctgtgcccaactggaccctgcggggcacccagctgatgaatggcacctccatgagcagccccaatgcctgtggcggcatcgccctgatcctgagcggcctgaaggccaacaacatcgactacacagtgcacagcgtgagaagagccctggagaacacagctgtgaaggctgacaacatcgaggtgtttgcccagggccacggcatcatccaggtggacaaggcctatgactacctggtgcagaacaccagctttgccaacaagctgggcttcaccgtgacagtgggcaacaacagaggcatctacctgcgggaccctgtgcaggtggccgcccccagcgaccatggagtgggcatcgagcctgtgtttcctgaaaatacagagaacagcgagaagatcagcctgcagctgcacctggccctgaccagcaacagctcctgggtgcagtgccccagccacctggagctgatgaaccagtgccgccacatcaacatccgggtggacccccggggcctgcgggagggcctgcactacacagaggtgtgtggctatgacatcgccagccccaatgccggccccctcttccgggtgcccatcacagctgtgattgctgccaaggtgaatgaaagcagccactatgacctggccttcacagatgtgcacttcaagccaggccagatccgccgccacttcatcgaggtgcctgagggcgccacctgggccgaggtgacagtgtgcagctgcagcagcgaggtgtctgccaagtttgtgctgcatgctgtgcagctggtgaagcagagggcctaccgcagccatgagttctacaagttctgcagcctgcctgagaagggcaccctgacagaggccttccctgtgctgggcggcaaggccatcgagttctgcatcgcccgctggtgggccagcctgagtgatgtgaacatcgactacaccatctccttccatggaattgtgtgcacagccccccagctgaacatccacgccagcgagggcatcaacagatttgatgtgcagagcagcctgaagtatgaggacctggccccctgcatcaccctgaagaactgggtgcagaccctgcggcctgtgtctgccaagaccaagcccctgggcagcagagatgtgctgcccaacaaccggcagctgtatgagatggtgctgacctacaacttccaccagcccaagtctggagaggtgacccccagctgccccctgctgtgtgagctgctgtatgagagcgagtttgacagccagctgtggatcatctttgaccagaacaagaggcagatgggcagcggagatgcctacccccaccagtacagcctgaagctggagaagggggactacaccatccggctgcagatcagacatgagcagatcagtgacctggagcggctgaaggacctgcccttcatcgtgagccaccggctgagcaacaccctgagcctggacatccacgagaaccacagctttgccctgctgggcaagaagaagagcagcaacctgaccctgccccccaagtacaaccagcccttctttgtgaccagcctgcctgatgacaagatccccaagggagctggccctggctgctacctggccggcagcctgaccctgagcaagacagagctgggcaagaaggcagatgtgattcctgtgcactactacctgatccccccacccaccaagaccaagaatggcagcaaggacaaggagaaggacagcgagaaggagaaggacctgaaggaggagttcacagaggccctgcgggacctgaagatccagtggatgaccaagctggacagcagtgacatctacaatgagctgaaggagacctaccccaactacctgcccctgtatgtggcccggctgcaccagctggatgctgagaaggagaggatgaagaggctgaatgagatcgtggatgctgccaatgctgtgatcagccacatcgaccagacagccctggccgtgtacatcgccatgaagacagaccccaggccagatgctgccaccatcaagaatgacatggacaagcagaagagcaccctggtggatgccctgtgcaggaagggctgtgccctggccgaccacctgctgcacacccaggcccaggatggagccatcagcacagatgctgagggcaaggaggaggagggggagagccccctggacagcctggccgagaccttctgggagaccaccaagtggacagacctgtttgacaacaaggtgctgacctttgcctacaagcacgccctggtgaacaagatgtatggccggggcctgaagtttgccaccaagctggtggaggagaagcccaccaaggagaactggaagaactgcatccagctgatgaagctgctgggctggacccactgtgccagcttcacagagaactggctgcccatcatgtaccccccagactactgtgtgttctag

SEQ ID NO: 174421 - DNA, 1791 bp, synthetic construct
  misc_feature 1..1791: note = Description of Artificial Sequence: Synthetic coding sequence
  source 1..1791: mol_type = other DNA
atgctgcccagccaggcccagggcctgctgtggtgggtgttccccctcttccctgccagcagcctgagctacccacctgtgtcctacagagcagatggcctggccaggaacaccttcctgaaggcctgcagcgagagcagcagcagcagcaacatcagcaccatgctggtgacccatgactacacagctgtgaaggaggatgagatcaacgtgtaccagggcgaggtggtgcagatcctggccagcaaccagcagaacatgttcctggtgttccgggccgccacagaccagtgcccagctgctgagggctggatccctggctttgtgctgggccacaccagcgctgtgattgtggagaacccagatggcaccctgaagaagagcacctcctggcacacagccctgcggctgaggaagaagtctgagaagaaggacaaggatggcaagcgggagggcaagctggagaatggctacaggaagagccgggagggcctgagcaacaaggtgtctgtgaagctgctgaaccccaactacatctatgatgtgcccccagagtttgtgatccccctgtctgaggtgacctgtgaaacaggagagaccgtggtgctgcgctgccgggtgtgtggccggcccaaggccagcatcacctggaagggccctgagcacaacaccctgaacaatgatggccactacagcatctcctacagcgacctgggggaggccaccctgaagatcgtgggcgtgaccacagaagatgatggcatctacacctgcatcgctgtgaatgacatgggcagcgccagcagcagcgccagcctgcgggtgctgggccctggcatggatggcatcatggtgacctggaaggacaactttgacagcttctacagcgaggtggccgagctgggccggggccgcttctctgtggtgaagaagtgtgaccagaagggcaccaagagagctgtggccaccaagtttgtgaacaagaagctgatgaagagggaccaggtgacccatgagctgggcatcctgcagagcctgcagcaccccctgctggtgggcctgctggacacctttgagacccccaccagctacatcctggtgctggagatggctgaccagggccgcctgctggactgtgtggtgcgctggggcagcctgacagagggcaagatccgggcccacctgggggaggtgctggaggccgtgcgctacctgcacaactgccgcatcgcccacctggacctgaagccagagaacatcctggtggatgagagcctggccaagcccaccatcaagctggccgactttggagatgctgtgcagctgaacaccacctactacatccaccagctgctgggcaaccctgagtttgctgcccctgagatcatcctgggcaaccctgtgtccctgaccagtgacacctggagcgtgggcgtgctgacctacgtgctgctgagcggcgtgagccccttcctggatgattctgtggaggagacctgcctgaacatctgccgcctggacttctccttcccagatgactacttcaagggcgtgtcccagaaggccaaggagtttgtgtgcttcctgctgcaggaggaccctgccaagaggccttctgctgccctggccctgcaggagcagtggctgcaggccggaaatggccgcagcactggagtgctggacaccagccggctgaccagcttcattgaaagaaggaagcaccagaatgatgtgcggcccatccgcagcatcaagaacttcctgcagagccggctgctgccccgggtgtag

SEQ ID NO: 174422 - DNA, 9294 bp, synthetic construct
  misc_feature 1..9294: note = Description of Artificial Sequence: Synthetic coding sequence
  source 1..9294: mol_type = other DNA
atgagcggcagcagtggaggagctgctgccccagctgccagcagcggccctgctgctgctgccagcgctgctggcagcggctgcggcggcggggccggggagggcgctgaggaggccgccaaggacctggccgacattgctgccttcttccgcagcggcttcaggaagaatgatgagatgaaggccatggatgtgctgcccatcctgaaggagaaggtggcctacctgagcggcggccgggacaagaggggcggccccatcctgaccttccctgcccggagcaaccacgaccgcatccggcaggaggacctgcggcggctcatctcctacctggcctgcatccccagcgaggaggtgtgcaagaggggcttcaccgtgattgtggacatgaggggcagcaagtgggacagcatcaagcccctgctgaagatcctgcaggagagcttcccctgctgcatccacgtggccctgatcatcaagccagacaacttctggcagaagcagaggaccaactttggcagcagcaagtttgaatttgagaccaacatggtgtccctggagggcctgaccaaggtggtggaccccagccagctgaccccagagtttgatggctgcctggagtacaaccacgaggagtggattgagatccgggtggcctttgaggactacatcagcaatgccacccacatgctgagccggctggaggagctgcaggacatcctggccaagaaggagctgccccaggacctggagggcgccaggaacatgattgaggagcacagccagctgaagaagaaggtgatcaaggcccccatcgaggacctggacctggagggccagaagctgctgcagaggatccagagcagcgagagcttccccaagaagaacagcggcagcggaaatgctgacctgcagaacctgctgcccaaggtgtccaccatgctggaccggctgcacagcacccggcagcacctgcaccagatgtggcacgtgaggaagctgaagctggaccagtgcttccagctgcggctgtttgagcaggatgctgagaagatgtttgactggatcacccacaacaagggcctcttcctgaacagctacacagagatcggcaccagccacccccacgccatggagctgcagacccagcacaaccactttgccatgaactgcatgaatgtgtatgtgaacatcaaccgcatcatgtctgtggccaaccggctggtggagagcggccactacgccagccagcagatccggcagatcgccagccagctggagcaggagtggaaggcctttgctgctgccctggatgagaggagcaccctgctggacatgagcagcatcttccaccagaaggccgagaagtacatgagcaatgtggacagctggtgcaaggcctgtggggaggtggacctgcccagcgagctgcaggacctggaggatgccatccaccaccaccagggcatctatgagcacatcaccctggcctacagcgaggtgtcccaggacggcaagagcctgctggacaagctgcagaggcccctgaccccaggcagcagtgacagcctgacagccagcgccaactacagcaaggctgtgcaccacgtgctggatgtgatccacgaggtgctgcaccaccagaggcagctggagaacatctggcagcacaggaaggtgcggctgcaccagaggctgcagctgtgtgtgttccagcaggatgtgcagcaggtgctggactggattgaaaatcatggagaggccttcctgagcaagcacactggagtgggcaagagcctgcaccgggcccgggccctgcagaagagacatgaagattttgaggaggtggcccagaacacctacaccaatgctgacaagctgctggaggccgctgagcagctggcccagacaggagaatgtgaccctgaggagatctaccaggccgcccaccagctggaggaccgcatccaggactttgtgagaagagtggagcagaggaagatcctgctggacatgtctgtgtccttccacacccacgtgaaggagctgtggacctggctggaggagctgcagaaggagctgctggatgatgtgtatgcagagagcgtggaggccgtgcaggacctgatcaagagatttggccagcagcagcagaccaccctgcaggtgacagtgaatgtcatcaaggagggggaggacctgatccagcagctgcgggacagcgccatcagcagcaacaagaccccccacaacagcagcatcaaccacattgaaacagtgctgcagcagctggatgaggcccagagccagatggaggagctgttccaggagaggaagatcaagctggagctgttcctgcagctgcgcatctttgaaagagatgccatcgacatcatcagtgacctggagagctggaatgatgagctgagccagcagatgaatgactttgacacagaggacctgaccatcgccgagcagaggctgcagcaccacgccgacaaggccctgaccatgaacaacctgacctttgatgtgatccaccagggccaggacctgctgcagtatgtgaatgaggtgcaggccagcggcgtggagctgctgtgtgacagagatgtggacatggccaccagggtgcaggacctgctggagttcctgcacgagaagcagcaggagctggacctggccgctgagcagcacaggaagcacctggagcagtgtgtgcagctgcggcacctgcaggccgaggtgaagcaggtgctgggctggatcagaaatggagagagcatgctgaatgccggcctcatcacagccagcagcctgcaggaggccgagcagctgcagcgggagcacgagcagttccagcacgccatcgagaagacccaccagagcgccctgcaggtgcagcagaaggccgaggccatgctgcaggccaaccactatgacatggacatgatccgggactgtgccgagaaggtggccagccactggcagcagctgatgctgaagatggaggaccggctgaagctggtgaatgcctctgtggccttctacaagaccagcgagcaggtgtgcagcgtgctggagagcctggagcaggagtacaagcgggaggaggactggtgtggcggcgctgacaagctgggccccaacagcgagacagaccacgtgacccccatgatcagcaagcacctggagcagaaggaggccttcctgaaggcctgcaccctggccaggagaaatgctgatgtgttcctgaagtacctgcacaggaacagcgtgaacatgcctggcatggtgacccacatcaaggcccctgagcagcaggtgaagaacatcctgaatgagctgttccagcgggagaacagagtgctgcactactggaccatgaggaagaggcggctggaccagtgccagcagtatgtggtgtttgagaggtctgccaagcaggccctggagtggattcatgacaatggagagttctacctgagcacccacaccagcacaggcagcagcatccagcacacccaggagctgctgaaggagcacgaggagttccagatcacagccaagcagaccaaggagcgggtgaagctgctgatccagctggctgatggcttctgtgagaagggccacgcccacgccgctgagatcaagaagtgtgtgacagctgtggacaagcgctacagagacttcagcctgaggatggagaagtaccgcaccagcctggagaaggccctgggcatcagcagtgacagcaacaagagcagcaagagcctgcagctggacatcatcccagccagcatccctggcagcgaggtgaagctgagagatgctgcccacgagctgaatgaggagaagaggaagagcgcccggaggaaggagttcatcatggccgagctgatccagacagagaaggcctacgtgcgggacctgcgggagtgcatggacacctacctgtgggagatgaccagcggcgtggaggagatccccccaggcatcgtgaacaaggagctgatcatctttggaaacatgcaggagatctatgagttccacaacaacatcttcctgaaggagctggagaagtatgagcagctgcctgaagatgtgggccactgctttgtgacctgggccgacaagttccagatgtatgtgacctactgcaagaacaagccagacagcacccagctgatcctggagcacgccggcagctactttgatgagatccagcagagacatggcctggccaacagcatcagcagctacctgatcaagcctgtgcagaggatcaccaagtaccagctgctgctgaaggagctgctgacctgctgtgaggagggcaaaggagagatcaaggatggcctggaggtgatgctgtctgtgcccaagagggccaatgatgccatgcacctgtccatgctggagggctttgatgagaacatcgagagccagggcgagctgatcctgcaggagagcttccaggtgtgggaccccaagaccctcatcaggaagggccgggagcggcacctgttcctgtttgagatgagcctggtgttcagcaaggaggtgaaggacagcagcggccgcagcaagtacctgtacaagagcaagctgttcaccagcgagctgggcgtgacagaacatgtggagggggacccctgcaagtttgccctgtgggtgggccgcacccccaccagtgacaacaagatcgtgctgaaggccagcagcattgagaacaagcaggactggatcaagcacatccgggaggtgatccaggagaggaccatccacctgaagggggccctgaaggagcccatccacatccccaagacagccccagccacccggcagaagggcagaagagatggagaggacctggacagccagggagatggcagcagccagcctgacaccatcagcatcgccagcaggaccagccagaacaccctggacagcgacaagctgagcggcggctgtgagctgactgtggtgattcatgacttcaccgcctgcaacagcaatgagctgaccatccggcggggccagacagtggaggtgctggagcggccccatgacaagccagactggtgcctggtgaggaccacagacaggagccctgctgctgagggcctggtgccctgtggcagcctgtgcatcgcccacagccgcagctccatggagatggagggcatcttcaaccacaaggacagcctgtctgtgagcagcaatgatgccagccccccagcctctgtggccagcctgcagccccacatgattggagcccagagcagccctggccccaagaggcctggcaacaccctgaggaagtggctgaccagccctgtgcggcggctgagcagcggcaaggcagatggccacgtgaagaagctggcccacaagcacaagaagagccgggaggtgaggaagtctgcagatgctggcagccagaaggacagtgatgattctgctgccaccccccaggatgaaacagtggaggagcggggcagaaatgaaggcctgagcagcggcaccctgagcaagagcagcagcagcggcatgcagagctgtggggaggaggagggggaggagggcgcagatgctgtgcccctgcccccacccatggccatccagcagcacagcctgctgcagcctgacagccaggatgacaaggccagcagccggctgctggtgcggcccaccagcagcgagaccccatctgctgctgagctggtgtctgccatcgaggagctggtgaagagcaagatggccctggaggaccggcccagcagcctgctggtggaccagggcgacagcagcagccccagcttcaaccccagcgacaacagcctgctgagcagcagcagccccattgatgagatggaggagaggaagagcagcagcctgaagagaagacactacgtgctgcaggagctggtggagacagagcgggactatgtgcgggacctgggctacgtggtggagggctacatggccctgatgaaggaggatggagtgcctgatgacatgaagggcaaggacaagatcgtgtttggaaacatccaccagatctatgactggcaccgggacttcttcctgggggagctggagaagtgcctggaggaccctgagaagctgggcagcctgtttgtgaagcatgaaagaaggctgcacatgtacatcgcctactgccagaacaagcccaagtctgagcacatcgtgtctgagtacatcgacaccttctttgaggacctgaagcagaggctgggccaccggctgcagctgacagacctgctgatcaagcctgtgcagaggatcatgaagtaccagctgctgctgaaggacttcctgaagtacagcaagaaggccagcctggacaccagcgagctggagagagctgtggaggtgatgtgcatcgtgccccggcgctgcaatgacatgatgaatgtgggccgcctgcagggctttgatggcaagatcgtggcccagggcaagctgctgctgcaggacaccttcctggtgacagaccaggatgctggcctgctgccccgctgccgggagcggcgcatcttcctgtttgagcagatcgtcatcttcagcgagcccctggacaagaagaagggcttctccatgcctggcttcctgttcaagaacagcatcaaggtgtcctgcctgtgcctggaggagaatgtggagaatgacccctgcaagtttgccctgaccagcaggactggagatgtggtggagaccttcatcctgcacagcagcagccccagcgtgcggcagacctggatccacgagatcaaccagatcctggagaaccagaggaacttcctgaatgccctgaccagccccatcgagtaccagaggaaccacagcggcggcggcggcggcggcggcagcggcggcagcggcggcggcggcggcagcggcggcggcggggcccccagcggcggcagcggccacagcggcggccccagcagctgtggcggggcccccagcaccagccgcagccggcccagccgcatcccccagcctgtgcgccaccacccccctgtgctggtgtcctctgctgccagcagccaggccgaggccgacaagatgagcggcaccagcaccccaggccccagcctgcccccacctggagctgcccctgaggccggccccagcgcccccagccggcggcccccaggagcagatgctgagggcagcgagcgggaggccgagcccatccccaagatgaaggtgctggagagccccaggaagggggccgccaatgccagcggcagcagcccagatgccccagccaaggatgcccgggccagcctgggcaccctgcccctgggcaagcccagggctggagctgccagccccctgaacagccccctgagcagcgctgtgcccagcctgggcaaggagcccttcccccccagcagccccctgcagaagggcggcagcttctggagcagcatcccagccagccctgccagcaggcctggcagcttcaccttccctggggacagcgacagcctgcagaggcagacccccaggcatgctgcccctgggaaggacacagacaggatgagcacctgcagcagcgccagcgagcagagcgtgcagagcacccagagcaatggaagtgagagcagcagcagcagcaacatcagcaccatgctggtgacccatgactacacagctgtgaaggaggatgagatcaacgtgtaccagggcgaggtggtgcagatcctggccagcaaccagcagaacatgttcctggtgttccgggccgccacagaccagtgcccagctgctgagggctggatccctggctttgtgctgggccacaccagcgctgtgattgtggagaacccagatggcaccctgaagaagagcacctcctggcacacagccctgcggctgaggaagaagtctgagaagaaggacaaggatggcaagcgggagggcaagctggagaatggctacaggaagagccgggagggcctgagcaacaaggtgtctgtgaagctgctgaaccccaactacatctatgatgtgcccccagagtttgtgatccccctgtctgaggtgacctgtgagaccggggagaccgtggtgctgcgctgccgggtgtgtggccggcccaaggccagcatcacctggaagggccctgagcacaacaccctgaacaatgatggccactacagcatctcctacagcgacctgggggaggccaccctgaagatcgtgggcgtgaccacagaagatgatggcatctacacctgcatcgctgtgaatgacatgggcagcgccagcagcagcgccagcctgcgggtgctgggccctggcatggatggcatcatggtgacctggaaggacaactttgacagcttctacagcgaggtggccgagctgggccggggccgcttctctgtggtgaagaagtgtgaccagaagggcaccaagagagctgtggccaccaagtttgtgaacaagaagctgatgaagagggaccaggtgacccatgagctgggcatcctgcagagcctgcagcaccccctgctggtgggcctgctggacacctttgagacccccaccagctacatcctggtgctggagatggctgaccagggccgcctgctggactgtgtggtgcgctggggcagcctgacagagggcaagatccgggcccacctgggggaggtgctggaggccgtgcgctacctgcacaactgcagaattgcccacctggacctgaagccagagaacatcctggtggatgagagcctggccaagcccaccatcaagctggccgactttggagatgctgtgcagctgaacaccacctactacatccaccagctgctgggcaaccctgagtttgctgcccctgagatcatcctgggcaaccctgtgtccctgaccagtgacacctggagcgtgggcgtgctgacctacgtgctgctgtctggagtgagccccttcctggatgacagcgtggaggagacctgcctgaacatctgccgcctggacttctccttcccagatgactacttcaagggcgtgtcccagaaggccaaggagtttgtgtgcttcctgctgcaggaggaccctgccaagaggcccagcgctgccctggccctgcaggagcagtggctgcaggccggaaatggccgcagcactggagtgctggacaccagccggctgaccagcttcatcgagaggaggaagcaccagaatgatgtgcggcccatccgcagcatcaagaacttcctgcagagccggctgctgccccgggtgtag

SEQ ID NO: 174423 - DNA, 7503 bp, synthetic construct
  misc_feature 1..7503: note = Description of Artificial Sequence: Synthetic coding sequence
  source 1..7503: mol_type = other DNA
atgctggaccggctgcacagcacccggcagcacctgcaccagatgtggcacgtgaggaagctgaagctggaccagtgcttccagctgcggctgtttgagcaggatgctgagaagatgtttgactggatcacccacaacaagggcctcttcctgaacagctacacagaaattggcaccagccacccccacgccatggagctgcagacccagcacaaccactttgccatgaactgcatgaatgtgtatgtgaacatcaaccgcatcatgtctgtggccaaccggctggtggagagcggccactacgccagccagcagatccggcagatcgccagccagctggagcaggagtggaaggcctttgctgctgccctggatgagaggagcaccctgctggacatgagcagcatcttccaccagaaggccgagaagtacatgagcaatgtggacagctggtgcaaggcctgtggggaggtggacctgcccagcgagctgcaggacctggaggatgccatccaccaccaccagggcatctatgagcacatcaccctggcctacagcgaggtgtcccaggacggcaagagcctgctggacaagctgcagaggcccctgaccccaggcagcagtgacagcctgacagccagcgccaactacagcaaggctgtgcaccacgtgctggatgtgattcatgaggtgctgcaccaccagaggcagctggagaacatctggcagcacaggaaggtgcggctgcaccagaggctgcagctgtgtgtgttccagcaggatgtgcagcaggtgctggactggattgagaaccacggggaggccttcctgagcaagcacactggagtgggcaagagcctgcaccgggcccgggccctgcagaagagacatgaggactttgaggaggtggcccagaacacctacaccaatgctgacaagctgctggaggccgctgagcagctggcccagacaggagaatgtgaccctgaggagatctaccaggccgcccaccagctggaggaccgcatccaggactttgtgcggcgggtggagcagaggaagatcctgctggacatgtctgtgtccttccacacccacgtgaaggagctgtggacctggctggaggagctgcagaaggagctgctggatgatgtgtatgcagagagcgtggaggccgtgcaggacctgatcaagcgcttcggccagcagcagcagaccaccctgcaggtgacagtgaatgtcatcaaggagggagaagatctcatccagcagctgcgggacagcgccatcagcagcaacaagaccccccacaacagcagcatcaaccacatcgagaccgtgctgcagcagctggatgaggcccagagccagatggaggagctgttccaggagaggaagatcaagctggagctgttcctgcagctgcgcatctttgaaagagatgccatcgacatcatcagtgacctggagagctggaatgatgagctgagccagcagatgaatgactttgacacagaggacctgaccatcgccgagcagaggctgcagcaccacgccgacaaggccctgaccatgaacaacctgacctttgatgtgatccaccagggccaggacctgctgcagtatgtgaatgaggtgcaggccagcggcgtggagctgctgtgtgacagagatgtggacatggccaccagggtgcaggacctgctggagttcctgcacgagaagcagcaggagctggacctggccgctgagcagcacaggaagcacctggagcagtgtgtgcagctgcggcacctgcaggccgaggtgaagcaggtgctgggctggatcagaaatggagagagcatgctgaatgccggcctcatcacagccagcagcctgcaggaggccgagcagctgcagcgggagcacgagcagttccagcacgccatcgagaagacccaccagagcgccctgcaggtgcagcagaaggccgaggccatgctgcaggccaaccactatgacatggacatgatccgggactgtgccgagaaggtggccagccactggcagcagctgatgctgaagatggaggaccggctgaagctggtgaatgcctctgtggccttctacaagaccagcgagcaggtgtgcagcgtgctggagagcctggagcaggagtacaagcgggaggaggactggtgtggcggcgctgacaagctgggccccaacagcgagacagaccacgtgacccccatgatcagcaagcacctggagcagaaggaggccttcctgaaggcctgcaccctggccaggagaaatgctgatgtgttcctgaagtacctgcacagaaattctgtgaacatgcctggcatggtgacccacatcaaggcccctgagcagcaggtgaagaacatcctgaatgaactcttccagagagaaaatagagtgctgcactactggaccatgaggaagaggcggctggaccagtgccagcagtatgtggtgtttgagaggtctgccaagcaggccctggagtggattcatgacaacggggagttctacctgagcacccacaccagcacaggcagcagcatccagcacacccaggagctgctgaaggagcacgaggagttccagatcacagccaagcagaccaaggagcgggtgaagctgctgatccagctggctgatggcttctgtgagaagggccacgcccatgctgctgagatcaagaagtgtgtgacagctgtggacaagcgctacagagacttcagcctgaggatggagaagtaccgcaccagcctggagaaggccctgggcatcagcagtgacagcaacaagagcagcaagagcctgcagctggacatcatcccagccagcatccctggcagcgaggtgaagctgagagatgctgcccacgagctgaatgaggagaagaggaagagcgcccggaggaaggagttcatcatggccgagctgatccagacagagaaggcctacgtgcgggacctgcgggagtgcatggacacctacctgtgggagatgaccagcggcgtggaggagatccccccaggcatcgtgaacaaggagctgatcatcttcggcaacatgcaggagatctatgagttccacaacaacatcttcctgaaggagctggagaagtatgagcagctgcctgaagatgtgggccactgctttgtgacctgggccgacaagttccagatgtatgtgacctactgcaagaacaagccagacagcacccagctgatcctggagcacgccggcagctactttgatgagatccagcagagacatggcctggccaacagcatcagcagctacctgatcaagcctgtgcagaggatcaccaagtaccagctgctgctgaaggagctgctgacctgctgtgaggagggcaagggggagatcaaggatggcctggaggtgatgctgtctgtgcccaagagggccaatgatgccatgcacctgtccatgctggagggctttgatgaaaatattgagagccagggcgagctgatcctgcaggagagcttccaggtgtgggaccccaagaccctcatcaggaagggccgggagcggcacctgttcctgtttgagatgagcctggtgttcagcaaggaggtgaaggacagcagcggccgcagcaagtacctgtacaagagcaagctgttcaccagcgagctgggcgtgacagagcacgtggagggggacccctgcaagtttgccctgtgggtgggccgcacccccaccagtgacaacaagatcgtgctgaaggccagcagcattgagaacaagcaggactggatcaagcacatccgggaggtgatccaggagaggaccatccacctgaagggggccctgaaggagcccatccacatccccaagacagccccagccacccggcagaagggcagaagagatggagaggacctggacagccagggagatggcagcagccagcctgacaccatcagcatcgccagcaggaccagccagaacaccctggacagcgacaagctgagcggcggctgtgagctgactgtggtgattcatgacttcaccgcctgcaacagcaatgagctgaccatcagaagaggccagacagtggaggtgctggagcggccccatgacaagccagactggtgcctggtgaggaccacagacaggagccctgctgctgagggcctggtgccctgtggcagcctgtgcatcgcccacagccgcagctccatggagatggagggcatcttcaaccacaaggacagcctgtctgtgagcagcaatgatgccagccccccagcctctgtggccagcctgcagccccacatgattggagcccagagcagccctggccccaagaggcctggcaacaccctgaggaagtggctgaccagccctgtgcggcggctgagcagcggcaaggcagatggccacgtgaagaagctggcccacaagcacaagaagagccgggaggtgaggaagtctgcagatgctggcagccagaaggacagtgatgacagcgctgccaccccccaggatgagaccgtggaggagcggggcagaaatgaaggcctgagcagcggcaccctgagcaagagcagcagcagcggcatgcagagctgtggggaggaggagggggaggagggcgcagatgctgtgcccctgcccccacccatggccatccagcagcacagcctgctgcagcctgacagccaggatgacaaggccagcagccggctgctggtgcggcccaccagcagcgagacccccagcgctgctgagctggtgtctgccatcgaggagctggtgaagagcaagatggccctggaggaccggcccagcagcctgctggtggaccagggcgacagcagcagccccagcttcaaccccagcgacaacagcctgctgagcagcagcagccccattgatgagatggaggagaggaagagcagcagcctgaagaggaggcactacgtgctgcaggagctggtggagacagagcgggactatgtgcgggacctgggctacgtggtggagggctacatggccctgatgaaggaggatggagtgcctgatgacatgaagggcaaggacaagatcgtgtttggaaacatccaccagatctatgactggcaccgggacttcttcctgggggagctggagaagtgcctggaggaccctgagaagctgggcagcctgtttgtgaagcatgagcggcggctgcacatgtacatcgcctactgccagaacaagcccaagtctgagcacatcgtgtctgagtacatcgacaccttctttgaggacctgaagcagaggctgggccaccggctgcagctgacagacctgctgatcaagcctgtgcagaggatcatgaagtaccagctgctgctgaaggacttcctgaagtacagcaagaaggccagcctggacaccagcgagctggagagagctgtggaggtgatgtgcatcgtgccccggcgctgcaatgacatgatgaatgtgggccgcctgcagggctttgatggcaagatcgtggcccagggcaagctgctgctgcaggacaccttcctggtgacagaccaggatgctggcctgctgccccgctgccgggagcggcgcatcttcctgtttgagcagatcgtcatcttcagcgagcccctggacaagaagaagggcttctccatgcctggcttcctgttcaagaacagcatcaaggtgtcctgcctgtgcctggaggagaatgtggagaatgacccctgcaagtttgccctgaccagcaggactggagatgtggtggagaccttcatcctgcacagcagcagccccagcgtgcggcagacctggattcatgagatcaaccagatcctggagaaccagaggaacttcctgaatgccctgaccagccccatcgagtaccagaggaaccacagcggcggcggcggcggcggcggcagcggcggcagcggcggcggcggcggcagcggcggcggcggggcccccagcggcggcagcggccacagcggcggccccagcagctgtggcggggcccccagcaccagccgcagccggcccagccgcatcccccagcctgtgcgccaccacccccctgtgctggtgagcagcgctgccagcagccaggccgaggccgacaagatgagcggcaccagcaccccaggccccagcctgcccccacctggggccgcccctgaggccggccccagcgcccccagcagaagacctcctggagcagatgctgagggcagcgagcgggaggccgagcccatccccaagatgaaggtgctggagagccccaggaaaggagctgccaatgccagcggcagcagcccagatgccccagccaaggatgcccgggccagcctgggcaccctgcccctgggcaagccccgggccggggccgccagccccctgaacagccccctgagcagcgctgtgcccagcctgggcaaggagcccttcccccccagcagccccctgcagaagggcggcagcttctggagcagcatcccagccagccctgccagccggcccggcagcttcaccttccctggggacagcgacagcctgcagaggcagacccccaggcatgctgcccctgggaaggacacagacaggatgagcacctgcagcagcgccagcgagcagagcgtgcagagcacccagagcaatggcagcgagagcagcagcagcagcaacatcagcaccatgctggtgacccatgactacacagctgtgaaggaggatgagatcaacgtgtaccagggcgaggtggtgcagatcctggccagcaaccagcagaacatgttcctggtgttccgggccgccacagaccagtgcccagctgctgagggctggatccctggctttgtgctgggccacaccagcgctgtgattgtggagaacccagatggcaccctgaagaagagcacctcctggcacacagccctgcggctgaggaagaagtctgagaagaaggacaaggatggcaagcgggagggcaagctggagaatggctacaggaagagccgggagggcctgagcaacaaggtgtctgtgaagctgctgaaccccaactacatctatgatgtgcccccagagtttgtgatccccctgtctgaggtgacctgtgaaacaggagagaccgtggtgctgcgctgccgggtgtgtggccggcccaaggccagcatcacctggaagggccctgagcacaacaccctgaacaatgatggccactacagcatctcctacagcgacctgggggaggccaccctgaagatcgtgggcgtgaccacagaagatgatggcatctacacctgcatcgctgtgaatgacatgggcagcgccagcagcagcgccagcctgcgggtgctgggccctggcatggatggcatcatggtgacctggaaggacaactttgacagcttctacagcgaggtggccgagctgggccgggccaactggaacaactggagcccctactag

SEQ ID NO: 174424 - DNA, 8766 bp, synthetic construct
  misc_feature 1..8766: note = Description of Artificial Sequence: Synthetic coding sequence
  source 1..8766: mol_type = other DNA
atgagcggcagcagtggaggagctgctgccccagctgccagcagcggccctgctgctgctgccagcgctgctggcagcggctgcggcggcggggccggggagggcgctgaggaggccgccaaggacctggccgacattgctgccttcttccgcagcggcttcaggaagaatgatgagatgaaggccatggatgtgctgcccatcctgaaggagaaggtggcctacctgagcggcggccgggacaagaggggcggccccatcctgaccttccctgcccggagcaaccacgaccgcatccggcaggaggacctgcggcggctcatctcctacctggcctgcatccccagcgaggaggtgtgcaagaggggcttcaccgtgattgtggacatgaggggcagcaagtgggacagcatcaagcccctgctgaagatcctgcaggagagcttcccctgctgcatccacgtggccctgatcatcaagccagacaacttctggcagaagcagaggaccaactttggcagcagcaagtttgaatttgagaccaacatggtgtccctggagggcctgaccaaggtggtggaccccagccagctgaccccagagtttgatggctgcctggagtacaaccacgaggagtggattgagatccgggtggcctttgaggactacatcagcaatgccacccacatgctgagccggctggaggagctgcaggacatcctggccaagaaggagctgccccaggacctggagggcgccaggaacatgattgaggagcacagccagctgaagaagaaggtgatcaaggcccccatcgaggacctggacctggagggccagaagctgctgcagaggatccagagcagcgagagcttccccaagaagaacagcggcagcggaaatgctgacctgcagaacctgctgcccaaggtgtccaccatgctggaccggctgcacagcacccggcagcacctgcaccagatgtggcacgtgaggaagctgaagctggaccagtgcttccagctgcggctgtttgagcaggatgctgagaagatgtttgactggatcacccacaacaagggcctcttcctgaacagctacacagagatcggcaccagccacccccacgccatggagctgcagacccagcacaaccactttgccatgaactgcatgaatgtgtatgtgaacatcaaccgcatcatgtctgtggccaaccggctggtggagagcggccactacgccagccagcagatccggcagatcgccagccagctggagcaggagtggaaggcctttgctgctgccctggatgagaggagcaccctgctggacatgagcagcatcttccaccagaaggccgagaagtacatgagcaatgtggacagctggtgcaaggcctgtggggaggtggacctgcccagcgagctgcaggacctggaggatgccatccaccaccaccagggcatctatgagcacatcaccctggcctacagcgaggtgtcccaggacggcaagagcctgctggacaagctgcagaggcccctgaccccaggcagcagtgacagcctgacagccagcgccaactacagcaaggctgtgcaccacgtgctggatgtgatccacgaggtgctgcaccaccagaggcagctggagaacatctggcagcacaggaaggtgcggctgcaccagaggctgcagctgtgtgtgttccagcaggatgtgcagcaggtgctggactggattgaaaatcatggagaggccttcctgagcaagcacactggagtgggcaagagcctgcaccgggcccgggccctgcagaagagacatgaagattttgaggaggtggcccagaacacctacaccaatgctgacaagctgctggaggccgctgagcagctggcccagacaggagaatgtgaccctgaggagatctaccaggccgcccaccagctggaggaccgcatccaggactttgtgagaagagtggagcagaggaagatcctgctggacatgtctgtgtccttccacacccacgtgaaggagctgtggacctggctggaggagctgcagaaggagctgctggatgatgtgtatgcagagagcgtggaggccgtgcaggacctgatcaagagatttggccagcagcagcagaccaccctgcaggtgacagtgaatgtcatcaaggagggggaggacctgatccagcagctgcgggacagcgccatcagcagcaacaagaccccccacaacagcagcatcaaccacattgaaacagtgctgcagcagctggatgaggcccagagccagatggaggagctgttccaggagaggaagatcaagctggagctgttcctgcagctgcgcatctttgaaagagatgccatcgacatcatcagtgacctggagagctggaatgatgagctgagccagcagatgaatgactttgacacagaggacctgaccatcgccgagcagaggctgcagcaccacgccgacaaggccctgaccatgaacaacctgacctttgatgtgatccaccagggccaggacctgctgcagtatgtgaatgaggtgcaggccagcggcgtggagctgctgtgtgacagagatgtggacatggccaccagggtgcaggacctgctggagttcctgcacgagaagcagcaggagctggacctggccgctgagcagcacaggaagcacctggagcagtgtgtgcagctgcggcacctgcaggccgaggtgaagcaggtgctgggctggatcagaaatggagagagcatgctgaatgccggcctcatcacagccagcagcctgcaggaggccgagcagctgcagcgggagcacgagcagttccagcacgccatcgagaagacccaccagagcgccctgcaggtgcagcagaaggccgaggccatgctgcaggccaaccactatgacatggacatgatccgggactgtgccgagaaggtggccagccactggcagcagctgatgctgaagatggaggaccggctgaagctggtgaatgcctctgtggccttctacaagaccagcgagcaggtgtgcagcgtgctggagagcctggagcaggagtacaagcgggaggaggactggtgtggcggcgctgacaagctgggccccaacagcgagacagaccacgtgacccccatgatcagcaagcacctggagcagaaggaggccttcctgaaggcctgcaccctggccaggagaaatgctgatgtgttcctgaagtacctgcacaggaacagcgtgaacatgcctggcatggtgacccacatcaaggcccctgagcagcaggtgaagaacatcctgaatgagctgttccagcgggagaacagagtgctgcactactggaccatgaggaagaggcggctggaccagtgccagcagtatgtggtgtttgagaggtctgccaagcaggccctggagtggattcatgacaatggagagttctacctgagcacccacaccagcacaggcagcagcatccagcacacccaggagctgctgaaggagcacgaggagttccagatcacagccaagcagaccaaggagcgggtgaagctgctgatccagctggctgatggcttctgtgagaagggccacgcccacgccgctgagatcaagaagtgtgtgacagctgtggacaagcgctacagagacttcagcctgaggatggagaagtaccgcaccagcctggagaaggccctgggcatcagcagtgacagcaacaagagcagcaagagcctgcagctggacatcatcccagccagcatccctggcagcgaggtgaagctgagagatgctgcccacgagctgaatgaggagaagaggaagagcgcccggaggaaggagttcatcatggccgagctgatccagacagagaaggcctacgtgcgggacctgcgggagtgcatggacacctacctgtgggagatgaccagcggcgtggaggagatccccccaggcatcgtgaacaaggagctgatcatctttggaaacatgcaggagatctatgagttccacaacaacatcttcctgaaggagctggagaagtatgagcagctgcctgaagatgtgggccactgctttgtgacctgggccgacaagttccagatgtatgtgacctactgcaagaacaagccagacagcacccagctgatcctggagcacgccggcagctactttgatgagatccagcagagacatggcctggccaacagcatcagcagctacctgatcaagcctgtgcagaggatcaccaagtaccagctgctgctgaaggagctgctgacctgctgtgaggagggcaaaggagagatcaaggatggcctggaggtgatgctgtctgtgcccaagagggccaatgatgccatgcacctgtccatgctggagggctttgatgagaacatcgagagccagggcgagctgatcctgcaggagagcttccaggtgtgggaccccaagaccctcatcaggaagggccgggagcggcacctgttcctgtttgagatgagcctggtgttcagcaaggaggtgaaggacagcagcggccgcagcaagtacctgtacaagagcaagctgttcaccagcgagctgggcgtgacagaacatgtggagggggacccctgcaagtttgccctgtgggtgggccgcacccccaccagtgacaacaagatcgtgctgaaggccagcagcattgagaacaagcaggactggatcaagcacatccgggaggtgatccaggagaggaccatccacctgaagggggccctgaaggagcccatccacatccccaagacagccccagccacccggcagaagggcagaagagatggagaggacctggacagccagggagatggcagcagccagcctgacaccatcagcatcgccagcaggaccagccagaacaccctggacagcgacaagctgagcggcggctgtgagctgactgtggtgattcatgacttcaccgcctgcaacagcaatgagctgaccatccggcggggccagacagtggaggtgctggagcggccccatgacaagccagactggtgcctggtgaggaccacagacaggagccctgctgctgagggcctggtgccctgtggcagcctgtgcatcgcccacagccgcagctccatggagatggagggcatcttcaaccacaaggacagcctgtctgtgagcagcaatgatgccagccccccagcctctgtggccagcctgcagccccacatgattggagcccagagcagccctggccccaagaggcctggcaacaccctgaggaagtggctgaccagccctgtgcggcggctgagcagcggcaaggcagatggccacgtgaagaagctggcccacaagcacaagaagagccgggaggtgaggaagtctgcagatgctggcagccagaaggacagtgatgattctgctgccaccccccaggatgaaacagtggaggagcggggcagaaatgaaggcctgagcagcggcaccctgagcaagagcagcagcagcggcatgcagagctgtggggaggaggagggggaggagggcgcagatgctgtgcccctgcccccacccatggccatccagcagcacagcctgctgcagcctgacagccaggatgacaaggccagcagccggctgctggtgcggcccaccagcagcgagaccccatctgctgctgagctggtgtctgccatcgaggagctggtgaagagcaagatggccctggaggaccggcccagcagcctgctggtggaccagggcgacagcagcagccccagcttcaaccccagcgacaacagcctgctgagcagcagcagccccattgatgagatggaggagaggaagagcagcagcctgaagagaagacactacgtgctgcaggagctggtggagacagagcgggactatgtgcgggacctgggctacgtggtggagggctacatggccctgatgaaggaggatggagtgcctgatgacatgaagggcaaggacaagatcgtgtttggaaacatccaccagatctatgactggcaccgggacttcttcctgggggagctggagaagtgcctggaggaccctgagaagctgggcagcctgtttgtgaagcatgaaagaaggctgcacatgtacatcgcctactgccagaacaagcccaagtctgagcacatcgtgtctgagtacatcgacaccttctttgaggacctgaagcagaggctgggccaccggctgcagctgacagacctgctgatcaagcctgtgcagaggatcatgaagtaccagctgctgctgaaggacttcctgaagtacagcaagaaggccagcctggacaccagcgagctggagagagctgtggaggtgatgtgcatcgtgccccggcgctgcaatgacatgatgaatgtgggccgcctgcagggctttgatggcaagatcgtggcccagggcaagctgctgctgcaggacaccttcctggtgacagaccaggatgctggcctgctgccccgctgccgggagcggcgcatcttcctgtttgagcagatcgtcatcttcagcgagcccctggacaagaagaagggcttctccatgcctggcttcctgttcaagaacagcatcaaggtgtcctgcctgtgcctggaggagaatgtggagaatgacccctgcaagtttgccctgaccagcaggactggagatgtggtggagaccttcatcctgcacagcagcagccccagcgtgcggcagacctggatccacgagatcaaccagatcctggagaaccagaggaacttcctgaatgccctgaccagccccatcgagtaccagaggaaccacagcggcggcggcggcggcggcggcagcggcggcagcggcggcggcggcggcagcggcggcggcggggcccccagcggcggcagcggccacagcggcggccccagcagctgtggcggggcccccagcaccagccgcagccggcccagccgcatcccccagcctgtgcgccaccacccccctgtgctggtgtcctctgctgccagcagccaggccgaggccgacaagatgtctgagagcgagagcagcagcagcagcaacatcagcaccatgctggtgacccatgactacacagctgtgaaggaggatgagatcaacgtgtaccagggcgaggtggtgcagatcctggccagcaaccagcagaacatgttcctggtgttccgggccgccacagaccagtgcccagctgctgagggctggatccctggctttgtgctgggccacaccagcgctgtgattgtggagaacccagatggcaccctgaagaagagcacctcctggcacacagccctgcggctgaggaagaagtctgagaagaaggacaaggatggcaagcgggagggcaagctggagaatggctacaggaagagccgggagggcctgagcaacaaggtgtctgtgaagctgctgaaccccaactacatctatgatgtgcccccagagtttgtgatccccctgtctgaggtgacctgtgagaccggggagaccgtggtgctgcgctgccgggtgtgtggccggcccaaggccagcatcacctggaagggccctgagcacaacaccctgaacaatgatggccactacagcatctcctacagcgacctgggggaggccaccctgaagatcgtgggcgtgaccacagaagatgatggcatctacacctgcatcgctgtgaatgacatgggcagcgccagcagcagcgccagcctgcgggtgctgggccctggcatggatggcatcatggtgacctggaaggacaactttgacagcttctacagcgaggtggccgagctgggccggggccgcttctctgtggtgaagaagtgtgaccagaagggcaccaagagagctgtggccaccaagtttgtgaacaagaagctgatgaagagggaccaggtgacccatgagctgggcatcctgcagagcctgcagcaccccctgctggtgggcctgctggacacctttgagacccccaccagctacatcctggtgctggagatggctgaccagggccgcctgctggactgtgtggtgcgctggggcagcctgacagagggcaagatccgggcccacctgggggaggtgctggaggccgtgcgctacctgcacaactgcagaattgcccacctggacctgaagccagagaacatcctggtggatgagagcctggccaagcccaccatcaagctggccgactttggagatgctgtgcagctgaacaccacctactacatccaccagctgctgggcaaccctgagtttgctgcccctgagatcatcctgggcaaccctgtgtccctgaccagtgacacctggagcgtgggcgtgctgacctacgtgctgctgtctggagtgagccccttcctggatgacagcgtggaggagacctgcctgaacatctgccgcctggacttctccttcccagatgactacttcaagggcgtgtcccagaaggccaaggagtttgtgtgcttcctgctgcaggaggaccctgccaagaggcccagcgctgccctggccctgcaggagcagtggctgcaggccggaaatggccgcagcactggagtgctggacaccagccggctgaccagcttcatcgagaggaggaagcaccagaatgatgtgcggcccatccgcagcatcaagaacttcctgcagagccggctgctgccccgggtgtag

SEQ ID NO: 174425 - DNA, 768 bp, synthetic construct
  misc_feature 1..768: note = Description of Artificial Sequence: Synthetic coding sequence
  source 1..768: mol_type = other DNA
atggccctggaggaccggcccagcagcctgctggtggaccagggcgacagcagcagccccagcttcaaccccagcgacaacagcctgctgagcagcagcagccccattgatgagatggaggagaggaagagcagcagcctgaagagaagacactacgtgctgcaggagctggtggagacagagcgggactatgtgcgggacctgggctacgtggtggagggctacatggccctgatgaaggaggatggagtgcctgatgacatgaagggcaaggacaagatcgtgtttggaaacatccaccagatctatgactggcaccgggacttcttcctgggggagctggagaagtgcctggaggaccctgagaagctgggcagcctgtttgtgaagcatgaaagaaggctgcacatgtacatcgcctactgccagaacaagcccaagtctgagcacatcgtgtctgagtacatcgacaccttctttgaggacctgaagcagaggctgggccaccggctgcagctgacagacctgctgatcaagcctgtgcagaggatcatgaagtaccagctgctgctgaaggacttcctgaagtacagcaagaaggccagcctggacaccagcgagctggagagagctgtggaggtgatgtgcatcgtgccccggcgctgcaatgacatgatgaatgtgggccgcctgcagggctttgatggccgggtggtggccctgtgccaccgcttcaaggagaccttccgggagatctgctggttctag

SEQ ID NO: 174426 - DNA, 1203 bp, synthetic construct
  misc_feature 1..1203: note = Description of Artificial Sequence: Synthetic coding sequence
  source 1..1203: mol_type = other DNA
atgaatggccagctggacctgagcggcaagctgatcatcaaggcccagctgggggaggacatccgccgcatccccatccacaatgaagacatcacctatgatgagctggtgctgatgatgcagagggtcttccggggcaagctgctgagcaatgatgaggtgaccatcaagtacaaggatgaagatggagacctgatcaccatctttgacagcagtgacctgagctttgccatccagtgcagccgcatcctgaagctgaccctgtttgtgaatggccagccccggcccctggagagcagccaggtgaagtacctgcggcgggagctgattgagctgaggaacaaggtgaaccggctgctggacagcctggagcccccaggagagcccggccccagcaccaacatcccagaaaatgacacagtggatggccgggaggagaagagcgccagtgacagcagcggcaagcagagcacccaggtgatggccgcctccatgtctgcctttgaccccctgaagaaccaggatgagatcaacaagaatgtgatgtctgccttcggcctgacagatgaccaggtgtctggccccccatctgccccagcagaagatagaagtggcaccccagacagcatcgccagcagcagcagcgctgcccaccccccaggagtgcagccccagcagcccccctacaccggggcccagacccaggccggccagatcgagggccagatgtaccagcagtaccagcagcaggccggctatggagcccagcagccccaggccccaccccagcagccccagcagtatggcatccagtacagcgccagctacagccagcagacaggcccccagcagccccagcagttccagggctacggccagcagcccaccagccaggccccagccccagccttcagcggccagccccagcagctgcctgcccagcccccccagcagtaccaggccagcaactacccagcccagacctacacagcccagaccagccagcccaccaactacacagtggccccagccagccagcccggcatggcccccagccagcccggggcctaccagcccaggcctggcttcaccagcctgcccggcagcaccatgaccccaccacccagcggccccaacccctatgccaggaaccggccccccttcggccagggctacacccagcccggccctggctacagatag

SEQ ID NO: 174427 - DNA, 1101 bp, synthetic construct
  misc_feature 1..1101: note = Description of Artificial Sequence: Synthetic coding sequence
  source 1..1101: mol_type = other DNA
atgaatggccagctggacctgagcggcaagctgatcatcaaggcccagctgggggaggacatccgccgcatccccatccacaatgaagacatcacctatgatgagctggtgctgatgatgcagagggtcttccggggcaagctgctgagcaatgatgaggtgaccatcaagtacaaggatgaagatggagacctgatcaccatctttgacagcagtgacctgagctttgccatccagtgcagccgcatcctgaagctgaccctgtttgtgaatggccagccccggcccctggagagcagccaggtgaagtacctgcggcgggagctgattgagctgaggaacaaggtgaaccggctgctggacagcctggagcccccaggagagcccggccccagcaccaacatcccagaaaatgacacagtggatggccgggaggagaagagcgccagtgacagcagcggcaagcagagcacccaggtgatggccgcctccatgtctgcctttgaccccctgaagaaccaggatgagatcaacaagaatgtgatgtctgccttcggcctgacagatgaccaggtgtctggccccccatctgccccagcagaagatagaagtggcaccccagacagcatcgccagcagcagcagcgctgcccaccccccaggagtgcagccccagcagcccccctacaccggggcccagacccaggccggccagatgtaccagcagtacagcaacagacctgccatggtgcacagcagccggcggctgcacctgagcagcctgaacagcatggtgttcagcatccagcaggccatcgtgtcccggctggacctgaacaacctgagcagcagccgggacatggccagcaaccagctgcccaggcaccagctgctgcccttcctggtgtccctgaacaactgcctgctgagccgccacagcagcacccggcgggccatcatcctgcacaagctgaccctgcccaagctgctgagcctgctgatcatcctgtggctgctgcccctgaacctggagtggctgcaggccaacctgggccccatcaaccaggaccaggtgctgctgcacttcctggaggtgccctag

SEQ ID NO: 174428 - DNA, 474 bp, synthetic construct
  misc_feature 1..474: note = Description of Artificial Sequence: Synthetic coding sequence
  source 1..474: mol_type = other DNA
atgaatggccagctggacctgagcggcaagctgatcatcaaggcccagctgggggaggacatccgccgcatccccatccacaatgaagacatcacctatgatgagctggtgctgatgatgcagagggtcttccggggcaagctgctgagcaatgatgaggtgaccatcaagtacaaggatgaagatggagacctgatcaccatctttgacagcagtgacctgagctttgccatccagtgcagccgcatcctgaagctgaccctgtttgtgaatggccagccccggcccctggagagcagccaggtgaagtacctgcggcgggagctgattgagctgaggaacaaggtgaaccggctgctggacagcctggagcccccaggagagcccggccccagcaccaacatcccagaaaatgacacagtggatggccgggaggagaagagcgccagtgacagcagcggcaagcagagctag

SEQ ID NO: 174429 - DNA, 387 bp, synthetic construct
  misc_feature 1..387: note = Description of Artificial Sequence: Synthetic coding sequence
  source 1..387: mol_type = other DNA
atgaatggccagctggacctgagcggcaagctgatcatcaaggcccagctgggggaggacatccgccgcatccccatccacaatgaagacatcacctatgatgagctggtgctgatgatgcagagggtcttccggggcaagctgctgagcaatgatgaggtgaccatcaagtacaaggatgaagatggagacctgatcaccatctttgacagcagtgacctgagctttgccatccagtgcagccgcatcctgaagctgaccctgtttgtgaatggccagccccggcccctggagagcagccaggtgaagtacctgcggcgggagctgattgagctgaggaacaaggtgaaccggctgctggacagcctggagcccccaggagagtag

SEQ ID NO: 174430 - DNA, 546 bp, synthetic construct
  misc_feature 1..546: note = Description of Artificial Sequence: Synthetic coding sequence
  source 1..546: mol_type = other DNA
atgaatggccagctggacctgagcggcaagctgatcatcaaggcccagctgggggaggacatccgccgcatccccatccacaatgaagacatcacctatgatgagctggtgctgatgatgcagagggtcttccggggcaagctgctgagcaatgatgaggtgaccatcaagtacaaggatgaagatggagacctgatcaccatctttgacagcagtgacctgagctttgccatccagtgcagccgcatcctgaagctgaccctgtttgtgaatggccagccccggcccctggagagcagccaggtgaagtacctgcggcgggagctgattgagctgaggaacaaggtgaaccggctgctggacagcctggagcccccaggagagcccggccccagcaccaacatcccagaaaatgacacagtggatggccgggaggagaagagcgccagtgacagcagcggcaagcagagcacccaggtgatggccgcctccatgtctgcctttgaccccctgaagaaccaggatgagatcaacaagaatgtgtag

SEQ ID NO: 174431 - DNA, 1203 bp, synthetic construct; identical to SEQ ID NO: 174426
  misc_feature 1..1203: note = Description of Artificial Sequence: Synthetic coding sequence
  source 1..1203: mol_type = other DNA

SEQ ID NO: 174432 - DNA, 1191 bp, synthetic construct
  misc_feature 1..1191: note = Description of Artificial Sequence: Synthetic coding sequence
  source 1..1191: mol_type = other DNA
atgaatggccagctggacctgagcggcaagctgatcatcaaggcccagctgggggaggacatccgccgcatccccatccacaatgaagacatcacctatgatgagctggtgctgatgatgcagagggtcttccggggcaagctgctgagcaatgatgaggtgaccatcaagtacaaggatgaagatggagacctgatcaccatctttgacagcagtgacctgagctttgccatccagtgcagccgcatcctgaagctgaccctgtttgtgaatggccagccccggcccctggagagcagccaggtgaagtacctgcggcgggagctgattgagctgaggaacaaggtgaaccggctgctggacagcctggagcccccaggagagcccggccccagcaccaacatcccagaaaatgacacagtggatggccgggaggagaagagcgccagtgacagcagcggcaagcagagcacccaggtgatggccgcctccatgtctgcctttgaccccctgaagaaccaggatgagatcaacaagaatgtgatgtctgccttcggcctgacagatgaccaggtgtctggccccccatctgccccagcagaagatagaagtggcaccccagacagcatcgccagcagcagcagcgctgcccaccccccaggagtgcagccccagcagcccccctacaccggggcccagacccaggccggccagatgtaccagcagtaccagcagcaggccggctatggagcccagcagccccaggccccaccccagcagccccagcagtatggcatccagtacagcgccagctacagccagcagacaggcccccagcagccccagcagttccagggctacggccagcagcccaccagccaggccccagccccagccttcagcggccagccccagcagctgcctgcccagcccccccagcagtaccaggccagcaactacccagcccagacctacacagcccagaccagccagcccaccaactacacagtggccccagccagccagcccggcatggcccccagccagcccggggcctaccagcccaggcctggcttcaccagcctgcccggcagcaccatgaccccaccacccagcggccccaacccctatgccaggaaccggccccccttcggccagggctacacccagcccggccctggctacagatag

SEQ ID NO: 174433 - DNA, 729 bp, synthetic construct
  misc_feature 1..729: note = Description of Artificial Sequence: Synthetic coding sequence
  source 1..729: mol_type = other DNA
atgggagaggccagccccccagccccagcccggcggcacctgctggtgctgctgctgctgctgagcaccctggtgatccccagcgctgctgcccccatccatgatgctgatgcccaggagagcagcctgggcctgaccggcctgcagagcctgctgcagggcttcagccgcctcttcctgaagggcaacctgctgcggggcatcgacagcctcttcagcgcccccatggacttccggggcctgcccggcaactaccacaaggaggagaaccaggagcaccagctgggcaacaacaccctgagcagccacctgcagattgacaagatgacagacaacaagacaggagaggtgctgatcagtgaaaatgtggtggccagcatccagcctgctgagggcagctttgaaggagacctgaaggtgcccaggatggaggagaaggaggccctggtgcccatccagaaggccacagacagcttccacacagagctgcacccccgggtggccttctggatcatcaagctgcccaggagaagaagccaccaggatgccctggagggcggccactggctgtctgagaagaggcaccggctgcaggccatcagagatggcctgaggaagggcacccacaaggatgtgctggaggagggcacagagagcagcagccacagccggctgagccccaggaagacccacctgctgtacatcctgcggcccagccggcagctgtag

SEQ ID NO: 174434 - DNA, 1980 bp, synthetic construct
  misc_feature 1..1980: note = Description of Artificial Sequence: Synthetic coding sequence
  source 1..1980: mol_type = other DNA
atgcagggcagcagcctgtggctgagcctgaccttccgcagcgcccgggtgctgagccgggcccgcttctttgagtggcagagccctggcctgcccaacacagctgccatggagaatggaacaggcccctacggggaggagcggccccgggaggtgcaggagaccaccgtgacagagggcgccgccaagatcgccttccccagcgccaatgaggtgttctacaaccctgtgcaggagttcaacagagacctgacctgtgctgtgatcacagaatttgcccgcatccagctgggcgccaagggcatccagatcaaggtgcctggagagaaggacacccagaaggtggtggtggacctgtctgagcaggaggaggagaaggtggagctgaaggagagcgagaacctggccagcggggaccagcccaggacagctgctgtgggggagatctgtgaggagggcctgcacgtgctggagggcctggccgccagcggcctgcggagcatccgctttgccctggaggtgcccggcctgcggtctgtggtggccaatgatgccagcaccagggctgtggacctgatcagaagaaatgtgcagctgaatgatgtggcccacctggtgcagcccagccaggctgatgccaggatgctgatgtaccagcaccagagggtgtctgaaagatttgatgtgattgacctggacccctacggcagccctgccaccttcctggatgctgctgtgcaggccgtgtctgagggcggcctgctgtgtgtgacctgcacagacatggctgtgctggccggcaacagcggggagacctgctacagcaaatatggagccatggccctgaagagccgggcctgccacgagatggccctgcgcatcgtgctgcacagcctggacctgcgggccaactgctaccagagatttgtggtgcccctgctgagcatctctgctgacttctacgtgcgggtgtttgtgcgggtcttcaccggccaggccaaggtgaaggccagcgccagcaagcaggccctggtgttccagtgtgtgggctgtggggccttccacctgcagaggctgggcaaggccagcggcgtgcccagcggccgggccaagttctctgctgcctgtggcccccctgtgaccccagaatgtgagcactgcggccagaggcaccagctgggcggccccatgtgggccgagcccatccatgacctggactttgtgggccgggtgctggaggccgtgtctgccaaccctggccgcttccacaccagcgagcgcatccggggcgtgctgagcgtcatcacagaggagctgcctgatgtgcccctgtactacaccctggaccagctgagcagcaccatccactgcaacacccccagcctgctgcagctgcggagcgccctgctgcacgccgacttccgggtgtccctgagccacgcctgcaagaatgctgtgaagacagatgccccagccagcgccctgtgggacatcatgcgctgctgggagaaggaatgtcctgtgaagcgggagcggctgtctgagaccagccctgccttccgcatcctgtctgtggagccccggctgcaggccaacttcaccatcagagaagatgccaaccccagcagccggcagaggggcctgaagcgcttccaggccaaccctgaggccaactggggcccccggccccgggcccggcctgggggcaaggccgcagatgaggccatggaggagcggcggcggctgctgcagaacaagaggaaggagcccccagaagatgtggcccagagagctgcccggctgaagaccttcccctgcaagcgcttcaaggagggcacctgccagagaggagaccagtgctgctacagccacagcccccccaccccccgggtgtctgcagatgctgccccagactgcccagagaccagcaaccagaccccacctggccctggagctgctgctggccctggcatcgactag

SEQ ID NO: 174435 - DNA, 1980 bp, synthetic construct; identical to SEQ ID NO: 174434
  misc_feature 1..1980: note = Description of Artificial Sequence: Synthetic coding sequence
  source 1..1980: mol_type = other DNA

SEQ ID NO: 174436 - DNA, 1878 bp, synthetic construct
  misc_feature 1..1878: note = Description of Artificial Sequence: Synthetic coding sequence
  source 1..1878: mol_type = other DNA
atgtctgagaacctggacaatgaaggccccaagcccatggagagctgtggccaggagagcagcagcgccctgagctgccccaccgtgtctgtgcccccagctgccccagctgccctggaggaggtggagaaggagggcgctggggccgccactggacctggcccccagcccggcctgtacagctacatcagagatgacctcttcaccagcgagatcttcaagctggagctgcagaatgtgcccaggcatgccagcttcagtgatgtgcggcgcttcctgggccgcttcggcctgcagccccacaagaccaagctgtttggccagcccccctgtgcctttgtgaccttccgctctgctgctgagcgggacaaggccctgcgggtgctgcacggggccctgtggaagggccggcccctgtctgtgcggctggcccggcccaaggctgaccccatggccaggagaagacggcaggagggggagagcgagccccctgtgaccagggtggctgatgtggtgacccccctgtggacagtgccctatgcagagcagctggagaggaagcagctggagtgtgagcaggtgctgcagaagctggccaaggagatcggcagcaccaacagagccctgctgccctggctgctggagcagaggcacaagcacaacaaggcctgctgccccctggagggcgtgcggcccagcccccagcagacagagtacagaaacaagtgtgagttcctggtgggcgtgggcgtggatggagaggacaacacagtgggctgccgcctgggcaagtacaagggcggcacctgtgctgtggccgccccctttgacacagtgcacatccctgaggccaccaagcaggtggtgaaggccttccaggagttcatccgcagcaccccctacagcgcctatgaccctgagacctacacaggccactggaagcagctgactgtgaggaccagccgccgccaccaggccatggccatcgcctacttccacccccagaagctgagccctgaggagctggccgagctgaagaccagcctggcccagcacttcaccgctggccctggccgggccagcggcgtgacctgcctgtactttgtggaggagggccagaggaagacccccagccaggagggcctgcccctggagcacgtggccggggaccgctgcatccacgaggacctgctgggcctgaccttccgcatcagcccccacgccttcttccaggtgaacaccccagctgctgaggtgctgtacaccgtcatccaggactgggcccagctggatgctggctccatggtgctggatgtgtgctgcggcaccggcaccatcggcctggccctggccaggaaggtgaagagggtcatcggcgtggagctgtgcccagaggccgtggaggatgcccgggtgaatgcccaggacaatgagctgagcaatgtggagttccactgcggccgggcagaggacctggtgcccaccctggtgtcccggctggccagccagcacctggtggccatcctggaccccccccgggccggcctgcacagcaaggtgatcctggccatcagaagagccaagaacctgcggcggctgctgtatgtgtcctgcaacccccgggccgccatgggcaactttgtggacctgtgccgggcccccagcaacagagtgaagggcatccccttccggcctgtgaaggctgtggccgtggacctcttcccccagaccccccactgtgagatgctgatcctgtttgagcgggtggagcaccccaatggaactggagtgctgggcccccacagccccccagcccagcccaccccaggccccccagacaacaccctgcaggagaccggcaccttccccagcagctag

SEQ ID NO: 174437 - DNA, 1878 bp, synthetic construct; identical to SEQ ID NO: 174436
  misc_feature 1..1878: note = Description of Artificial Sequence: Synthetic coding sequence
  source 1..1878: mol_type = other DNA

SEQ ID NO: 174438 - DNA, 1689 bp, synthetic construct
  misc_feature 1..1689: note = Description of Artificial Sequence: Synthetic coding sequence
  source 1..1689: mol_type = other DNA
atgtctgagaacctggacaatgaaggccccaagcccatggagagctgtggccaggagagcagcagcgccctgagctgccccaccgtgtctgtgcccccagctgccccagctgccctggaggaggtggagaaggagggcgctggggccgccactggacctggcccccagcccggcctgtacagctacatcagagatgacctcttcaccagcgagatcttcaagctggagctgcagaatgtgcccaggcatgccagcttcagtgatgtgcggcgcttcctgggccgcttcggcctgcagccccacaagaccaagctgtttggccagcccccctgtgcctttgtgaccttccgctctgctgctgagcgggacaaggccctgcgggtgctgcacggggccctgtggaagggccggcccctgtctgtgcggctggcccggcccaaggctgaccccatggccaggagaagacggcaggagggggagagcgagccccctgtgaccagggtggctgatgtggtgacccccctgtggacagtgccctatgcagagcagctggagaggaagcagctggagtgtgagcaggtgctgcagaagctggccaaggagatcggcagcaccaacagagccctgctgccctggctgctggagcagaggcacaagcacaacaaggcctgctgccccctggagggcgtgcggcccagcccccagcagacagagtacagaaacaagtgtgagttcctggtgggcgtgggcgtggatggagaggacaacacagtgggctgccgcctgggcaagtacaagggcggcacctgtgctgtggccgccccctttgacacagtgcacatccctgaggccaccaagcaggtggtgaaggccttccaggagttcatccgcagcaccccctacagcgcctatgaccctgagacctacacaggccactggaagcagctgactgtgaggaccagccgccgccaccaggccatggccatcgcctacttccacccccagaagctgagccctgaggagctggccgagctgaagaccagcctggcccagcacttcaccgctggccctggccgggccagcggcgtgacctgcctgtactttgtggaggagggccagaggaagacccccagccaggagggcctgcccctggagcacgtggccggggaccgctgcatccacgaggacctgctgggcctgaccttccgcatcagcccccacgccttcttccaggtgaacaccccagctgctgaggtgctgtacaccgtcatccaggactgggcccagctggatgctggctccatggtgctggatgtgtgctgcggcaccggcaccatcggcctggccctggccaggaaggtgaagagggtcatcggcgtggagctgtgcccagaggccgtggaggatgcccgggtgaatgcccaggacaatgagctgagcaatgtggagttccactgcggccgggcagaggacctggtgcccaccctggtgtcccggctggccagccagcacctggtggccatcctggaccccccccgggccggcctgcacagcaaggtgatcctggccatcagaagagccaagaacctgcggcggctgctgtatgtgtcctgcaacccccgggccgccatgggcaactttgtggatgcccccctcttccccccccagcccctgcagagccccatctag

SEQ ID NO: 174439 - DNA, 1530 bp, synthetic construct
  misc_feature 1..1530: note = Description of Artificial Sequence: Synthetic coding sequence
  source 1..1530: mol_type = other DNA
atggtgctgtggatcctgtggaggcccttcggcttcagcggccgcttcctgaagctggagagccacagcatcacagagagcaagagcctcatccctgtggcctggaccagcctgacccagatgctgctggaggcccctggcatcttcctgctgggccagaggaagcgcttcagcaccatgcctgagacagagacccatgagcgggagacagagctgttcagccccccatctgatgtgcggggcatgaccaagctggacagaacagccttcaagaagacagtgaacatccctgtgctgaaggtgaggaaggagatcgtgtccaagctgatgaggagcctgaagagagctgccctgcagaggcctggcatccggcgggtgattgaggaccctgaggacaaggagagccgcctcatcatgctggacccctacaagatcttcacccatgacagctttgagaaggccgagctgtctgtgctggagcagctgaatgtgagcccccagatcagcaagtacaacctggagctgacctatgagcacttcaagtctgaggagatcctgcgggctgtgctgcctgagggccaggatgtgaccagcggcttcagcagaattggccacatcgcccacctgaacctgcgggaccaccagctgtccttcaagcacctgattggccaggtgatgattgacaagaaccctggcatcaccagcgctgtgaacaagatcaacaacatcgacaacatgtacagaaacttccagatggaggtgctgagcggggagcagaacatgatgaccaaggtgcgggagaacaactacacctatgaatttgacttcagcaaggtgtactggaacccccggctgagcacagagcacagccgcatcacagagctgctgaagccaggagatgtgctgtttgatgtgtttgctggggtgggcccctttgccatccctgtggccaagaagaactgcaccgtgtttgccaatgacctgaaccctgagagccacaagtggctgctgtacaactgcaagctgaacaaggtggaccagaaggtgaaggtgttcaacctggatggcaaggacttcctgcagggccctgtgaaggaggagctgatgcagctgctgggcctgagcaaggagaggaagcccagcgtgcacgtggtgatgaacctgcctgccaaggccatcgagttcctgagcgccttcaagtggctgctggatggccagccctgcagcagcgagttcctgcccatcgtgcactgctacagcttcagcaaggatgccaacccagcagaagatgtgcggcagagagctggagctgtgctgggcatcagcctggaggcctgcagctctgtgcacctggtgagaaatgtggcccccaacaaggagatgctgtgcatcaccttccagatcccagcctctgtgctgtacaagaaccagaccagaaatcctgagaaccatgaagatcctcccctgaagaggcagaggacagctgaggccttcagtgatgagaagacccagatcgtgagcaacacctag

SEQ ID NO: 174440 - DNA, 1266 bp, synthetic construct
  misc_feature 1..1266: note = Description of Artificial Sequence: Synthetic coding sequence
  source 1..1266: mol_type = other DNA
atgcaggccctgcggcacgtggtgtgtgccctgagcggcggcgtggacagcgctgtggccgccctgctgctgcggcggcggggctaccaggtgactggagtcttcatgaagaactgggacagcctggatgaacatggagtgtgcacagctgacaaggactgtgaagatgcctacagagtgtgccagatcctggacatccccttccaccaggtgtcctatgtgaaggagtactggaatgatgtgttcagtgacttcctgaatgaatatgaaaaaggaagaacacccaacccagacatcgtgtgcaacaagcacatcaagttcagctgcttcttccactatgctgtggacaacctgggcgcagatgccatcgccaccggccactacgcccggaccagcctggaggatgaggaggtgtttgagcagaagcacgtgaagaagccagagggcctcttcaggaacagatttgaggtgagaaatgctgtgaagctgctgcaggccgctgacagcttcaaggaccagaccttcttcctgagccaggtgtcccaggatgccctgcggaggaccatcttccccctgggcggcctgaccaaggagtttgtgaagaagattgctgctgagaaccggctgcaccacgtgctgcagaagaaggagagcatgggcatgtgcttcatcggcaagaggaactttgagcacttcctgctgcagtacctgcagcccaggcctggccacttcatcagcattgaggacaacaaggtgctgggcacccacaagggctggttcctgtacaccctgggccagagggccaacatcggcggcctgcgggagccctggtacgtggtggagaaggacagcgtgaagggagatgtgtttgtggcccccaggacagaccacccagccctgtacagagacctgctgcggaccagccgggtgcactggattgctgaggagcccccagctgccctggtgcgggacaagatgatggagtgccacttccgcttccgccaccagatggccctggtgccctgtgtgctgaccctgaaccaggacggcaccgtgtgggtgacagctgtgcaggccgtgcgggccctggccaccggccagtttgctgtgttctacaagggagatgagtgcctgggcagcggcaagatcctgcggctgggccccagcgcctacaccctgcagaagggccagaggcgggccggcatggccacagagagccccagcgacagcccagaagatggccctggcctgagccccctgctgtag

SEQ ID NO: 174441 - DNA, 300 bp, synthetic construct
  misc_feature 1..300: note = Description of Artificial Sequence: Synthetic coding sequence
  source 1..300: mol_type = other DNA
atgcaggccctgcggcacgtggtgtgtgccctgagcggcggcgtggacagcgctgtggccgccctgctgctgcggcggcggggctaccaggtgactggagtcttcatgaagaactgggacagcctggatgaacatggagtgtgcacagctgacaaggactgtgaagatgcctacagagtgtgccagatcctggacatccccttccaccaggtgtcctatgtgaaggagtactggaatgatgtgttccggggccgctgccactgccacaggagcctgtgcaagaacttccctggaagatag

SEQ ID NO: 174442 - DNA, 396 bp, synthetic construct
  misc_feature 1..396: note = Description of Artificial Sequence: Synthetic coding sequence
  source 1..396: mol_type = other DNA
atgaagaactgggacagcctggatgagcacggcgtgtgcacagctgacaaggactgtgaagatgcctacagagtgtgccagatcctggacatccccttccaccaggtgtcctatgtgaaggagtactggaatgatgtgttcagtgacttcctgaatgaatatgagaagggccgcacccccaacccagacatcgtgtgcaacaagcacatcaagttcagctgcttcttccactatgctgtggacaacctgggcgcagatgccatcgccaccggccactacgcccggaccagcctggaggatgaggaggtgtttgagcagaagcacgtgaagaagccagagggcctcttcaggaacagatttgaggtgagaaatgcccgcttccccaggatgccctag

SEQ ID NO: 174443 - DNA, 300 bp, synthetic construct; identical to SEQ ID NO: 174441
  misc_feature 1..300: note = Description of Artificial Sequence: Synthetic coding sequence
  source 1..300: mol_type = other DNA

SEQ ID NO: 174444 - DNA, 300 bp, synthetic construct; identical to SEQ ID NO: 174441
  misc_feature 1..300: note = Description of Artificial Sequence: Synthetic coding sequence
  source 1..300: mol_type = other DNA

SEQ ID NO: 174445 - DNA, 300 bp, synthetic construct; identical to SEQ ID NO: 174441
  misc_feature 1..300: note = Description of Artificial Sequence: Synthetic coding sequence
  source 1..300: mol_type = other DNA

SEQ ID NO: 174446 - DNA, 501 bp, synthetic construct
  misc_feature 1..501: note = Description of Artificial Sequence: Synthetic coding sequence
  source 1..501: mol_type = other DNA
atgcaggccctgcggcacgtggtgtgtgccctgagcggcggcgtggacagcgctgtggccgccctgctgctgcggcggcggggctaccaggtgactggagtcttcatgaagaactgggacagcctggatgaacatggagtgtgcacagctgacaaggactgtgaagatgcctacagagtgtgccagatcctggacatccccttccaccaggtgtcctatgtgaaggagtactggaatgatgtgttcagtgacttcctgaatgaatatgaaaaaggaagaacacccaacccagacatcgtgtgcaacaagcacatcaagttcagctgcttcttccactatgctgtggacaacctgggcgcagatgccatcgccaccggccactacgcccggaccagcctggaggatgaggaggtgtttgagcagaagcacgtgaagaagccagagggcctcttcaggaacagatttgaggtgagaaatgcccgcttccccaggatgccctag

SEQ ID NO: 174447 - DNA, 1038 bp, synthetic construct
  misc_feature 1..1038: note = Description of Artificial Sequence: Synthetic coding sequence
  source 1..1038: mol_type = other DNA
atggagcccctgcgggtgctggagctgtacagcggcgtgggcggcatgcaccacgccctgcgggagagctgcatcccagcccaggtggtggccgccattgatgtgaacacagtggccaatgaggtgtacaagtacaacttcccccacacccagctgctggccaagaccatcgagggcatcaccctggaggagtttgaccggctgagctttgacatgatcctgatgagccccccctgccagcccttcacccgggacctgctgatccagaccatcgagaactgtggcttccagtaccaggagttcctgctgagccccaccagcctgggcatccccaacagccggctgcgctacttcctgattgccaagctgcagagcgagcccctgcccttccaggcccctggccaggtgctgatggagttccccaagattgaatctgtgcacccccagaagtatgccatggatgtggagaacaagatccaggagaagaatgtggagcccaacatcagctttgatggcagcatccagtgcagcggcaaggatgccatcctcttcaagctggagacagctgaggagatccacaggaagaaccagcaggacagcgacctgtctgtgaagatgctgaaggacttcctggaggatgacacagatgtgaaccagtacctgctgccccccaagagcctgctgcgctatgccctgctgctggacatcgtgcagcccacctgccgccgctctgtgtgcttcaccaagggctacggcagctacatcgagggcaccggctctgtgctgcagacagcagaagatgtgcaggtggagaacatctacaagagcctgaccaacctgagccaggaggagcagatcaccaagctgctgatcctgaagctgcgctacttcacccccaaggagatcgccaacctgctgggcttccccccagagtttggcttccctgagaagatcaccgtgaagcagcgctaccgcctgctgggcaacagcctgaatgtgcacgtggtggccaagctgatcaagatcctgtatgaatag

SEQ ID NO: 174448 - DNA, 216 bp, synthetic construct
  misc_feature 1..216: note = Description of Artificial Sequence: Synthetic coding sequence
  source 1..216: mol_type = other DNA
atggagcccctgcgggtgctggagctgtacagcggcgtgggcggcatgcaccacgccctgcgggagagctgcatcccagcccaggtggtggccgccattgatgtgaacacagtggccaatgaggtgtacaagtacaacttcccccacacccagctgctggccaagaccatcgagatcaccaagatcaccaaggtgtacagctttgggaagtgctag

SEQ ID NO: 174449 - DNA, 354 bp, synthetic construct
  misc_feature 1..354: note = Description of Artificial Sequence: Synthetic coding sequence
  source 1..354: mol_type = other DNA
atggagcccctgcgggtgctggagctgtacagcggcgtgggcggcatgcaccacgccctgcgggagagctgcatcccagcccaggtggtggccgccattgatgtgaacacagtggccaatgaggtgtacaagtacaacttcccccacacccagctgctggccaagaccatcgagcggcccctggacaccaacaacaggaagctgtggctgtctgtgccccgggtgtccatcatcagcaacctgtcctggcacagcaagttcaaggccaccatcttctcctactgcaaggcctctgtgcgggccatcaccctgagcagcccctggagcggcacagatggagtgccccagaactag

SEQ ID NO: 174450 - DNA, 1176 bp, synthetic construct
  misc_feature 1..1176: note = Description of Artificial Sequence: Synthetic coding sequence
  source 1..1176: mol_type = other DNA
atggagcccctgcgggtgctggagctgtacagcggcgtgggcggcatgcaccacgccctgcgggagagctgcatcccagcccaggtggtggccgccattgatgtgaacacagtggccaatgaggtgtacaagtacaacttcccccacacccagctgctggccaagaccatcgagggcatcaccctggaggagtttgaccggctgagctttgacatgatcctgatgagccccccctgccagcccttcaccagaattggccggcagggcgacatgacagacagcaggaccaacagcttcctgcacatcctggacatcctgccccggctgcagaagctgcccaagtacatcctgctggagaatgtgaagggctttgaggtgagcagcacccgggacctgctgatccagaccatcgagaactgtggcttccagtaccaggagttcctgctgagccccaccagcctgggcatccccaacagccggctgcgctacttcctgattgccaagctgcagagcgagcccctgcccttccaggcccctggccaggtgctgatggagttccccaagattgaatctgtgcacccccagaagtatgccatggatgtggagaacaagatccaggagaagaatgtggagcccaacatcagctttgatggcagcatccagtgcagcggcaaggatgccatcctcttcaagctggagacagctgaggagatccacaggaagaaccagcaggacagcgacctgtctgtgaagatgctgaaggacttcctggaggatgacacagatgtgaaccagtacctgctgccccccaagagcctgctgcgctatgccctgctgctggacatcgtgcagcccacctgccgccgctctgtgtgcttcaccaagggctacggcagctacatcgagggcaccggctctgtgctgcagacagcagaagatgtgcaggtggagaacatctacaagagcctgaccaacctgagccaggaggagcagatcaccaagctgctgatcctgaagctgcgctacttcacccccaaggagatcgccaacctgctgggcttccccccagagtttggcttccctgagaagatcaccgtgaagcagcgctaccgcctgctgggcaacagcctgaatgtgcacgtggtggccaagctgatcaagatcctgtatgaatag

SEQ ID NO: 174451 - DNA, 1104 bp, synthetic construct
  misc_feature 1..1104: note = Description of Artificial Sequence: Synthetic coding sequence
  source 1..1104: mol_type = other DNA
atggagcccctgcgggtgctggagctgtacagcggcgtgggcggcatgcaccacgccctgcgggagagctgcatcccagcccaggtggtggccgccattgatgtgaacacagtggccaatgaggtgtacaagtacaacttcccccacacccagctgctggccaagaccatcgagggcatcaccctggaggagtttgaccggctgagctttgacatgatcctgatgagccccccctgccagcccttcacccggctgcagaagctgcccaagtacatcctgctggagaatgtgaagggctttgaggtgagcagcacccgggacctgctgatccagaccatcgagaactgtggcttccagtaccaggagttcctgctgagccccaccagcctgggcatccccaacagccggctgcgctacttcctgattgccaagctgcagagcgagcccctgcccttccaggcccctggccaggtgctgatggagttccccaagattgaatctgtgcacccccagaagtatgccatggatgtggagaacaagatccaggagaagaatgtggagcccaacatcagctttgatggcagcatccagtgcagcggcaaggatgccatcctcttcaagctggagacagctgaggagatccacaggaagaaccagcaggacagcgacctgtctgtgaagatgctgaaggacttcctggaggatgacacagatgtgaaccagtacctgctgccccccaagagcctgctgcgctatgccctgctgctggacatcgtgcagcccacctgccgccgctctgtgtgcttcaccaagggctacggcagctacatcgagggcaccggctctgtgctgcagacagcagaagatgtgcaggtggagaacatctacaagagcctgaccaacctgagccaggaggagcagatcaccaagctgctgatcctgaagctgcgctacttcacccccaaggagatcgccaacctgctgggcttccccccagagtttggcttccctgagaagatcaccgtgaagcagcgctaccgcctgctgggcaacagcctgaatgtgcacgtggtggccaagctgatcaagatcctgtatgaatag

SEQ ID NO: 174452 - DNA, 933 bp, synthetic construct
  misc_feature 1..933: note = Description of Artificial Sequence: Synthetic coding sequence
  source 1..933: mol_type = other DNA
atgagcaccctgagcctgatgaagtacaccagcatcatcttcctgacccacagctacctgccccggcggctgaagattggccggcagggcgacatgacagacagcaggaccaacagcttcctgcacatcctggacatcctgccccgggacctgctgatccagaccatcgagaactgtggcttccagtaccaggagttcctgctgagccccaccagcctgggcatccccaacagccggctgcgctacttcctgattgccaagctgcagagcgagcccctgcccttccaggcccctggccaggtgctgatggagttccccaagattgagagcgtgcacccccagaagtatgccatggatgtggagaacaagatccaggagaagaatgtggagcccaacatcagctttgatggcagcatccagtgcagcggcaaggatgccatcctcttcaagctggagacagctgaggagatccacaggaagaaccagcaggacagcgacctgtctgtgaagatgctgaaggacttcctggaggatgacacagatgtgaaccagtacctgctgccccccaagagcctgctgcgctatgccctgctgctggacatcgtgcagcccacctgcagaagatctgtgtgcttcaccaagggctacggcagctacatcgagggcactggatctgtgctgcagacagcagaagatgtgcaggtggagaacatctacaagagcctgaccaacctgagccaggaggagcagatcaccaagctgctgatcctgaagctgcgctacttcacccccaaggagatcgccaacctgctgggcttccccccagagtttggcttccctgagaagatcaccgtgaagcagcgctaccgcctgctgggcaacagcctgaatgtgcacgtggtggccaagctgatcaagatcctgtatgaatag

SEQ ID NO: 174453 - DNA, 1305 bp, synthetic construct
  misc_feature 1..1305: note = Description of Artificial Sequence: Synthetic coding sequence
  source 1..1305: mol_type = other DNA
atgctgcgctgcctgtaccactggcacaggcctgtgctgaacagacgctggagccggctgtgcctgcccaagcagtacctgttcaccatgaagctgcagagccctgagttccagagcctcttcacagagggcctgaagagcctgacagagctgtttgtgaaggaaaatcatgagctgagaattgctgggggcgctgtgcgggacctgctgaatggagtgaagccccaggacatcgactttgccaccacagccacccccacccagatgaaggagatgttccagagcgctggcatccgcatgatcaacaacagaggagagaagcacggcaccatcacagcccggctgcacgaggagaactttgagatcaccaccctgagaattgatgtgaccacagatggaagacatgctgaggtggagttcaccacagactggcagaaggatgctgagcggcgggacctgaccatcaacagcatgttcctgggctttgatggcaccctgtttgactacttcaacggctatgaggacctgaagaacaagaaggtgcgctttgtgggccacgccaagcagaggatccaggaggactacctgcgcatcctgcgctacttccgcttctacggccgcatcgtggacaagccaggggaccatgaccctgagaccctggaggccatcgcagaaaatgccaagggcctggccggcatcagcggggagcgcatctgggtggagctgaagaagatcctggtgggcaaccacgtgaaccacctgatccacctgatctatgacctggatgtggccccctacatcggcctgcctgccaatgccagcctggaggagtttgacaaggtgtccaagaatgtggatggcttcagccccaagcctgtgaccctgctggccagcctcttcaaggtgcaggatgatgtgaccaagctggacctgcggctgaagatcgccaaggaggagaagaacctgggcctcttcatcgtgaagaacaggaaggacctgatcaaggccacagacagcagtgaccccctgaagccctaccaggacttcatcatcgacagccgggagccagatgccaccaccagggtgtgtgagctgctgaagtaccagggcgagcactgcctgctgaaggagatgcagcagtggagcatcccccccttccctgtgtctggccatgacatcaggaaggtgggcatcagcagcggcaaggagatcggggccctgctgcagcagctgcgggagcagtggaagaagagcggctaccagatggagaaggatgagctgctgagctacatcaagaagacctag

SEQ ID NO: 174454 - DNA, 1245 bp, synthetic construct
  misc_feature 1..1245: note = Description of Artificial Sequence: Synthetic coding sequence
  source 1..1245: mol_type = other DNA
atgctgcgctgcctgtaccactggcacaggcctgtgctgaacagacgctggagccggctgtgcctgcccaagcagtacctgttcaccatgaagctgcagagccctgagttccagagcctcttcacagagggcctgaagagcctgacagagctgtttgtgaaggaaaatcatgagctgagaattgctgggggcgctgtgcgggacctgctgaatggagtgaagccccaggacatcgactttgccaccacagccacccccacccagatgaaggagatgttccagagcgctggcatccgcatgatcaacaacagaggagagaagcacggcaccatcacagcccggctgcacgaggagaactttgagatcaccaccctgagaattgatgtgaccacagatggaagacatgctgaggtggagttcaccacagactggcagaaggatgctgagcggcgggacctgaccatcaacagcatgttcctgggctttgatggcaccctgtttgactacttcaacggctatgaggacctgaagaacaagaaggtgcgctttgtgggccacgccaagcagaggatccaggaggactacctgcgcatcctgcgctacttccgcttctacggccgcatcgtggacaagccaggggaccatgaccctgagaccctggaggccatcgcagaaaatgccaagggcctggccggcatcagcggggagcgcatctgggtggagctgaagaagatcctggtgggcctgcctgccaatgccagcctggaggagtttgacaaggtgtccaagaatgtggatggcttcagccccaagcctgtgaccctgctggccagcctcttcaaggtgcaggatgatgtgaccaagctggacctgcggctgaagatcgccaaggaggagaagaacctgggcctcttcatcgtgaagaacaggaaggacctgatcaaggccacagacagcagtgaccccctgaagccctaccaggacttcatcatcgacagccgggagccagatgccaccaccagggtgtgtgagctgctgaagtaccagggcgagcactgcctgctgaaggagatgcagcagtggagcatcccccccttccctgtgtctggccatgacatcaggaaggtgggcatcagcagcggcaaggagatcggggccctgctgcagcagctgcgggagcagtggaagaagagcggctaccagatggagaaggatgagctgctgagctacatcaagaagacctag

SEQ ID NO: 174455 - DNA, 174 bp, synthetic construct
  misc_feature 1..174: note = Description of Artificial Sequence: Synthetic coding sequence
  source 1..174: mol_type = other DNA
atgctgcgctgcctgtaccactggcacaggcctgtgctgaacagacgctggagccggctgtgcctgcccaagcagtacctgttcaccatgaagctgcagagccctgagttccagagcctcttcacagagggcctgaagagcctgaccggcatcaatgccttccacgagaactag

SEQ ID NO: 174456 - DNA, 174 bp, synthetic construct; identical to SEQ ID NO: 174455
  misc_feature 1..174: note = Description of Artificial Sequence: Synthetic coding sequence
  source 1..174: mol_type = other DNA

SEQ ID NO: 174457 - DNA, 189 bp, synthetic construct
  misc_feature 1..189: note = Description of Artificial Sequence: Synthetic coding sequence
  source 1..189: mol_type = other DNA
atgctgcgctgcctgtaccactggcacaggcctgtgctgaacagacgctggagccggctgtgcctgcccaagcagtacctgttcaccatgaagctgcagagccctgagttccagagcctcttcacagagggcctgaagagcctgacagagctgtttgtgaaggaaaatcatgagctgagaattgcctag

SEQ ID NO: 174458 - DNA, 174 bp, synthetic construct; identical to SEQ ID NO: 174455
  misc_feature 1..174: note = Description of Artificial Sequence: Synthetic coding sequence
  source 1..174: mol_type = other DNA

SEQ ID NO: 174459 - DNA, 1305 bp, synthetic construct; identical to SEQ ID NO: 174453
  misc_feature 1..1305: note = Description of Artificial Sequence: Synthetic coding sequence
  source 1..1305: mol_type = other DNA

SEQ ID NO: 174460 - DNA, 762 bp, synthetic construct
  misc_feature 1..762: note = Description of Artificial Sequence: Synthetic coding sequence
  source 1..762: mol_type = other DNA
atgaacttcagcggcggcggccggcaggaggccgccggcagccggggcagaagagccccccggccccgggagcaggacagagatgtgcagctgagcaaggccctgtcctatgccctgcggcatggagccctgaagctgggcctgcccatgggcgcagatggctttgtgcccctgggcaccctgctgcagctgccccagttccggggcttcagcgcagaagatgtgcagagggtggtggacaccaacaggaagcagagatttgccctgcagctgggggaccccagcacaggcctgctgatccgggccaaccagggccacagcctgcaggtgcccaagctggagctgatgcccctggagaccccccaggccctgccccccatgctggtgcacggcaccttctggaagcactggcccagcatcctgctgaagggcctgagctgccagggccgcacccacatccacctggcccctggcctgcccggggaccccggcatcatcagcggcatgaggagccactgtgaaattgctgtgttcattgatggccccctggccctggctgatggcatccccttcttccgcagcgccaacggggtcatcctgaccccaggcaacacagatggcttcctgctgcccaagtacttcaaggaggccctgcagctgcggcccaccaggaagcccctgagcctggccggagatgaggagacagagtgccagagcagccccaagcacagcagccgggagcggcggcgcatccagcagtag

SEQ ID NO: 174461 - DNA, 768 bp, synthetic construct
  misc_feature 1..768: note = Description of Artificial Sequence: Synthetic coding sequence
  source 1..768: mol_type = other DNA
atgaacttcagcggcggcggccggcaggaggccgccggcagccggggcagaagagccccccggccccgggagcaggacagagatgtgcagctgagcaaggccctgtcctatgccctgcggcatggagccctgaagctgggcctgcccatgggcgcagatggctttgtgcccctgggcaccctgctgcagctgccccagttccggggcttcagcgcagaagatgtgcagagggtggtggacaccaacaggaagcagagatttgccctgcagctgggggaccccagcacaggcctgctgatccgggccaaccagggccacagcctgcaggtgggcgtgcccaagctggagctgatgcccctggagaccccccaggccctgccccccatgctggtgcacggcaccttctggaagcactggcccagcatcctgctgaagggcctgagctgccagggccgcacccacatccacctggcccctggcctgcccggggaccccggcatcatcagcggcatgaggagccactgtgaaattgctgtgttcattgatggccccctggccctggctgatggcatccccttcttccgcagcgccaacggggtcatcctgaccccaggcaacacagatggcttcctgctgcccaagtacttcaaggaggccctgcagctgcggcccaccaggaagcccctgagcctggccggagatgaggagacagagtgccagagcagccccaagcacagcagccgggagcggcggcgcatccagcagtag

SEQ ID NO: 174462 - DNA, 615 bp, synthetic construct
  misc_feature 1..615: note = Description of Artificial Sequence: Synthetic coding sequence
  source 1..615: mol_type = other DNA
atgggcgcagatggctttgtgcccctgggcaccctgctgcagctgccccagttccggggcttcagcgcagaagatgtgcagagggtggtggacaccaacaggaagcagagatttgccctgcagctgggggaccccagcacaggcctgctgatccgggccaaccagggccacagcctgcaggtgcccaagctggagctgatgcccctggagaccccccaggccctgccccccatgctggtgcacggcaccttctggaagcactggcccagcatcctgctgaagggcctgagctgccagggccgcacccacatccacctggcccctggcctgcccggggaccccggcatcatcagcggcatgaggagccactgtgaaattgctgtgttcattgatggccccctggccctggctgatggcatccccttcttccgcagcgccaatggagtcatcctgaccccaggcaacacagatggcttcctgctgcccaagtacttcaaggaggccctgcagctgcggcccaccaggaagcccctgagcctggccggagatgaggagacagagtgccagagcagccccaagcacagcagccgggagcggcggcgcatccagcagtag

SEQ ID NO: 174463 - DNA, 651 bp, synthetic construct
  misc_feature 1..651: note = Description of Artificial Sequence: Synthetic coding sequence
  source 1..651: mol_type = other DNA
atgaacttcagcggcggcggccggcaggaggccgccggcagccggggcagaagagccccccggccccgggagcaggacagagatgtgcagctgagcaaggccctgtcctatgccctgcggcatggagccctgaagctgggcctgcccatgggcgcagatggctttgtgcccctgggcaccctgctgcagctgccccagttccggggcttcagcgcagaagatgtgcagagggtggtggacaccaacaggaagcagagatttgccctgcagctgggggaccccagcacaggcctgctgatccgggccaaccagggccacagcctgcaggtgcccaagctggagctgatgcccctggagaccccccaggccctgccccccatgctggtgcacggcaccttctggaagcactggcccagcatcctgctgaagggcctgagctgccagggccgcacccacatccacctggcccctggcctgcccggggaccccggcatcatcagcggcatgaggagccactgtgaaattgctgtgttcattgatggccccctggccctggccggcaagcccctgagcctggccggagatgaggagacagagtgccagagcagccccaagcacagcagccgggagcggcggcgcatccagcagtag

SEQ ID NO: 174464 - DNA, 504 bp, synthetic construct
  misc_feature 1..504: note = Description of Artificial Sequence: Synthetic coding sequence
  source 1..504: mol_type = other DNA
atgggcgcagatggctttgtgcccctgggcaccctgctgcagctgccccagttccggggcttcagcgcagaagatgtgcagagggtggtggacaccaacaggaagcagagatttgccctgcagctgggggaccccagcacaggcctgctgatccgggccaaccagggccacagcctgcaggtgcccaagctggagctgatgcccctggagaccccccaggccctgccccccatgctggtgcacggcaccttctggaagcactggcccagcatcctgctgaagggcctgagctgccagggccgcacccacatccacctggcccctggcctgcccggggaccccggcatcatcagcggcatgaggagccactgtgaaattgctgtgttcattgatggccccctggccctggccggcaagcccctgagcctggccggagatgaggagacagagtgccagagcagccccaagcacagcagccgggagcggcggcgcatccagcagtag

SEQ ID NO: 174465 - DNA, 516 bp, synthetic construct
  misc_feature 1..516: note = Description of Artificial Sequence: Synthetic coding sequence
  source 1..516: mol_type = other DNA
atggaggagcggggggacagcgagcccaccccaggctgcagcggcctgggccctgggggcgtgcggggctttggagatggcggcggggcccccagctgggccccagaagatgcctggatgggcacccaccccaagtacctggagatgatggagctggacattggagatgccacccaggtgtatgtggccttcctggtgtacctggacctgatggagagcaagtcctggcatgaggtgaactgtgtgggcctgcctgagctgcagctgatctgcctggtgggcacagaaattgaaggagagggcctgcagacagtggtgcccacccccatcacagccagcctgagccacaaccgcatccgggagatcctgaaggccagcaggaagctgcagggcgaccctgacctgcccatgtccttcaccctggccatcgtggagagtgacagcaccatcgtgtactacaagctgacagatggcttcatgctgcctgacccccagaacatcagcctgcggaggtag

SEQ ID NO: 174466 - DNA, 390 bp, synthetic construct
  misc_feature 1..390: note = Description of Artificial Sequence: Synthetic coding sequence
  source 1..390: mol_type = other DNA
atggaggagcggggggacagcgagcccaccccaggctgcagcggcctgggccctgggggcgtgcggggctttggagatggcggcggggcccccagctgggccccagaagatgcctggatgggcacccaccccaagtacctggagatgatggagctggacattggagatgccacccaggtgtatgtggccttcctggtgtacctggacctgatggagagcaagtcctggcatgaggtgaactgtgtgggcctgcctgagctgcagctgatctgcctggtgggcacagaaattgaaggagagggcctgcagacagtggtgcccacccccatcacagccagcctgagccacaaccgcatcttcctgctggaggatgacatccacgtgtcctag

SEQ ID NO: 174467 - DNA, 1398 bp, synthetic construct
  misc_feature 1..1398: note = Description of Artificial Sequence: Synthetic coding sequence
  source 1..1398: mol_type = other DNA
atggccgaggccgtgttccacgcccccaagaggaagagaagagtgtatgagacctatgagagccccctgcccatccccttcggccaggaccacggccccctgaaggagttcaagatcttccgggcagagatgatcaacaacaacgtcatcgtgagaaatgcagaagatattgagcagctgtatggcaagggctactttgggaagggcatcctgagccgcagccggcccagcttcaccatcagtgaccccaagctggtggccaagtggaaggacatgaagaccaacatgcccatcatcaccagcaagcgctaccagcacagcgtggagtgggccgctgagctgatgaggcggcagggccaggatgagagcacagtgcggcgcatcctgaaggactacaccaagcccctggagcacccccctgtgaagagaaatgaggaggcccaggtgcatgacaagctgaacagcggcatggtgagcaacatggagggcacagctggaggagagcggcccagcgtggtgaatggagacagcggcaagagcggcggcgtgggggacccccgggagcccctgggctgcctgcaggagggcagcggctgccaccccaccacagagagctttgagaagtctgtgcgggaggatgccagccccctgccccacgtgtgctgctgcaagcaggatgccctgatcctgcagaggggcctgcaccatgaagatggcagccagcacatcggcctgctgcaccctggggaccggggccctgaccatgaatatgtgctggtggaggaggccgagtgtgccatgtctgagcgggaggccgccccaaatgaggagctggtgcagaggaacagactcatctgcagaagaaacccctaccgcatctttgagtacctgcagctgagcctggaggaggccttcttcctggtgtatgccctgggctgcctgagcatctactatgagaaggagcccctgaccatcgtgaagctgtggaaggccttcaccgtggtgcagcccaccttccgcaccacctacatggcctaccactacttccgcagcaagggctgggtgcccaaggtgggcctgaagtatggaacagacctgctgctgtacagaaaaggaccacccttctaccacgccagctacagcgtcatcatcgagctggtggatgaccactttgagggcagcctgcggcggcccctgtcctggaagagcctggccgccctgagccgggtgtctgtgaatgtgtccaaggagctgatgctgtgctacctgatcaagcccagcaccatgacagacaaggagatggagagccctgagtgcatgaagaggatcaaggtgcaggaggtgatcctgagccgctgggtgagcagccgggagaggagtgaccaggatgacctgtag

SEQ ID NO: 174468 - DNA, 1320 bp, synthetic construct
  misc_feature 1..1320: note = Description of Artificial Sequence: Synthetic coding sequence
  source 1..1320: mol_type = other DNA
atggccgaggccgtgttccacgcccccaagaggaagagaagagtgtatgagacctatgagagccccctgcccatccccttcggccaggaccacggccccctgaaggagttcaagatcttccgggcagagatgatcaacaacaacgtcatcgtgagaaatgcagaagatattgagcagctgtatggcaagggctactttgggaagggcatcctgagccgcagccggcccagcttcaccatcagtgaccccaagctggtggccaagtggaaggacatgaagaccaacatgcccatcatcaccagcaagcgctaccagcacagcgtggagtgggccgctgagctgatgaggcggcagggccaggatgagagcacagtgcggcgcatcctgaaggactacaccaagcccctggagcacccccctgtgaagagaaatgaggaggcccaggtgcatgacaagctgaacagcggcatggtgagcaacatggagggcacagctggaggagagcggcccagcgtggtgaatggagacagcggcaagagcggcggcgtgggggacccccgggagcccctgggctgcctgcaggagggcagcggctgccaccccaccacagagagctttgagaagtctgtgcgggaggatgccagccccctgccccacgtgtgctgctgcaagcaggatgccctgatcctgcagaggggcctgcaccatgaagatggcagccagcacatcggcctgctgcaccctggggaccggggccctgaccatgaatatgtgctggtggaggaggccgagtgtgccatgtctgagcgggaggccgccccaaatgaggaggccttcttcctggtgtatgccctgggctgcctgagcatctactatgagaaggagcccctgaccatcgtgaagctgtggaaggccttcaccgtggtgcagcccaccttccgcaccacctacatggcctaccactacttccgcagcaagggctgggtgcccaaggtgggcctgaagtatggaacagacctgctgctgtacagaaaaggaccacccttctaccacgccagctacagcgtcatcatcgagctggtggatgaccactttgagggcagcctgcggcggcccctgtcctggaagagcctggccgccctgagccgggtgtctgtgaatgtgtccaaggagctgatgctgtgctacctgatcaagcccagcaccatgacagacaaggagatggagagccctgagtgcatgaagaggatcaaggtgcaggaggtgatcctgagccgctgggtgagcagccgggagaggagtgaccaggatgacctgtag

SEQ ID NO: 174469 - DNA, 1347 bp, synthetic construct
  misc_feature 1..1347: note = Description of Artificial Sequence: Synthetic coding sequence
  source 1..1347: mol_type = other DNA
atggccgaggccgtgttccacgcccccaagaggaagagaagagtgtatgagacctatgagagccccctgcccatccccttcggccaggaccacggccccctgaaggagttcaagatcttccgggcagagatgatcaacaacaacgtcatcgtgagaaatgcagaagatattgagcagctgtatggcaagggctactttgggaagggcatcctgagccgcagccggcccagcttcaccatcagtgaccccaagctggtggccaagtggaaggacatgaagaccaacatgcccatcatcaccagcaagcgctaccagcacagcgtggagtgggccgctgagctgatgaggcggcagggccaggatgagagcacagtgcggcgcatcctgaaggactacaccaagcccctggagcacccccctgtgaagagaaatgaggaggcccaggtgcatgacaagctgaacagcggcatggtgagcaacatggagggcacagctggaggagagcggcccagcgtggtgaatggagacagcggcaagagcggcggcgtgggggacccccgggagcccctgggctgcctgcaggagggcagcggctgccaccccaccacagagagctttgagaagtctgtgcgggaggatgccagccccctgccccacgtgtgctgctgcaagcaggatgccctgatcctgcagaggggcctgcaccatgaagatggcagccagcacatcggcctgctgcaccctggggaccggggccctgaccatgaatatgtgctggtggaggaggccgagtgtgccatgtctgagcgggaggccgccccaaatgaggagctggtgcagaggaacagactcatctgcagaagaaacccctaccgcatctttgagtacctgcagctgagcctggaggaggagcccctgaccatcgtgaagctgtggaaggccttcaccgtggtgcagcccaccttccgcaccacctacatggcctaccactacttccgcagcaagggctgggtgcccaaggtgggcctgaagtatggaacagacctgctgctgtacaggaagggcccccccttctaccacgccagctacagcgtcatcatcgagctggtggatgaccactttgagggcagcctgcggcggcccctgtcctggaagagcctggccgccctgagccgggtgtctgtgaatgtgtccaaggagctgatgctgtgctacctgatcaagcccagcaccatgacagacaaggagatggagagccctgagtgcatgaagaggatcaaggtgcaggaggtgatcctgagccgctgggtgagcagccgggagaggagtgaccaggatgacctgtag

SEQ ID NO: 174470 - DNA, 1398 bp, synthetic construct; identical to SEQ ID NO: 174467
  misc_feature 1..1398: note = Description of Artificial Sequence: Synthetic coding sequence
  source 1..1398: mol_type = other DNA

SEQ ID NO: 174471 - DNA, 1320 bp, synthetic construct; identical to SEQ ID NO: 174468
  misc_feature 1..1320: note = Description of Artificial Sequence: Synthetic coding sequence
  source 1..1320: mol_type = other DNA

SEQ ID NO: 174472 - DNA, 1209 bp, synthetic construct
  misc_feature 1..1209: note = Description of Artificial Sequence: Synthetic coding sequence
  source 1..1209: mol_type = other DNA
atggccgaggccgtgttccacgcccccaagaggaagagaagagtgtatgagacctatgagagccccctgcccatccccttcggccaggaccacggccccctgaaggagttcaagatcttccgggcagagatgatcaacaacaacgtcatcgtgagaaatgcagaagatattgagcagctgtatggcaagggctactttgggaagggcatcctgagccgcagccggcccagcttcaccatcagtgaccccaagctggtggccaagtggaaggacatgaagaccaacatgcccatcatcaccagcaagcgctaccagcacagcgtggagtgggccgctgagctgatgaggcggcagggccaggatgagagcacagtgcggcgcatcctgaaggactacaccaagcccctggagcacccccctgtgaagagaaatgaggaggcccaggtgcatgacaagctgaacagcggcatggtgagcaacatggagggcacagctggaggagagcggcccagcgtggtgaatggagacagcggcaagagcggcggcgtgggggacccccgggagcccctgggctgcctgcaggagggcagcggctgccaccccaccacagagagctttgagaagtctgtgcgggaggatgccagccccctgccccacgtgtgctgctgcaagcaggatgccctgatcctgcagaggggcctgcaccatgaagatggcagccagcacatcggcctgctgcaccctggggaccggggccctgaccatgaatatgtgctggtggaggaggccgagtgtgccatgtctgagcgggaggccgccccaaatgaggaggccttcttcctggtgtatgccctgggctgcctgagcatctactatgagaaggagcccctgaccatcgtgaagctgtggaaggccttcaccgtggtgcagcccaccttccgcaccacctacatggcctaccactacttccgcagcaagggctgggtgcccaaggtgggcctgaagtatggaacagacctgctgctgtacagaaaaggaccacccttctaccacgccagctacagcgtcatcatcgagctggtggatgaccactttgagggcagcctgcggcggcccctgtcctggaagagcctggccgccctgagccgggtgtctgtgaatgtgtccaaggtgacccagcaccagctgtgccactggagcgtgacctag

SEQ ID NO: 174473 - DNA, 1137 bp, synthetic construct
  misc_feature 1..1137: note = Description of Artificial Sequence: Synthetic coding sequence
  source 1..1137: mol_type = other DNA
atggccgaggccgtgttccacgcccccaagaggaagagaagagtgtatgagacctatgagagccccctgcccatccccttcggccaggaccacggccccctgaaggagttcaagatcttccgggcagagatgatcaacaacaacgtcatcgtgagaaatgcagaagatattgagcagctgtatggcaagggctactttgggaagggcatcctgagccgcagccggcccagcttcaccatcagtgaccccaagctggtggccaagtggaaggacatgaagaccaacatgcccatcatcaccagcaagcgctaccagcacagcgtggagtgggccgctgagctgatgaggcggcagggccaggatgagagcacagtgcggcgcatcctgaaggactacaccaagcccctggagcacccccctgtgaagagaaatgaggaggcccaggtgcatgacaagctgaacagcggcatggtgagcaacatggagggcacagctggaggagagcggcccagcgtggtgaatggagacagcggcaagagcggcggcgtgggggacccccgggagcccctgggctgcctgcaggagggcagcggctgccaccccaccacagagagctttgagaagtctgtgcgggaggatgccagccccctgccccacgtgtgctgctgcaagcaggatgccctgatcctgcagaggggcctgcaccatgaagatggcagccagcacatcggcctgctgcaccctggggaccggggccctgaccatgaatatgtgctggtggaggaggccgagtgtgccatgtctgagcgggaggccgccccaaatgaggagctggtgcagaggaacagactcatctgcagaagaaacccctaccgcatctttgagtacctgcagctgagcctggaggaggccttcttcctggtgtatgccctgggctgcctgagcatctactatgagaaggagcccctgaccatcgtgaagctgtggaaggccttcaccgtggtgcagcccaccttccgcaccacctacatggcctaccactacttccgcagcaagggctgggtgcccaaggtgggcctgaagtatggaacagacctgctgctgtacagaaaaggaccacccttctaccacgcctag

SEQ ID NO: 174474 - DNA, 1317 bp, synthetic construct
  misc_feature 1..1317: note = Description of Artificial Sequence: Synthetic coding sequence
  source 1..1317: mol_type = other DNA
atggccgaggccgtgttccacgcccccaagaggaagagaagagtgtatgagacctatgagagccccctgcccatccccttcggccaggaccacggccccctgaaggagttcaagatcttccgggcagagatgatcaacaacaacgtcatcgtgagaaatgcagaagatattgagcagctgtatggcaaggacatgaagaccaacatgcccatcatcaccagcaagcgctaccagcacagcgtggagtgggccgctgagctgatgaggcggcagggccaggatgagagcacagtgcggcgcatcctgaaggactacaccaagcccctggagcacccccctgtgaagagaaatgaggaggcccaggtgcatgacaagctgaacagcggcatggtgagcaacatggagggcacagctggaggagagcggcccagcgtggtgaatggagacagcggcaagtctggaggagtgggggacccccgggagcccctgggctgcctgcaggagggcagcggctgccaccccaccacagagagctttgagaagtctgtgagagaagatgccagccccctgccccacgtgtgctgctgcaagcaggatgccctgatcctgcagaggggcctgcaccatgaagatggcagccagcacatcggcctgctgcaccctggggaccggggccctgaccacgagtatgtgctggtggaggaggctgaatgtgccatgtctgagcgggaggccgccccaaatgaggagctggtgcagaggaacagactcatctgcagaagaaacccctaccgcatctttgagtacctgcagctgagcctggaggaggccttcttcctggtgtatgccctgggctgcctgagcatctactatgagaaggagcccctgaccatcgtgaagctgtggaaggccttcaccgtggtgcagcccaccttccgcaccacctacatggcctaccactacttccgcagcaagggctgggtgcccaaggtgggcctgaagtatggaacagacctgctgctgtacaggaagggcccccccttctaccacgccagctacagcgtcatcatcgagctggtggatgaccactttgagggcagcctgcggcggcccctgtcctggaagagcctggccgccctgagccgggtgtctgtgaatgtgtccaaggagctgatgctgtgctacctgatcaagcccagcaccatgacagacaaggagatggagagccctgagtgcatgaagaggatcaaggtgcaggaggtgatcctgagccgctgggtgagcagccgggagaggagtgaccaggatgacctgtag

SEQ ID NO: 174475 - DNA, 1221 bp, synthetic construct
  misc_feature 1..1221: note = Description of Artificial Sequence: Synthetic coding sequence
  source 1..1221: mol_type = other DNA
atggccgaggccgtgttccacgcccccaagaggaagagaagagtgtatgagacctatgagagccccctgcccatccccttcggccaggaccacggccccctgaaggagttcaagatcttccgggcagagatgatcaacaacaacgtcatcgtgagaaatgcagaagatattgagcagctgtatggcaagggctactttgggaagggcatcctgagccgcagccggcccagcttcaccatcagtgaccccaagctggtggccaagtggaaggacatgaagaccaacatgcccatcatcaccagcaagcgctaccagcacagcgtggagtgggccgctgagctgatgaggcggcagggccaggatgagagcacagtgcggcgcatcctgaaggactacaccaagcccctggagcacccccctgtgaagagaaatgaggaggcccaggtgcatgacaagctgaacagcggcatggtgagcaacatggagggcacagctggaggagagcggcccagcgtgcggggcctgcaccatgaagatggcagccagcacatcggcctgctgcaccctggggaccggggccctgaccacgagtatgtgctggtggaggaggctgaatgtgccatgtctgagcgggaggccgccccaaatgaggagctggtgcagaggaacagactcatctgcagaagaaacccctaccgcatctttgagtacctgcagctgagcctggaggaggccttcttcctggtgtatgccctgggctgcctgagcatctactatgagaaggagcccctgaccatcgtgaagctgtggaaggccttcaccgtggtgcagcccaccttccgcaccacctacatggcctaccactacttccgcagcaagggctgggtgcccaaggtgggcctgaagtatggaacagacctgctgctgtacaggaagggcccccccttctaccacgccagctacagcgtcatcatcgagctggtggatgaccactttgagggcagcctgcggcggcccctgtcctggaagagcctggccgccctgagccgggtgtctgtgaatgtgtccaaggagctgatgctgtgctacctgatcaagcccagcaccatgacagacaaggagatggagagccctgagtgcatgaagaggatcaaggtgcaggaggtgatcctgagccgctgggtgagcagccgggagaggagtgaccaggatgacctgtag

SEQ ID NO: 174476 - DNA, 933 bp, synthetic construct
  misc_feature 1..933: note = Description of Artificial Sequence: Synthetic coding sequence
  source 1..933: mol_type = other DNA
atgctggtggtggaggtggccaacggccgcagcctggtgtggggcgctgaggccgtgcaggccctgcgggagcggctgggcgtgggcggccgcacagtgggcgccctgccccggggcccccggcagaacagccggctgggcctgcccctgctgctgatgcctgaggaggcccggctgctggccgagattggagctgtgaccctggtgtctgcccccaggccagacagccgccaccacagcctggccctgaccagcttcaagaggcagcaggaggagagcttccaggagcagagcgccctggccgctgaggcccgggagacccggcggcaggagctgctggagaagatcacagagggccaggccgccaagaagcagaagctggagcaggccagcggggccagcagcagccaggaggccggcagcagccaggccgccaaggaggatgagaccagtgatggccaggccagcggggagcaggaggaggccggccccagcagcagccaggccggccccagcaatggagtggcccccctgcccaggtctgccctgctggtgcagctggccacagcccggcccaggcctgtgaaggcccggcccctggactggagggtgcagagcaaggactggccccacgccggccgcccagcccacgagctgcgctacagcatctacagagacctgtgggagcggggcttcttcctgtctgctgctgggaagtttggaggagacttcctggtgtacccaggggaccccctgcgcttccacgcccactacatcgcccagtgctgggcccctgaggacaccatccccctgcaggacctggtggccgccggccgcctgggcacctctgtgaggaagaccctgctgctgtgcagcccccagccagatggcaaggtggtgtacaccagcctgcagtgggccagcctgcagtag

SEQ ID NO: 174477 - DNA, 933 bp, synthetic construct; identical to SEQ ID NO: 174476
  misc_feature 1..933: note = Description of Artificial Sequence: Synthetic coding sequence
  source 1..933: mol_type = other DNA

SEQ ID NO: 174478 - DNA, 933 bp, synthetic construct; identical to SEQ ID NO: 174476
  misc_feature 1..933: note = Description of Artificial Sequence: Synthetic coding sequence
  source 1..933: mol_type = other DNA

SEQ ID NO: 174479 - DNA, 939 bp, synthetic construct
  misc_feature 1..939: note = Description of Artificial Sequence: Synthetic coding sequence
  source 1..939: mol_type = other DNA
atgctggtggtggaggtggccaacggccgcagcctggtgtggggcgctgaggccgtgcaggccctgcgggagcggctgggcgtgggcggccgcacagtgggcgccctgccccggggcccccggcagaacagccggctgggcctgcccctgctgctgatgcctgaggaggcccggctgctggccgagattggagctgtgaccctggtgtctgcccccaggccagacagccgccaccacagcctggccctgaccagcttcaagaggcagcaggaggagagcttccaggagcagagcgccctggccgctgaggcccgggagacccggcggcaggagctgctggagaagatcacagagggccaggccgccaagaagcagaagctggagcaggccagcggggccagcagcagccaggaggccggcagcagccaggccgccaaggaggatgagaccagtgatggccaggccagcggggagcaggaggaggccggccccagcagcagccaggccggccccagcaatggagtggcccccctgcccaggtctgccctgctggtgcagctggccacagcccggcccaggcctgtgaaggcccggcccctggactggagggtgcagagcaaggactggccccacgccggccgcccagcccacgagctgcgctacagcatctacagagacctgtgggagcggggcttcttcctgtctgctgctgggaagtttggaggagacttcctggtgtacccaggggaccccctgcgcttccacgcccactacatcgcccagtgctgggcccctgaggacaccatccccctgcaggacctggtggccgccggccgcctgggcacctctgtgaggaagaccctgctgctgtgcagcccccagccagatggcttcaagagccaggaggtgtccatcaacctggtgtacaagtgcagctag

SEQ ID NO: 174480 - DNA, 729 bp, synthetic construct
  misc_feature 1..729: note = Description of Artificial Sequence: Synthetic coding sequence
  source 1..729: mol_type = other DNA
atgctggtggtggaggtggccaacggccgcagcctggtgtggggcgctgaggccgtgcaggccctgcgggagcggctgggcgtgggcggccgcacagtgggcgccctgccccggggcccccggcagaacagccggctgggcctgcccctgctgctgatgcctgaggaggcccggctgctggccgagattggagctgtgaccctggtgtctgcccccaggccagacagccgccaccacagcctggccctgaccagcttcaagaggcagcaggaggagagcttccaggagcagagcgccctggccgctgaggcccgggagacccggcggcaggagctgctggagaagatcacagagggccaggccgccaagaagcagaagctggagcaggccagcggggccagcagcagccaggaggccggcagcagccaggccgccaaggaggatgagaccagtgatggccaggccagcggggagcaggaggaggccggccccagcagcagccaggccggccccagcaatggagtggcccccctgcccaggtctgccctgctggtgcagctggccacagcccggcccaggcctgtgaaggcccggcccctggactggagggtgcagagcaaggactggccccacgccggccgcccagcccacgagctgcgctacagcatctacagagacctgtgggagcggggcttcttcctgtctgctgctgggaagtttggaggatag

SEQ ID NO: 174481 - DNA, 1581 bp, synthetic construct
  misc_feature 1..1581: note = Description of Artificial Sequence: Synthetic coding sequence
  source 1..1581: mol_type = other DNA
atggagcctgagcctgagcctgctgctgtggaggtgcctgctggccgggtgctgagcgcccgggagctgtttgctgcccggagccgcagccagaagctgccccagaggagccacggccccaaggacttcctgcctgatggcagcgctgcccaggccgagcggctgcggcgctgccgggaggagctgtggcagctgctggccgagcagagggtggagcggctgggcagcctggtggccgctgagtggaggcctgaggagggctttgtggagctgaagagccctgctgggaagttctggcagaccatgggcttcagcgagcagggccggcagaggctgcaccctgaggaggccctgtacctgctggagtgtggcagcatccacctgttccaccaggacctgcccctgagcatccaggaggcctaccagctgctgctgacagaccacacagtgaccttcctgcagtaccaggtgttcagccacctgaagaggctgggctacgtggtgcggcgcttccagcccagctctgtgctgagcccctatgaaaggcagctgaacctggatgcctctgtgcagcacctggaggatggagatggcaagaggaagaggagcagcagcagccccaggagcatcaacaagaaggccaaggccctggacaacagcctgcagcccaagagcctggccgccagcagccccccaccctgcagccagcccagccagtgcccagaggagaagccccaggagagcagccccatgaagggccctgggggccccttccagctgctgggcagcctgggccccagccctggccctgcccgggagggcgtgggctgctcctgggagagcggccgggcagaaaatggagtgactggagctgggaagaggcgctggaactttgagcagatctccttccccaacatggccagtgacagccgccacaccctgctgcgggccccagcccctgagctgctgcctgccaacgtggccggccgggagacagatgctgagagctggtgccagaagctgaaccagaggaaggagaagctgagccggcgggagcgggagcaccacgccgaggccgcccagttccaggaggatgtgaatgctgaccctgaggtgcagcgctgcagctcctggagggagtacaaggagctgctgcagaggcggcaggtgcagaggagccagaggcgggccccccacctgtggggccagcctgtgacccccctgctgagccctggccaggccagcagccctgctgtggtgctgcagcacatctctgtgctgcagaccacccacctgcctgatggaggagcccggctgctggagaagagcggcggcctggagatcatctttgatgtgtaccaggctgatgctgtggccaccttcaggaagaacaaccctgggaagccctatgccaggatgtgcatcagcggctttgatgagcctgtgcctgacctgtgcagcctgaagaggctgagctaccagagcggagatgtgcccctcatctttgccctggtggaccatggagacatctccttctacagcttccgggacttcaccctgccccaggatgtgggccactag

SEQ ID NO: 174482 - DNA, 594 bp, synthetic construct
  misc_feature 1..594: note = Description of Artificial Sequence: Synthetic coding sequence
  source 1..594: mol_type = other DNA
atgggcttcagcgagcagggccggcagaggctgcaccctgaggaggccctgtacctgctggagtgtggcagcatccacctgttccaccaggacctgcccctgagcatccaggaggcctaccagctgctgctgacagaccacacagtgaccttcctgcagtaccaggtgttcagccacctgaagaggctgggctacgtggtgcggcgcttccagcccagctctgtgctgagcccctatgagcggcagctgaacctggatgcctctgtgcagcacctggaggatggagatggcaagaggaagaggagcagcagcagccccaggagcatcaacaagaaggccaaggccctggacaacagcctgcagcccaagagcctggccgccagcagcccccccagcggcaccagccgctgccccaggatgtggggcacagacctgacagccctgcagaggatggagctggcccctggggaccgggactgcctcttcagcggcaccatctctgctgccagctgcacccagaccctgacctgcagcttccggggccagagcggcccctggccctgggtgtctgacacccaccgggtgaagctgtag

SEQ ID NO: 174483 - DNA, 534 bp, synthetic construct
  misc_feature 1..534: note = Description of Artificial Sequence: Synthetic coding sequence
  source 1..534: mol_type = other DNA
atggagcctgagcctgagcctgctgctgtggaggtgcctgctggccgggtgctgagcgcccgggagctgtttgctgcccggagccgcagccagaagctgccccagaggagccacggccccaaggacttcctgcctgatggcagcgctgcccaggccgagcggctgcggcgctgccgggaggagctgtggcagctgctggccgagcagagggtggagcggctgggcagcctggtggccgctgagtggaggcctgaggagggctttgtggagctgaagagccctgctgggaagttctggcagaccatgggcttcagcgagcagggccggcagaggctgcaccctgaggaggccctgtacctgctggagtgtggcagcatccacctgttccaccaggacctgcccctgagcatccaggaggcctaccagctgctgctgacagaccacacagtgaccttcctgcagtaccagcccccagaggaggtgggcctgtgtggcagcaccatccccaccaagctgtgccctgtgcctgtgtag

SEQ ID NO: 174484 - DNA, 4296 bp, synthetic construct
  misc_feature 1..4296: note = Description of Artificial Sequence: Synthetic coding sequence
  source 1..4296: mol_type = other DNA
atggacagaagaaatgactatggctacagagtgcccctcttccagggccccctgcccccacctggcagcctgggcctgcccttccccccagacatccagacagagaccacagaagaagattctgtgctgctgatgcacaccctgctggccgccaccaaggacagcctggccatggacccccctgtggtgaaccggcccaagaagagcaagaccaagaaggcccccatcaagaccatcaccaaggccgccccagctgcccctcctgtgcctgctgccaatgaaattgccaccaacaagcccaagatcacctggcaggccctgaacctgcccgtcatcacccagatcagccaggccctgcccaccacagaggtgaccaacacccaggccagctctgtgacagcccagcccaagaaggccaacaagatgaagagggtgacagccaaggccgcccagggcagccagagccccactggacatgaaggaggcaccatccagctgaagagccccctgcaggtgctgaagctgcccgtcatcagccagaacatccacgcccccatcgccaatgaaagtgccagcagccaggccctgatcaccagcatcaagcccaagaaggccagcaaggccaagaaggccgccaacaaggccatcgccagcgccacagaggtgtccctggccgccacagccacccacacagccaccacccagggccagatcaccaatgaaacagccagcatccacaccacagctgccagcatccgcaccaagaaggccagcaaggccaggaagaccatcgccaaggtgatcaacacagacacagagcacatcgaggccctgaatgtgacagatgctgccacccggcagatcgaggcctctgtggtggccatccggcccaagaagagcaagggcaagaaggccgccagccggggccccaacagcgtgtctgagatcagcgaggcccccctggccacccagatcgtgaccaaccaggccctggccgccaccctgcgggtgaagaggggcagccgggccaggaaggccgccaccaaggcccgggccacagagagccagaccccaaatgctgaccagggcgcccaggccaagatcgccagcgcccagaccaacgtgtctgccctggagacccaggtggccgctgctgtgcaggccctggctgatgactacctggcccagctgagcctggagcccaccaccaggacccggggcaagaggaacaggaagagcaagcacctgaatggagatgagaggagcggcagcaactaccgccgcatcccctggggcagaagacctgcccccccaagagatgtggccatcctgcaggagcgggccaacaagctggtgaagtacctgctggtgaaggaccagaccaagatccccatcaagagaagtgacatgctgagagatgtgatccaggagtatgatgagtacttccctgagatcatcgagcgggccagctacaccctggagaagatgttccgggtgaacctgaaggagattgacaagcagagcagcctgtacatcctgatcagcacccaggagagcagcgctggcatcctgggcaccaccaaggacacccccaagctgggcctgctgatggtgatcctgagcgtcatcttcatgaatggaaacaaggccagcgaggccgtcatctgggaggtgctgaggaagctgggcctgcggcctggggtgcgccacagcctgtttggagaggtgaggaagctgatcacagatgaatttgtgaagcagaagtacctggagtacaagagggtgcccaacagccggcccccagaatatgagttcttctggggcctgcggagctaccacgagaccagcaagatgaaggtgctgaagtttgcctgccgggtgcagaagaaggaccccaaggactgggccgtgcagtaccgggaggccgtggagatggaggtgcaggccgctgctgtggccgtggccgaggccgaggcccgggcagaggcccgggcccagatgggcattggagaggaggccgtggccggcccctggaactgggatgacatggacatcgactgcctgacccgggaggagctgggagatgatgcccaggcctggagccgcttctcctttgaaattgaggcccgggcccaggagaatgctgatgccagcaccaacgtgaacttcagcagaggagccagcaccagggctggcttcagtgatggagccagcatctccttcaacggggcccccagcagcagcggcggcttcagcggcggccctggcatcacctttggagtggcccccagcaccagcgccagcttcagcaacacagccagcatcagctttggaggcaccctgagcaccagcagcagcttcagcagcgctgccagcatcagctttggctgtgcccacagcaccagcaccagcttcagcagcgaggccagcatcagctttggaggcatgccctgcaccagcgccagcttcagcggcggcgtgagcagcagcttcagcggccccctgagcaccagcgccaccttcagcggcggggccagcagcggctttggaggcaccctgagcaccacagctggcttcagcggcgtgctgagcaccagcaccagctttggaagtgcccccaccaccagcacagtgttcagcagcgccctgagcaccagcactggatttggaggcatcctgagcacctctgtgtgctttggaggcagccccagcagcagcggcagctttggaggcaccctgagcaccagcatctgctttggaggcagcccctgcaccagcactggatttggaggcaccctgagcacctctgtgtcctttggaggcagcagcagcaccagcgccaactttggaggcaccctgagcaccagcatctgctttgatggcagccccagcactggagctggctttggaggagccctgaacaccagcgccagctttggatctgtgctgaacaccagcactggatttggaggagccatgagcaccagcgctgactttggaggcaccctgagcacctctgtgtgctttggaggcagccctggcacctctgtgtcctttggaagtgccctgaacaccaatgccggctatggaggagctgtgtccaccaacacagactttggaggcaccctgagcacctctgtgtgctttggaggcagccccagcaccagcgctggctttggaggagccctgaacaccaatgccagctttggctgtgctgtgtccaccagcgccagcttcagcggggctgtgtccaccagcgcctgcttcagcggggcccccatcaccaaccctggctttggaggagccttcagcaccagcgctggctttggaggagccctgagcacagctgctgactttggaggcacccccagcaacagcattggatttggagctgcccccagcacctctgtgtcctttggaggagcccacggcaccagcctgtgctttggaggagcccccagcaccagcctgtgctttggaagtgccagcaacaccaacctgtgctttggaggcccccccagcaccagcgcctgcttcagcggggccaccagccccagcttctgtgatggccccagcaccagcacaggcttctcctttggaaatggcctgagcaccaatgccggctttggaggcggcctgaacaccagcgctggctttggaggcggcctgggcaccagcgctggcttcagcggcggcctgagcaccagcagcggctttgatggcggcctgggcaccagcgctggctttggaggcggccctggcaccagcactggatttggaggcggcctgggcaccagcgctggcttcagcggcggcctgggcaccagcgctggctttggaggcggcctggtgaccagtgatggctttggaggcggcctgggcaccaatgccagctttggcagcaccctgggcaccagcgctggcttcagcggcggcctgagcaccagtgatggcttcggcagccggcccaatgccagctttgaccggggcctgagcaccatcattggatttggaagtggcagcaacaccagcacaggcttcaccggggagcccagcaccagcacaggcttcagcagcggccccagcagcatcgtgggcttcagcggcggccccagcactggagtgggcttctgcagcggccccagcaccagcggcttcagcggcggccccagcactggagctggctttggaggcggccccaacacaggagctggctttggaggcggccccagcaccagcgctggcttcggcagcggggccgccagcctgggcgcctgtggcttctcctatggatag

SEQ ID NO: 174485 - DNA, 2121 bp, synthetic construct
  misc_feature 1..2121: note = Description of Artificial Sequence: Synthetic coding sequence
  source 1..2121: mol_type = other DNA
atggacagaagaaatgactatggctacagagtgcccctcttccagggccccctgcccccacctggcagcctgggcctgcccttccccccagacatccagacagagaccacagaagaagattctgtgctgctgatgcacaccctgctggccgccaccaaggacagcctggccatggacccccctgtggtgaaccggcccaagaagagcaagaccaagaaggcccccatcaagaccatcaccaaggccgccccagctgcccctcctgtgcctgctgccaatgaaattgccaccaacaagcccaagatcacctggcaggccctgaacctgcccgtcatcacccagatcagccaggccctgcccaccacagaggtgaccaacacccaggccagctctgtgacagcccagcccaagaaggccaacaagatgaagagggtgacagccaaggccgcccagggcagccagagccccactggacatgaaggaggcaccatccagctgaagagccccctgcaggtgctgaagctgcccgtcatcagccagaacatccacgcccccatcgccaatgaaagtgccagcagccaggccctgatcaccagcatcaagcccaagaaggccagcaaggccaagaaggccgccaacaaggccatcgccagcgccacagaggtgtccctggccgccacagccacccacacagccaccacccagggccagatcaccaatgaaacagccagcatccacaccacagctgccagcatccgcaccaagaaggccagcaaggccaggaagaccatcgccaaggtgatcaacacagacacagagcacatcgaggccctgaatgtgacagatgctgccacccggcagatcgaggcctctgtggtggccatccggcccaagaagagcaagggcaagaaggccgccagccggggccccaacagcgtgtctgagatcagcgaggcccccctggccacccagatcgtgaccaaccaggccctggccgccaccctgcgggtgaagaggggcagccgggccaggaaggccgccaccaaggcccgggccacagagagccagaccccaaatgctgaccagggcgcccaggccaagatcgccagcgcccagaccaacgtgtctgccctggagacccaggtggccgctgctgtgcaggccctggctgatgactacctggcccagctgagcctggagcccaccaccaggacccggggcaagaggaacaggaagagcaagcacctgaatggagatgagaggagcggcagcaactaccgccgcatcccctggggcagaagacctgcccccccaagagatgtggccatcctgcaggagcgggccaacaagctggtgaagtacctgctggtgaaggaccagaccaagatccccatcaagagaagtgacatgctgagagatgtgatccaggagtatgatgagtacttccctgagatcatcgagcgggccagctacaccctggagaagatgttccgggtgaacctgaaggagattgacaagcagagcagcctgtacatcctgatcagcacccaggagagcagcgctggcatcctgggcaccaccaaggacacccccaagctgggcctgctgatggtgatcctgagcgtcatcttcatgaatggaaacaaggccagcgaggccgtcatctgggaggtgctgaggaagctgggcctgcggcctggggtgcgccacagcctgtttggagaggtgaggaagctgatcacagatgaatttgtgaagcagaagtacctggagtacaagagggtgcccaacagccggcccccagaatatgagttcttctggggcctgcggagctaccacgagaccagcaagatgaaggtgctgaagtttgcctgccgggtgcagaagaaggaccccaaggactgggccgtgcagtaccgggaggccgtggagatggaggtgcaggccgctgctgtggccgtggccgaggccgaggcccgggcagagatctacagcccctgcctgcagatccccctcatcaactgcagcagccccagccacggggccaaggtgcacccctggaacctgtgcccccacagcagccagggcagctatggccagagcgctgagggcgtgatgtag

SEQ ID NO: 174486 - DNA, 1074 bp, synthetic construct
  misc_feature 1..1074: note = Description of Artificial Sequence: Synthetic coding sequence
  source 1..1074: mol_type = other DNA
atggacagaagaaatgactatggctacagagtgcccctcttccagagcaagcacctgaatggagatgagaggagcggcagcaactaccgccgcatcccctggggccggcggcctgcccccccaagagatgtggccatcctgcaggagcgggccaacaagctggtgaagtacctgctggtgaaggaccagaccaagatccccatcaagagaagtgacatgctgagagatgtgatccaggagtatgatgagtacttccctgagatcatcgagcgggccagctacaccctggagaagatgttccgggtgaacctgaaggagattgacaagcagagcagcctgtacatcctgatcagcacccaggagagcagcgctggcatcctgggcaccaccaaggacacccccaagctgggcctgctgatggtgatcctgagcgtcatcttcatgaatggaaacaaggccagcgaggccgtcatctgggaggtgctgaggaagctgggcctgcggcctggggtgcgccacagcctgtttggagaggtgaggaagctgatcacagatgaatttgtgaagcagaagtacctggagtacaagagggtgcccaacagccggcccccagaatatgagttcttctggggcctgcggagctaccacgagaccagcaagatgaaggtgctgaagtttgcctgccgggtgcagaagaaggaccccaaggactgggccgtgcagtaccgggaggccgtggagatggaggtgcagctgcagctgtggctgtggctgcggctgaagccaggcctgagcggcagcaacaccagcacaggcttcaccggggagcccagcaccagcacaggcttcagcagcggccccagcagcatcgtgggcttcagcggcggccccagcactggagtgggcttctgcagcggccccagcaccagcggcttcagcggcggccccagcactggagctggctttggaggcggccccaacacaggagctggctttggaggcggccccagcaccagcgctggcttcggcagcggggccgccagcctgggcgcctgtggcttctcctatggatag

SEQ ID NO: 174487 - DNA, 2121 bp, synthetic construct; identical to SEQ ID NO: 174485
  misc_feature 1..2121: note = Description of Artificial Sequence: Synthetic coding sequence
  source 1..2121: mol_type = other DNA

SEQ ID NO: 174488 - DNA, 3105 bp, synthetic construct
  misc_feature 1..3105: note = Description of Artificial Sequence: Synthetic coding sequence
  source 1..3105: mol_type = other DNA
atggacagaagaaatgactatggctacagagtgcccctcttccagagcaagcacctgaatggagatgagaggagcggcagcaactaccgccgcatcccctggggccggcggcctgcccccccaagagatgtggccatcctgcaggagcgggccaacaagctggtgaagtacctgctggtgaaggaccagaccaagatccccatcaagagaagtgacatgctgagagatgtgatccaggagtatgatgagtacttccctgagatcatcgagcgggccagctacaccctggagaagatgttccgggtgaacctgaaggagattgacaagcagagcagcctgtacatcctgatcagcacccaggagagcagcgctggcatcctgggcaccaccaaggacacccccaagctgggcctgctgatggtgatcctgagcgtcatcttcatgaatggaaacaaggccagcgaggccgtcatctgggaggtgctgaggaagctgggcctgcggcctggggtgcgccacagcctgtttggagaggtgaggaagctgatcacagatgaatttgtgaagcagaagtacctggagtacaagagggtgcccaacagccggcccccagaatatgagttcttctggggcctgcggagctaccacgagaccagcaagatgaaggtgctgaagtttgcctgccgggtgcagaagaaggaccccaaggactgggccgtgcagtaccgggaggccgtggagatggaggtgcaggccgctgctgtggccgtggccgaggccgaggcccgggcagaggcccgggcccagatgggcatcggggaggaggccgtggccggcccctggaactgggatgacatggacatcgactgcctgacccgggaggagctgggagatgatgcccaggcctggagccgcttctcctttgaaattgaggcccgggcccaggagaatgctgatgccagcaccaacgtgaacttcagcagaggagccagcacccgggccggcttcagtgatggagccagcatctccttcaatggagcccccagcagcagcggcggcttcagcggcggccctggcatcaccttcggcgtggcccccagcaccagcgccagcttcagcaacacagccagcatcagctttggaggcaccctgagcaccagcagcagcttcagcagcgctgccagcatcagctttggctgtgcccacagcaccagcaccagcttcagcagcgaggccagcatcagctttggaggcatgccctgcaccagcgccagcttctctggaggagtgagcagcagcttcagcggccccctgagcaccagcgccaccttctctggaggagccagcagcggctttggaggcaccctgagcaccacagctggcttctctggagtgctgagcaccagcaccagctttggcagcgcccccaccaccagcaccgtcttcagcagcgccctgagcaccagcacaggctttggaggcatcctgagcacctctgtgtgcttcggcggcagccccagcagcagcggcagctttggaggcaccctgagcaccagcatctgcttcggcggcagcccctgcaccagcacaggctttggaggcaccctgagcacctctgtgtcctttggaggcagcagcagcaccagcgccaactttggaggcaccctgagcaccagcatctgctttgatggcagccccagcactggagctggctttggaggagccctgaacaccagcgccagctttggatctgtgctgaacaccagcacaggctttggaggagccatgagcaccagcgctgactttggaggcaccctgagcacctctgtgtgcttcggcggcagccctggcacctctgtgtcctttggcagcgccctgaacaccaatgccggctacggcggcgctgtgtccaccaacacagactttggaggcaccctgagcacctctgtgtgcttcggcggcagccccagcaccagcgctggctttggaggagccctgaacaccaatgccagctttggctgtgctgtgtccaccagcgccagcttctctggagctgtgtccaccagcgcctgcttcagcggggcccccatcaccaaccctggctttggaggagccttcagcaccagcgctggctttggaggagccctgagcacagctgctgactttggaggcacccccagcaacagcatcggctttggagctgcccccagcacctctgtgtcctttggaggagcccacggcaccagcctgtgcttcggcggggcccccagcaccagcctgtgcttcggcagcgccagcaacaccaacctgtgcttcggcggcccccccagcaccagcgcctgcttcagcggggccaccagccccagcttctgtgatggccccagcaccagcacaggcttctcctttggaaatggcctgagcaccaatgccggctttggaggcggcctgaacaccagcgctggctttggaggcggcctgggcaccagcgctggcttcagcggcggcctgagcaccagcagcggctttgatggcggcctgggcaccagcgctggctttggaggcggccctggcaccagcacaggctttggaggcggcctgggcaccagcgctggcttcagcggcggcctgggcaccagcgctggctttggaggcggcctggtgaccagtgatggctttggaggcggcctgggcaccaatgccagctttggcagcaccctgggcaccagcgctggcttcagcggcggcctgagcaccagtgatggcttcggcagccggcccaatgccagctttgaccggggcctgagcaccatcatcggcttcggcagcggcagcaacaccagcacaggcttcaccggggagcccagcaccagcacaggcttcagcagcggccccagcagcatcgtgggcttcagcggcggccccagcactggagtgggcttctgcagcggccccagcaccagcggcttcagcggcggccccagcactggagctggctttggaggcggccccaacacaggagctggctttggaggcggccccagcaccagcgctggctttggaagtggagctgccagcctgggcgcctgtggcttctcctatggatag

SEQ ID NO: 174489 - DNA, 693 bp, synthetic construct
  misc_feature 1..693: note = Description of Artificial Sequence: Synthetic coding sequence
  source 1..693: mol_type = other DNA
atgcacaccctgctggccgccaccaaggacagcctggccatggacccccctgtggtgaaccggcccaagaagagcaagaccaagaaggcccccatcaagaccatcaccaaggccgccccagctgcccctcctgtgcctgctgccaatgaaattgccaccaacaagcccaagatcacctggcaggccctgaacctgcccgtcatcacccagatcagccaggccctgcccaccacagaggtgaccaacacccaggccagctctgtgacagcccagcccaagaaggccaacaagatgaagagggtgacagccaaggccgcccagggcagccagagccccactggacatgaaggaggcaccatccagctgaagagccccctgcaggtgctgaagctgcccgtcatcagccagaacatccacgcccccatcgccaatgaaagtgccagcagccaggccctgatcaccagcatcaagcccaagaaggccagcaaggccaagaaggccgccaacaaggccatcgccagcgccacagaggtgtccctggccgccacagccacccacacagccaccacccagggccagatcaccaatgaaacagccagcatccacaccacagctgccagcatccgcaccaagaaggccagcaaggccaggaagaccatcgccaaggtgatcaacacagacacagagcactag

SEQ ID NO: 174490 - DNA, 510 bp, synthetic construct
  misc_feature 1..510: note = Description of Artificial Sequence: Synthetic coding sequence
  source 1..510: mol_type = other DNA
atggacagaagaaatgactatggctacagagtgcccctcttccagggccccctgcccccacctggcagcctgggcctgcccttccccccagacatccagacagagaccacagaagaagattctgtgctgctgatgcacaccctgctggccgccaccaaggacagcctggccatggacccccctgtggtgaaccggcccaagaagagcaagaccaagaaggcccccatcaagaccatcaccaaggccgccccagctgcccctcctgtgcctgctgccaatgaaattgccaccaacaagcccaagatcacctggcaggccctgaacctgcccgtcatcacccagatcagccaggccctgcccaccacagaggtgaccaacacccaggccagctctgtgacagcccagcccaagaaggccaacaagatgaagagggtgacagccaaggccgcccagggcagccagagccccactggacatgaaggaggcaccatccagctgaagagcccctag

SEQ ID NO: 174491 - DNA, 2889 bp, synthetic construct
  misc_feature 1..2889: note = Description of Artificial Sequence: Synthetic coding sequence
  source 1..2889: mol_type = other DNA
atgctgagagatgtgatccaggagtatgatgagtacttccctgagatcatcgagcgggccagctacaccctggagaagatgttccgggtgaacctgaaggagattgacaagcagagcagcctgtacatcctgatcagcacccaggagagcagcgctggcatcctgggcaccaccaaggacacccccaagctgggcctgctgatggtgatcctgagcgtcatcttcatgaatggaaacaaggccagcgaggccgtcatctgggaggtgctgaggaagctgggcctgcggcctggggtgcgccacagcctgtttggagaggtgaggaagctgatcacagatgaatttgtgaagcagaagtacctggagtacaagagggtgcccaacagccggcccccagaatatgagttcttctggggcctgcggagctaccacgagaccagcaagatgaaggtgctgaagtttgcctgccgggtgcagaagaaggaccccaaggactgggccgtgcagtaccgggaggccgtggagatggaggtgcaggccgctgctgtggccgtggccgaggccgaggcccgggcagaggcccgggcccagatgggcatcggggaggaggccgtggccggcccctggaactgggatgacatggacatcgactgcctgacccgggaggagctgggagatgatgcccaggcctggagccgcttctcctttgaaattgaggcccgggcccaggagaatgctgatgccagcaccaacgtgaacttcagcagaggagccagcacccgggccggcttcagtgatggagccagcatctccttcaatggagcccccagcagcagcggcggcttcagcggcggccctggcatcaccttcggcgtggcccccagcaccagcgccagcttcagcaacacagccagcatcagctttggaggcaccctgagcaccagcagcagcttcagcagcgctgccagcatcagctttggctgtgcccacagcaccagcaccagcttcagcagcgaggccagcatcagctttggaggcatgccctgcaccagcgccagcttctctggaggagtgagcagcagcttcagcggccccctgagcaccagcgccaccttctctggaggagccagcagcggctttggaggcaccctgagcaccacagctggcttctctggagtgctgagcaccagcaccagctttggcagcgcccccaccaccagcaccgtcttcagcagcgccctgagcaccagcacaggctttggaggcatcctgagcacctctgtgtgcttcggcggcagccccagcagcagcggcagctttggaggcaccctgagcaccagcatctgcttcggcggcagcccctgcaccagcacaggctttggaggcaccctgagcacctctgtgtcctttggaggcagcagcagcaccagcgccaactttggaggcaccctgagcaccagcatctgctttgatggcagccccagcactggagctggctttggaggagccctgaacaccagcgccagctttggatctgtgctgaacaccagcacaggctttggaggagccatgagcaccagcgctgactttggaggcaccctgagcacctctgtgtgcttcggcggcagccctggcacctctgtgtcctttggcagcgccctgaacaccaatgccggctacggcggcgctgtgtccaccaacacagactttggaggcaccctgagcacctctgtgtgcttcggcggcagccccagcaccagcgctggctttggaggagccctgaacaccaatgccagctttggctgtgctgtgtccaccagcgccagcttctctggagctgtgtccaccagcgcctgcttcagcggggcccccatcaccaaccctggctttggaggagccttcagcaccagcgctggctttggaggagccctgagcacagctgctgactttggaggcacccccagcaacagcatcggctttggagctgcccccagcacctctgtgtcctttggaggagcccacggcaccagcctgtgcttcggcggggcccccagcaccagcctgtgcttcggcagcgccagcaacaccaacctgtgcttcggcggcccccccagcaccagcgcctgcttcagcggggccaccagccccagcttctgtgatggccccagcaccagcacaggcttctcctttggaaatggcctgagcaccaatgccggctttggaggcggcctgaacaccagcgctggctttggaggcggcctgggcaccagcgctggcttcagcggcggcctgagcaccagcagcggctttgatggcggcctgggcaccagcgctggctttggaggcggccctggcaccagcacaggctttggaggcggcctgggcaccagcgctggcttcagcggcggcctgggcaccagcgctggctttggaggcggcctggtgaccagtgatggctttggaggcggcctgggcaccaatgccagctttggcagcaccctgggcaccagcgctggcttcagcggcggcctgagcaccagtgatggcttcggcagccggcccaatgccagctttgaccggggcctgagcaccatcatcggcttcggcagcggcagcaacaccagcacaggcttcaccggggagcccagcaccagcacaggcttcagcagcggccccagcagcatcgtgggcttcagcggcggccccagcactggagtgggcttctgcagcggccccagcaccagcggcttcagcggcggccccagcactggagctggctttggaggcggccccaacacaggagctggctttggaggcggccccagcaccagcgctggctttggaagtggagctgccagcctgggcgcctgtggcttctcctatggatag

SEQ ID NO: 174492 - DNA, 366 bp, synthetic construct
  misc_feature 1..366: note = Description of Artificial Sequence: Synthetic coding sequence
  source 1..366: mol_type = other DNA
atgcacaccctgctggccgccaccaaggacagcctggccatggacccccctgtggtgaaccggcccaagaagagcaagaccaagaaggcccccatcaagaccatcaccaaggccgccccagctgcccctcctgtgcctgctgccaatgaaattgccaccaacaagcccaagatcacctggcaggccctgaacctgcccgtcatcacccagatcagccaggccctgcccaccacagaggtgaccaacacccaggccagctctgtgacagcccagcccaagaaggccaacaagatgaagagggtgacagccaaggccgcccagggcagccagagccccactggacatgaaggaggcaccatccagtag

SEQ ID NO: 174493 - DNA, 579 bp, synthetic construct
  misc_feature 1..579: note = Description of Artificial Sequence: Synthetic coding sequence
  source 1..579: mol_type = other DNA
atgcacaccctgctggccgccaccaaggacagcctggccatggacccccctgtggtgaaccggcccaagaagagcaagaccaagaaggcccccatcaagaccatcaccaaggccgccccagctgcccctcctgtgcctgctgccaatgaaattgccaccaacaagcccaagatcacctggcaggccctgaacctgcccgtcatcacccagatcagccaggccctgcccaccacagaggtgaccaacacccaggccagctctgtgacagcccagcccaagaaggccaacaagatgaagagggtgacagccaaggccgcccagggcagccagagccccactggacatgaaggaggcaccatccagctgaagagccccctgcaggtgctgaagctgcccgtcatcagccagaacatccacgcccccatcgccaatgaaagtgccagcagccaggccctgatcaccagcatcaagcccaagaaggccagcaaggccaagaaggccgccaacaaggccatcgccagcgccacagaggtgtccctggccgccacagccacccacacagccaccacccagggctag

SEQ ID NO: 174494 - DNA, 531 bp, synthetic construct
  misc_feature 1..531: note = Description of Artificial Sequence: Synthetic coding sequence
  source 1..531: mol_type = other DNA
atggacagaagaaatgactatggctacagagtgcccctcttccagggccccctgcccccacctggcagcctgggcctgcccttccccccagacatccagacagagaccacagaagaagattctgtgctgctgatgcacaccctgctggccgccaccaaggacagcctggccatggacccccctgtggtgaaccggcccaagaagagcaagaccaagaaggcccccatcaagaccatcaccaaggccgccccagctgcccctcctgtgcctgctgccaatgaaattgccaccaacaagcccaagatcacctggcaggccctgaacctgcccgtcatcacccagatcagccaggccctgcccaccacagaggtgaccaacacccaggccagctctgtgacagcccagcccaagaaggccaacaagatgaagagggtgacagccaaggccgcccagggcagccagagccccactggacatgaaggaggcaccatccagctgaagagccccctgcaggtgctgaagctgccctag

SEQ ID NO: 174495 - DNA, 507 bp, synthetic construct
  misc_feature 1..507: note = Description of Artificial Sequence: Synthetic coding sequence
  source 1..507: mol_type = other DNA
atggacagaagaaatgactatggctacagagtgcccctcttccagggccccctgcccccacctggcagcctgggcctgcccttccccccagacatccagacagagaccacagaagaagattctgtgctgctgatgcacaccctgctggccgccaccaaggacagcctggccatggacccccctgtggtgaaccggcccaagaagagcaagaccaagaaggcccccatcaagaccatcaccaaggccgccccagctgcccctcctgtgcctgctgccaatgaaattgccaccaacaagcccaagatcacctggcaggccctgaacctgcccgtcatcacccagatcagccaggccctgcccaccacagaggtgaccaacacccaggccagctctgtgacagcccagcccaagaaggccaacaagatgaagagggtgacagccaaggccgcccagggcagccagagccccactggacatgaaggaggcaccatccagctgaagagctag

SEQ ID NO: 174496 - DNA, 2046 bp, synthetic construct
  misc_feature 1..2046: note = Description of Artificial Sequence: Synthetic coding sequence
  source 1..2046: mol_type = other DNA
atggacagaagaaatgactatggctacagagtgcccctcttccagggccccctgcccccacctggcagcctgggcctgcccttccccccagacatccagacagagaccacagaagaagattctgtgctgctgatgcacaccctgctggccgccaccaaggacagcctggccatggacccccctgtggtgaaccggcccaagaagagcaagaccaagaaggcccccatcaagaccatcaccaaggccgccccagctgcccctcctgtgcctgctgccaatgaaattgccaccaacaagcccaagatcacctggcaggccctgaacctgcccgtcatcacccagatcagccaggccctgcccaccacagaggtgaccaacacccaggccagctctgtgacagcccagcccaagaaggccaacaagatgaagagggtgacagccaaggccgcccagggcagccagagccccactggacatgaaggaggcaccatccagctgaagagccccctgcaggtgctgaagctgcccgtcatcagccagaacatccacgcccccatcgccaatgaaagtgccagcagccaggccctgatcaccagcatcaagcccaagaaggccagcaaggccaagaaggccgccaacaaggccatcgccagcgccacagaggtgtccctggccgccacagccacccacacagccaccacccagggccagatcaccaatgaaacagccagcatccacaccacagctgccagcatccgcaccaagaaggccagcaaggccaggaagaccatcgccaaggtgatcaacacagacacagagcacatcgaggccctgaatgtgacagatgctgccacccggcagatcgaggcctctgtggtggccatccggcccaagaagagcaagggcaagaaggccgccagccggggccccaacagcgtgtctgagatcagcgaggcccccctggccacccagatcgtgaccaaccaggccctggccgccaccctgcgggtgaagaggggcagccgggccaggaaggccgccaccaaggcccgggccacagagagccagaccccaaatgctgaccagggcgcccaggccaagatcgccagcgcccagaccaacgtgtctgccctggagacccaggtggccgctgctgtgcaggccctggctgatgactacctggcccagctgagcctggagcccaccaccaggacccggggcaagaggaacaggaagagcaagcacctgaatggagatgagaggagcggcagcaactaccgccgcatcccctggggcagaagacctgcccccccaagagatgtggccatcctgcaggagcgggccaacaagctggtgaagtacctgctggtgaaggaccagaccaagatccccatcaagagaagtgacatgctgagagatgtgatccaggagtatgatgagtacttccctgagatcatcgagcgggccagctacaccctggagaagatgttccgggtgaacctgaaggagattgacaagcagagcagcctgtacatcctgatcagcacccaggagagcagcgctggcatcctgggcaccaccaaggacacccccaagctgggcctgctgatggtgatcctgagcgtcatcttcatgaatggaaacaaggccagcgaggccgtcatctgggaggtgctgaggaagctgggcctgcggcctggggtgcgccacagcctgtttggagaggtgaggaagctgatcacagatgaatttgtgaagcagaagtacctggagtacaagagggtgcccaacagccggcccccagaatatgagttcttctggggcctgcggagctaccacgagaccagcaagatgaaggtgctgaagtttgcctgccgggtgcagaagaaggaccccaaggactgggccgtgcagtaccgggaggccgtggagatggaggtgcaggccgctgctgtggccgtggccgaggccgaggcccgggcagagtggttccagcaccagcactggctgtactggaggacccagcaccagcacggcctgcagtag

SEQ ID NO: 174497 - DNA, 372 bp, synthetic construct
  misc_feature 1..372: note = Description of Artificial Sequence: Synthetic coding sequence
  source 1..372: mol_type = other DNA
atgcacaccctgctggccgccaccaaggacagcctggccatggacccccctgtggtgaaccggcccaagaagagcaagaccaagaaggcccccatcaagaccatcaccaaggccgccccagctgcccctcctgtgcctgctgccaatgaaattgccaccaacaagcccaagatcacctggcaggccctgaacctgcccgtcatcacccagatcagccaggccctgcccaccacagaggtgaccaacacccaggccagctctgtgacagcccagcccaagaaggccaacaagatgaagagggtgacagccaaggccgcccagggcagccagagccccactggacatgaaggaggcaccatccagctgaagtag

SEQ ID NO: 174498 - DNA, 216 bp, synthetic construct
  misc_feature 1..216: note = Description of Artificial Sequence: Synthetic coding sequence
  source 1..216: mol_type = other DNA
atgcacaccctgctggccgccaccaaggacagcctggccatggacccccctgtggtgaaccggcccaagaagagcaagaccaagaaggcccccatcaagaccatcaccaaggccgccccagctgcccctcctgtgcctgctgccaatgaaattgccaccaacaagcccaagatcacctggcaggccctgaacctgcccgtcatcacccagatctag

SEQ ID NO: 174499 - DNA, 195 bp, synthetic construct
  misc_feature 1..195: note = Description of Artificial Sequence: Synthetic coding sequence
  source 1..195: mol_type = other DNA
atgcacaccctgctggccgccaccaaggacagcctggccatggacccccctgtggtgaaccggcccaagaagagcaagaccaagaaggcccccatcaagaccatcaccaaggccgccccagctgcccctcctgtgcctgctgccaatgaaattgccaccaacaagcccaagatcacctggcaggccctgaactag

SEQ ID NO: 174500 - DNA, 930 bp, synthetic construct
  misc_feature 1..930: note = Description of Artificial Sequence: Synthetic coding sequence
  source 1..930: mol_type = other DNA
atggacagaagaaatgactatggctacagagtgcccctcttccagagcaagcacctgaatggagatgagaggagcggcagcaactaccgccgcatcccctggggccggcggcctgcccccccaagagatgtggccatcctgcaggagcgggccaacaagctggtgaagtacctgctggtgaaggaccagaccaagatccccatcaagagaagtgacatgctgagagatgtgatccaggagtatgatgagtacttccctgagatcatcgagcgggccagctacaccctggagaagatgttccgggtgaacctgaaggagattgacaagcagagcagcctgtacatcctgatcagcacccaggagagcagcgctggcatcctgggcaccaccaaggacacccccaagctgggcctgctgatggtgatcctgagcgtcatcttcatgaatggaaacaaggccagcgaggccgtcatctgggaggtgctgaggaagctgggcctgcggcctggggtgcgccacagcctgtttggagaggtgaggaagctgatcacagatgaatttgtgaagcagaagtacctggagtacaagagggtgcccaacagccggcccccagaatatgagttcttctggggcctgcggagctaccacgagaccagcaagatgaaggtgctgaagtttgcctgccgggtgcagaagaaggaccccaaggactgggccgtgcagtaccgggaggccgtggagatggaggtgcaggccgctgctgtggccgtggccgaggccgaggcccgggcagagatctacagcccctgcctgcagatccccctcatcaactgcagcagccccagccatggagccaaggtgcacccctggaacctgtgcccccacagcagccagggcagctatggccagagcgctgagggcgtgatgtag

SEQ ID NO: 174501 - DNA, 1263 bp, synthetic construct
  misc_feature 1..1263: note = Description of Artificial Sequence: Synthetic coding sequence
  source 1..1263: mol_type = other DNA
atgcctgggggctgcagccggggccctgctgctggagatggccgcctgcggctggcccggctggccctggtgctgctgggctgggtgagcagcagcagccccaccagcagcgccagcagcttcagcagcagcgcccccttcctggccagcgctgtgtctgcccagccccccctgcctgaccagtgcccagccctgtgtgaatgttctgaggccgccaggacagtgaagtgtgtgaacagaaacctgacagaggtgcccacagacctgcctgcctacgtgaggaacctcttcctgactggaaaccagctggccgtgctgcctgctggggcctttgcccggcggccccccctggccgagctggccgccctgaacctgagcggcagccggctggatgaggtgcgggccggggcctttgagcacctgcccagcctgcggcagctggacctgagccacaaccccctggccgacctgagcccctttgccttcagcggcagcaatgcctctgtgtctgcccccagccccctggtggagctgatcctgaaccacatcgtgcccccagaagatgagcggcagaacagaagctttgagggcatggtggtggccgccctgctggccggccgggccctgcagggcctgcggcggctggagctggccagcaaccacttcctgtacctgcccagagatgtgctggcccagctgcccagcctgcggcacctggacctgagcaacaacagcctggtgtccctgacctacgtgtccttcaggaacctgacccacctggagagcctgcacctggaggacaatgccctgaaggtgctgcacaacggcaccctggccgagctgcagggcctgccccacatccgggtcttcctggacaacaacccctgggtgtgtgactgccacatggctgacatggtgacctggctgaaggagacagaggtggtgcagggcaaggaccggctgacctgtgcctacccagagaagatgaggaacagagtgctgctggagctgaacagcgctgacctggactgtgaccccatcctgccccccagcctgcagaccagctatgtgttcctgggcatcgtgctggccctgattggagccatcttcctgctggtgctgtacctgaacaggaagggcatcaagaagtggatgcacaacatcagagatgcctgccgggaccacatggagggctaccactaccgctatgagatcaatgctgacccccggctgaccaacctgagcagcaacagtgatgtgtag

SEQ ID NO: 174502 - DNA, 1263 bp, synthetic construct; identical to SEQ ID NO: 174501
  misc_feature 1..1263: note = Description of Artificial Sequence: Synthetic coding sequence
  source 1..1263: mol_type = other DNA

SEQ ID NO: 174503 - DNA, 1263 bp, synthetic construct; identical to SEQ ID NO: 174501
  misc_feature 1..1263: note = Description of Artificial Sequence: Synthetic coding sequence
  source 1..1263: mol_type = other DNA

SEQ ID NO: 174504 - DNA, 1056 bp, synthetic construct
  misc_feature 1..1056: note = Description of Artificial Sequence: Synthetic coding sequence
  source 1..1056: mol_type = other DNA
atggccctgcccttccagaaggagctggagaagtacaagaacattgatgaagatgagctgctgggcaagctgtctgaggaggagctgaagcagctggagaatgtgctggatgacctggaccctgagagcgccatgctgcctgctggcttccggcagaaggaccagacccagaaggccgccaccggcccctttgaccgggagcacctgctgatgtacctggagaaggaggccctggagcagaaggaccgggaggactttgtgcccttcaccggggagaagaagggccgggtcttcatccccaaggagaagcccatcgagaccaggaaggaggagaaggtgaccctggaccctgagctggaggaggccctggccagcgccagtgacacagagctgtatgacctggccgctgtgctgggcgtgcacaacctgctgaacaaccccaagtttgatgaggagacagccaacaacaagggcggcaagggccctgtgagaaatgtggtgaagggggagaaggtgaagcctgtgtttgaggagccccccaaccccaccaacgtggagatcagcctgcagcagatgaaggccaatgaccccagcctgcaggaggtgaacctgaacaacatcaagaacatccccatccccaccctgcgggagtttgccaaggccctggagaccaacacccacgtgaagaagttcagcctggccgccaccaggagcaatgaccctgtggccatcgcctttgctgacatgctgaaggtgaacaagaccctgaccagcctgaacatcgagagcaacttcatcactggaacaggcatcctggccctggtggaggccctgaaggaaaatgacaccctgacagagatcaagattgacaaccagaggcagcagctgggcacagctgtggagatggagatcgcccagatgctggaggagaacagccgcatcctgaagtttggctaccagttcaccaagcagggccccaggaccagggtggccgccgccatcaccaagaacaatgacctggtgaggaagaagagggtggaggccgacagaagatag

SEQ ID NO: 174505 - DNA, 948 bp, synthetic construct
  misc_feature 1..948: note = Description of Artificial Sequence: Synthetic coding sequence
  source 1..948: mol_type = other DNA
atggccctgcccttccagaaggagctggagaagtacaagaacattgatgaagatgagctgctgggcaagctgtctgaggaggagctgaagcagctggagaatgtgctggatgacctggaccctgagagcgccatgctgcctgctggcttccggcagaaggaccagacccagaaggccgccaccggcccctttgaccgggagcacctgctgatgtacctggagaaggaggccctggagcagaaggaccgggaggactttgtgcccttcaccggggagaagaagggccgggtcttcatccccaaggagaagcccatcgagaccaggaaggaggagaaggtgaccctggaccctgagctggaggaggccctggccagcgccagtgacacagagctgtatgacctggccgctgtgctgggcgtgcacaacctgctgaacaaccccaagtttgatgaggagacagccaacaacaagggcggcaagggccctgtgagaaatgtggtgaagggggagaaggtgaagcctgtgtttgaggagccccccaaccccaccaacgtggagatcagcctgcagcagatgaaggccaatgaccccagcctgcaggaggtgaacctgaacaacatcaaggcctttgctgacatgctgaaggtgaacaagaccctgaccagcctgaacatcgagagcaacttcatcactggaacaggcatcctggccctggtggaggccctgaaggaaaatgacaccctgacagagatcaagattgacaaccagaggcagcagctgggcacagctgtggagatggagatcgcccagatgctggaggagaacagccgcatcctgaagtttggctaccagttcaccaagcagggccccaggaccagggtggccgccgccatcaccaagaacaatgacctggtgaggaagaagagggtggaggccgacagaagatag

SEQ ID NO: 174506 - DNA, 1059 bp, synthetic construct
  misc_feature 1..1059: note = Description of Artificial Sequence: Synthetic coding sequence
  source 1..1059: mol_type = other DNA
atggccctgcccttcaggaaggacctggagaagtacaaggacctggatgaagatgagctgctgggcaacctgtctgaaacagagctgaagcagctggagaccgtgctggatgacctggaccctgaaaatgccctgctgcctgctggcttccggcagaagaaccagaccagcaagagcaccaccggcccctttgaccgggagcacctgctgagctacctggagaaggaggccctggagcacaaggaccgggaggactatgtgccctacaccggggagaagaagggcaagatcttcatccccaagcagaagcctgtgcagaccttcacagaggagaaggtgtccctggaccctgagctggaggaggccctgaccagcgccagtgacacagagctgtgtgacctggccgccatcctgggcatgcacaacctgatcaccaacaccaagttctgcaacatcatgggcagcagcaatggagtggaccaggagcacttcagcaatgtggtgaagggggagaagatcctgcctgtgtttgatgagccccccaaccccaccaacgtggaggagagcctgaagaggaccaaggaaaatgatgcccacctggtggaggtgaacctgaacaacatcaagaacatccccatccccaccctgaaggactttgccaaggccctggagaccaacacccacgtgaagtgcttcagcctggccgccaccaggagcaatgaccctgtggccacagcctttgctgagatgctgaaggtgaacaagaccctgaagagcctgaatgtggagagcaacttcatcaccggggtgggcatcctggccctgattgatgccctgcgggacaatgagaccctggccgagctgaagattgacaaccagaggcagcagctgggcacagctgtggagctggagatggccaagatgctggaggagaacaccaacatcctgaagtttggctaccagttcacccagcagggccccaggaccagggctgccaatgccatcaccaagaacaatgacctggtgaggaagagaagagtggagggggaccaccagtag

SEQ ID NO: 174507 - DNA, 1059 bp, synthetic construct; identical to SEQ ID NO: 174506
  misc_feature 1..1059: note = Description of Artificial Sequence: Synthetic coding sequence
  source 1..1059: mol_type = other DNA

SEQ ID NO: 174508 - DNA, 102 bp, synthetic construct
  misc_feature 1..102: note = Description of Artificial Sequence: Synthetic coding sequence
  source 1..102: mol_type = other DNA
atggccctgcccttcaggaaggacctggagaagtacaaggacctggatgaagatgagctgctgggcaacctgtctgaaacagagctgaagcagctggagtag

SEQ ID NO: 174509 - DNA, 1038 bp, synthetic construct
  misc_feature 1..1038: note = Description of Artificial Sequence: Synthetic coding sequence
  source 1..1038: mol_type = other DNA
atgagcagctaccagaaggagctggagaagtacagagacattgatgaagatgagatcctgcggaccctgagccctgaggagctggagcagctggactgtgagctgcaggagatggaccctgagaacatgctgctgcctgctggcctgcggcagagggaccagaccaagaagagccccaccggccccctggaccgggaggccctgctgcagtacctggagcagcaggccctggaggtgaaggagagagatgacctggtgcccttcaccggggagaagaagggcaagccctacatccagcccaagcgggagatcccagctgaggagcagatcaccctggagcctgagctggaggaggccctggcccacgccacagatgctgagatgtgtgacattgctgccatcctggacatgtacaccctgatgagcaacaagcagtactatgatgccctgtgcagcggggagatctgcaacacagagggcatcagctctgtggtgcagcctgacaagtacaagcctgtgcctgatgagccccccaaccccaccaacatcgaggagatcctgaagagggtgcgcagcaatgacaaggagctggaggaggtgaacctgaacaacatccaggacatccccatccccatgctgtctgagctgtgtgaggccatgaaggccaacacctacgtgcgctccttcagcctggtggccaccaggtctggggaccccatcgccaatgctgtggccgacatgctgcgggagaacagaagcctgcagagcctgaacatcgagagcaacttcatcagcagcacaggcctgatggctgtgctgaaggctgtgcgggagaatgccaccctgacagagctgcgggtggacaaccagaggcagtggccaggagatgctgtggagatggagatggccaccgtgctggagcagtgccccagcatcgtgcgcttcggctaccacttcacccagcagggcccccgggcccgggccgcccaggccatgaccaggaacaatgagctgcggcggcagcagaagaagaggtag

SEQ ID NO: 174510 - DNA, 831 bp, synthetic construct
  misc_feature 1..831: note = Description of Artificial Sequence: Synthetic coding sequence
  source 1..831: mol_type = other DNA
atgagcagctaccagaaggagctggagaagtacagagacattgatgaagatgagatcctgcggaccctgagccctgaggagctggagcagctggactgtgagctgcaggagatggaccctgagaacatgctgctgcctgctggcctgcggcagagggaccagaccaagaagagccccaccggccccctggaccgggaggccctgctgcagtacctggagcagcaggccctggaggtgaaggagagagatgacctggtgcccttcaccggggagaagaagggcgtggtgcagcctgacaagtacaagcctgtgcctgatgagccccccaaccccaccaacatcgaggagatcctgaagagggtgcgcagcaatgacaaggagctggaggaggtgaacctgaacaacatccaggacatccccatccccatgctgtctgagctgtgtgaggccatgaaggccaacacctacgtgcgctccttcagcctggtggccaccaggtctggggaccccatcgccaatgctgtggccgacatgctgagagaaaatagaagcctgcagagcctgaacatcgagagcaacttcatcagcagcacaggcctgatggctgtgctgaaggctgtgagagaaaatgccaccctgacagagctgcgggtggacaaccagaggcagtggccaggagatgctgtggagatggagatggccaccgtgctggagcagtgccccagcatcgtgcgcttcggctaccacttcacccagcagggcccccgggcccgggccgcccaggccatgaccagaaataatgagctgcggcggcagcagaagaagaggtag

SEQ ID NO: 174511 - DNA, 429 bp, synthetic construct
  misc_feature 1..429: note = Description of Artificial Sequence: Synthetic coding sequence
  source 1..429: mol_type = other DNA
atgagcagctaccagaaggagctggagaagtacagagacattgatgaagatgagatcctgcggaccctgagccctgaggagctggagcagctggactgtgagctgcaggagatggaccctgagaacatgctgctgcctgctggcctgcggcagagggaccagaccaagaagagccccaccggccccctggaccgggaggccctgctgcagtacctggagcagcaggccctggaggtgaaggagagagatgacctggtgcccttcaccggggagaagaagggcaagccctacatccagcccaagcgggagatcccagctgaggagcagatcaccctggagcctgagctggaggaggccctggcccacgccacagatgctgagatgtgtgacattgctgccatcctggacatgtacaccctgatgtcctag

SEQ ID NO: 174512 - DNA, 855 bp, synthetic construct
  misc_feature 1..855: note = Description of Artificial Sequence: Synthetic coding sequence
  source 1..855: mol_type = other DNA
atggatgccatcaagaagaagatgcagatgctgaagctggacaaggaaaatgccctggacagagctgagcaggccgaggccgacaagaaggccgcagaagatagaagcaagcagctggaggaggacattgctgccaaggagaagctgctgcgggtgtctgaagatgagcgggacagagtgctggaggagctgcacaaggccgaggacagcctgctggccgctgaggaggccgccgccaaggccgaggctgatgtggccagcctgaacagacgcatccagctggtggaggaggagctggaccgggcccaggagcggctggccacagccctgcagaagctggaggaggccgagaaggccgcagatgaaagtgagcggggcatgaaggtgattgagagccgggcccagaaggatgaggagaagatggagatccaggagatccagctgaaggaggccaagcacatcgccgaggatgctgacagaaaatatgaggaggtggccaggaagctggtgatcatcgagagtgacctggagagagctgaggagagagctgagctgtctgagggcaaatgtgccgagctggaggaggagctgaagacagtgaccaacaacctgaagagcctggaggcccaggccgagaagtacagccagaaggaggacagatatgaggaggagatcaaggtgctgagtgacaagctgaaggaggccgagaccagggctgagtttgctgagaggtctgtgaccaagctggagaagagcattgatgacctggaggagaaggtggcccacgccaaggaggagaacctgtccatgcaccagatgctggaccagaccctgctggagctgaacaacatgtag

SEQ ID NO: 174513 - DNA, 855 bp, synthetic construct
  misc_feature 1..855: note = Description of Artificial Sequence: Synthetic coding sequence
  source 1..855: mol_type = other DNA
atggatgccatcaagaagaagatgcagatgctgaagctggacaaggaaaatgccctggacagagctgagcaggccgaggccgacaagaaggccgcagaagatagaagcaagcagctggaggatgagctggtgtccctgcagaagaagctgaagggcacagaagatgagctggacaagtacagcgaggccctgaaggatgcccaggagaagctggagctggccgagaagaaggccacagatgctgaggctgatgtggccagcctgaacagacgcatccagctggtggaggaggagctggaccgggcccaggagcggctggccacagccctgcagaagctggaggaggccgagaaggccgcagatgaaagtgagcggggcatgaaggtgattgagagccgggcccagaaggatgaggagaagatggagatccaggagatccagctgaaggaggccaagcacatcgccgaggatgctgacagaaaatatgaggaggtggccaggaagctggtgatcatcgagagtgacctggagagagctgaggagagagctgagctgtctgagggccaggtgcggcagctggaggagcagctgcgcatcatggaccagaccctgaaggccctgatggctgctgaggacaagtacagccagaaggaggacagatatgaggaggagatcaaggtgctgagtgacaagctgaaggaggccgagaccagggctgagtttgctgagaggtctgtgaccaagctggagaagagcattgatgacctggaggatgagctgtatgcccagaagctgaagtacaaggccatcagcgaggagctggaccacgccctgaatgacatgacctccatgtag

SEQ ID NO: 174514 - DNA, 738 bp, synthetic construct
  misc_feature 1..738: note = Description of Artificial Sequence: Synthetic coding sequence
  source 1..738: mol_type = other DNA
atggccggcagcagcagcctggaggccgtgcggaggaagatccgcagcctgcaggagcaggctgatgctgctgaggagcgggccggcaccctgcagcgggagctggaccacgagaggaagctgcgggagacagctgaggctgatgtggccagcctgaacagacgcatccagctggtggaggaggagctggaccgggcccaggagcggctggccacagccctgcagaagctggaggaggccgagaaggccgcagatgaaagtgagcggggcatgaaggtgattgagagccgggcccagaaggatgaggagaagatggagatccaggagatccagctgaaggaggccaagcacatcgccgaggatgctgacagaaaatatgaggaggtggccaggaagctggtgatcatcgagagtgacctggagagagctgaggagagagctgagctgtctgagggcaaatgtgccgagctggaggaggagctgaagacagtgaccaacaacctgaagagcctggaggcccaggccgagaagtacagccagaaggaggacagatatgaggaggagatcaaggtgctgagtgacaagctgaaggaggccgagaccagggctgagtttgctgagaggtctgtgaccaagctggagaagagcattgatgacctggaggaccagctgtaccagcagctggagcagaacagaaggctgaccaatgagctgaagctggccctgaatgaagattag

SEQ ID NO: 174515 - DNA, 981 bp, synthetic construct
  misc_feature 1..981: note = Description of Artificial Sequence: Synthetic coding sequence
  source 1..981: mol_type = other DNA
atggatgccatcaagaagaagatgcagatgctgaagctggacaaggaaaatgccctggacagagctgagcaggccgaggccgacaagaaggccgcagaagatagaagcaagcagctggaggaggacattgctgccaaggagaagctgctgcgggtgtctgaagatgagcgggacagagtgctggaggagctgcacaaggccgaggacagcctgctggccgctgaggaggccgccgccaagctggaggatgagctggtgtccctgcagaagaagctgaagggcacagaagatgagctggacaagtacagcgaggccctgaaggatgcccaggagaagctggagctggccgagaagaaggccacagatgctgaggctgatgtggccagcctgaacagacgcatccagctggtggaggaggagctggaccgggcccaggagcggctggccacagccctgcagaagctggaggaggccgagaaggccgcagatgaaagtgagcggggcatgaaggtgattgagagccgggcccagaaggatgaggagaagatggagatccaggagatccagctgaaggaggccaagcacatcgccgaggatgctgacagaaaatatgaggaggtggccaggaagctggtgatcatcgagagtgacctggagagagctgaggagagagctgagctgtctgagggcaaatgtgccgagctggaggaggagctgaagacagtgaccaacaacctgaagagcctggaggcccaggccgagaagtacagccagaaggaggacagatatgaggaggagatcaaggtgctgagtgacaagctgaaggaggccgagaccagggctgagtttgctgagaggtctgtgaccaagctggagaagagcattgatgacctggaggagaaggtggcccacgccaaggaggagaacctgtccatgcaccagatgctggaccagaccctgctggagctgaacaacatgtag

SEQ ID NO: 174516 - DNA, 855 bp, synthetic construct
  misc_feature 1..855: note = Description of Artificial Sequence: Synthetic coding sequence
  source 1..855: mol_type = other DNA
atggatgccatcaagaagaagatgcagatgctgaagctggacaaggaaaatgccctggacagagctgagcaggccgaggccgacaagaaggccgcagaagatagaagcaagcagctggaggatgagctggtgtccctgcagaagaagctgaagggcacagaagatgagctggacaagtacagcgaggccctgaaggatgcccaggagaagctggagctggccgagaagaaggccacagatgctgaggctgatgtggccagcctgaacagacgcatccagctggtggaggaggagctggaccgggcccaggagcggctggccacagccctgcagaagctggaggaggccgagaaggccgcagatgaaagtgagcggggcatgaaggtgattgagagccgggcccagaaggatgaggagaagatggagatccaggagatccagctgaaggaggccaagcacatcgccgaggatgctgacagaaaatatgaggaggtggccaggaagctggtgatcatcgagagtgacctggagagagctgaggagagagctgagctgtctgagggccaggtgcggcagctggaggagcagctgcgcatcatggaccagaccctgaaggccctgatggctgctgaggacaagtacagccagaaggaggacagatatgaggaggagatcaaggtgctgagtgacaagctgaaggaggccgagaccagggctgagtttgctgagaggtctgtgaccaagctggagaagagcattgatgacctggaggagaaggtggcccacgccaaggaggagaacctgtccatgcaccagatgctggaccagaccctgctggagctgaacaacatgtag

SEQ ID NO: 174517 - DNA, 855 bp, synthetic construct
  misc_feature 1..855: note = Description of Artificial Sequence: Synthetic coding sequence
  source 1..855: mol_type = other DNA
atggatgccatcaagaagaagatgcagatgctgaagctggacaaggaaaatgccctggacagagctgagcaggccgaggccgacaagaaggccgcagaagatagaagcaagcagctggaggatgagctggtgtccctgcagaagaagctgaagggcacagaagatgagctggacaagtacagcgaggccctgaaggatgcccaggagaagctggagctggccgagaagaaggccacagatgctgaggctgatgtggccagcctgaacagacgcatccagctggtggaggaggagctggaccgggcccaggagcggctggccacagccctgcagaagctggaggaggccgagaaggccgcagatgaaagtgagcggggcatgaaggtgattgagagccgggcccagaaggatgaggagaagatggagatccaggagatccagctgaaggaggccaagcacatcgccgaggatgctgacagaaaatatgaggaggtggccaggaagctggtgatcatcgagagtgacctggagagagctgaggagagagctgagctgtctgagggcaaatgtgccgagctggaggaggagctgaagacagtgaccaacaacctgaagagcctggaggcccaggccgagaagtacagccagaaggaggacagatatgaggaggagatcaaggtgctgagtgacaagctgaaggaggccgagaccagggctgagtttgctgagaggtctgtgaccaagctggagaagagcattgatgacctggaggatgagctgtatgcccagaagctgaagtacaaggccatcagcgaggagctggaccacgccctgaatgacatgaccagcatctag

SEQ ID NO: 174518 - DNA, 855 bp, synthetic construct
  misc_feature 1..855: note = Description of Artificial Sequence: Synthetic coding sequence
  source 1..855: mol_type = other DNA
atggatgccatcaagaagaagatgcagatgctgaagctggacaaggaaaatgccctggacagagctgagcaggccgaggccgacaagaaggccgcagaagatagaagcaagcagctggaggaggacattgctgccaaggagaagctgctgcgggtgtctgaagatgagcgggacagagtgctggaggagctgcacaaggccgaggacagcctgctggccgctgaggaggccgccgccaaggccgaggctgatgtggccagcctgaacagacgcatccagctggtggaggaggagctggaccgggcccaggagcggctggccacagccctgcagaagctggaggaggccgagaaggccgcagatgaaagtgagcggggcatgaaggtgattgagagccgggcccagaaggatgaggagaagatggagatccaggagatccagctgaaggaggccaagcacatcgccgaggatgctgacagaaaatatgaggaggtggccaggaagctggtgatcatcgagagtgacctggagagagctgaggagagagctgagctgtctgagggccaggtgcggcagctggaggagcagctgcgcatcatggaccagaccctgaaggccctgatggctgctgaggacaagtacagccagaaggaggacagatatgaggaggagatcaaggtgctgagtgacaagctgaaggaggccgagaccagggctgagtttgctgagaggtctgtgaccaagctggagaagagcattgatgacctggaggagaaggtggcccacgccaaggaggagaacctgtccatgcaccagatgctggaccagaccctgctggagctgaacaacatgtag

SEQ ID NO: 174519 - DNA, 855 bp, synthetic construct
  misc_feature 1..855: note = Description of Artificial Sequence: Synthetic coding sequence
  source 1..855: mol_type = other DNA
atggatgccatcaagaagaagatgcagatgctgaagctggacaaggaaaatgccctggacagagctgagcaggccgaggccgacaagaaggccgcagaagatagaagcaagcagctggaggatgagctggtgtccctgcagaagaagctgaagggcacagaagatgagctggacaagtacagcgaggccctgaaggatgcccaggagaagctggagctggccgagaagaaggccacagatgctgaggctgatgtggccagcctgaacagacgcatccagctggtggaggaggagctggaccgggcccaggagcggctggccacagccctgcagaagctggaggaggccgagaaggccgcagatgaaagtgagcggggcatgaaggtgattgagagccgggcccagaaggatgaggagaagatggagatccaggagatccagctgaaggaggccaagcacatcgccgaggatgctgacagaaaatatgaggaggtggccaggaagctggtgatcatcgagagtgacctggagagagctgaggagagagctgagctgtctgagggcaaatgtgccgagctggaggaggagctgaagacagtgaccaacaacctgaagagcctggaggcccaggccgagaagtacagccagaaggaggacagatatgaggaggagatcaaggtgctgagtgacaagctgaaggaggccgagaccagggctgagtttgctgagaggtctgtgaccaagctggagaagagcattgatgacctggaggagaaggtggcccacgccaaggaggagaacctgtccatgcaccagatgctggaccagaccctgctggagctgaacaacatgtag

SEQ ID NO: 174520 - DNA, 798 bp, synthetic construct
  misc_feature 1..798: note = Description of Artificial Sequence: Synthetic coding sequence
  source 1..798: mol_type = other DNA
tgaagagctgagcaggccgaggccgacaagaaggctgctgaggacaggagcaagcagctggaggatgagctggtgtccctgcagaagaagctgaagggcacagaagatgagctggacaagtacagcgaggccctgaaggatgcccaggagaagctggagctggccgagaagaaggccacagatgctgaggctgatgtggccagcctgaacagacgcatccagctggtggaggaggagctggaccgggcccaggagcggctggccacagccctgcagaagctggaggaggccgagaaggctgctgatgagagcgagcggggcatgaaggtgattgagagccgggcccagaaggatgaggagaagatggagatccaggagatccagctgaaggaggccaagcacatcgcagaagatgctgacagaaaatatgaggaggtggccaggaagctggtgatcattgaaagtgacctggagcgggcagaggagcgggcagagctgtctgagggcaaatgtgccgagctggaggaggagctgaagacagtgaccaacaacctgaagagcctggaggcccaggccgagaagtacagccagaaggaggacagatatgaggaggagatcaaggtgctgagtgacaagctgaaggaggccgagaccagggctgagtttgctgagaggtctgtgaccaagctggagaagagcattgatgacctggaggatgagctgtatgcccagaagctgaagtacaaggccatcagcgaggagctggaccacgccctgaatgacatgacctccatgtag

SEQ ID NO: 174521 - DNA, 855 bp, synthetic construct
  misc_feature 1..855: note = Description of Artificial Sequence: Synthetic coding sequence
  source 1..855: mol_type = other DNA
atggatgccatcaagaagaagatgcagatgctgaagctggacaaggaaaatgccatcgacagagctgagcaggccgaggccgacaagaagcaggctgaagatcgctgcaagcagctggaggaggagcagcaggccctgcagaagaagctgaagggcacagaagatgaggtggagaagtacagcgagagcgtgaaggaggcccaggagaagctggagcaggccgagaagaaggccacagatgctgaggctgatgtggccagcctgaacagacgcatccagctggtggaggaggagctggaccgggcccaggagcggctggccacagccctgcagaagctggaggaggccgagaaggccgcagatgaaagtgagcggggcatgaaggtgattgaaaatagagccatgaaggatgaggagaagatggagctgcaggagatgcagctgaaggaggccaagcacatcgccgaggacagcgacagaaaatatgaggaggtggccaggaagctggtgatcctggagggggagctggagaggtctgaggagagagctgaggtggccgagagcaaatgtggggacctggaggaggagctgaagatcgtgaccaacaacctgaagagcctggaggcccaggccgacaagtacagcaccaaggaggacaagtatgaggaggagatcaagctgctggaggagaagctgaaggaggccgagaccagggctgagtttgctgagaggtctgtggccaagctggagaagaccattgatgacctggaggagaccctggccagcgccaaggaggagaatgtggagatccaccagaccctggaccagaccctgctggagctgaacaacctgtag

SEQ ID NO: 174522 - DNA, 855 bp, synthetic construct
  misc_feature 1..855: note = Description of Artificial Sequence: Synthetic coding sequence
  source 1..855: mol_type = other DNA
atggatgccatcaagaagaagatgcagatgctgaagctggacaaggaaaatgccatcgacagagctgagcaggccgaggccgacaagaagcaggctgaagatcgctgcaagcagctggaggaggagcagcaggccctgcagaagaagctgaagggcacagaagatgaggtggagaagtacagcgagagcgtgaaggaggcccaggagaagctggagcaggccgagaagaaggccacagatgctgaggctgatgtggccagcctgaacagacgcatccagctggtggaggaggagctggaccgggcccaggagcggctggccacagccctgcagaagctggaggaggccgagaaggccgcagatgaaagtgagcggggcatgaaggtgattgaaaatagagccatgaaggatgaggagaagatggagctgcaggagatgcagctgaaggaggccaagcacatcgccgaggacagcgacagaaaatatgaggaggtggccaggaagctggtgatcctggagggggagctggagaggtctgaggagagagctgaggtggccgagagcaaatgtggggacctggaggaggagctgaagatcgtgaccaacaacctgaagagcctggaggcccaggccgacaagtacagcaccaaggaggacaagtatgaggaggagatcaagctgctggaggagaagctgaaggaggccgagaccagggctgagtttgctgagaggtctgtggccaagctggagaagaccattgatgacctggaggatgaggtgtatgcccagaagatgaagtacaaggccatcagcgaggagctggacaatgccctgaatgacatcaccagcctgtag

SEQ ID NO: 174523 - DNA, 855 bp, synthetic construct
  misc_feature 1..855: note = Description of Artificial Sequence: Synthetic coding sequence
  source 1..855: mol_type = other DNA
atggatgccatcaagaagaagatgcagatgctgaagctggacaaggaaaatgccatcgacagagctgagcaggccgaggccgacaagaagcaggctgaagatcgctgcaagcagctggaggaggagcagcaggccctgcagaagaagctgaagggcacagaagatgaggtggagaagtacagcgagagcgtgaaggaggcccaggagaagctggagcaggccgagaagaaggccacagatgctgaggctgatgtggccagcctgaacagacgcatccagctggtggaggaggagctggaccgggcccaggagcggctggccacagccctgcagaagctggaggaggccgagaaggccgcagatgaaagtgagcggggcatgaaggtgattgaaaatagagccatgaaggatgaggagaagatggagctgcaggagatgcagctgaaggaggccaagcacatcgccgaggacagcgacagaaaatatgaggaggtggccaggaagctggtgatcctggagggggagctggagaggtctgaggagagagctgaggtggccgagagccgggcccggcagctggaggaggagctgcggaccatggaccaggccctgaagagcctgatggccagcgaggaggagtacagcaccaaggaggacaagtatgaggaggagatcaagctgctggaggagaagctgaaggaggccgagaccagggctgagtttgctgagaggtctgtggccaagctggagaagaccattgatgacctggaggagaccctggccagcgccaaggaggagaatgtggagatccaccagaccctggaccagaccctgctggagctgaacaacctgtag

SEQ ID NO: 174524 - DNA, 969 bp, synthetic construct
  misc_feature 1..969: note = Description of Artificial Sequence: Synthetic coding sequence
  source 1..969: mol_type = other DNA
atggatgccatcaagaagaagatgcagatgctgaagctggacaaggaaaatgccatcgacagagctgagcaggccgaggccgacaagaagcaggctgaagatcgctgcaagcagctggaggaggagcagcaggccctgcagaagaagctgaagggcacagaagatgaggtggagaagtacagcgagagcgtgaaggaggcccaggagaagctggagcaggccgagaagaaggccacagatgctgaggctgatgtggccagcctgaacagacgcatccagctggtggaggaggagctggaccgggcccaggagcggctggccacagccctgcagaagctggaggaggccgagaaggccgcagatgaaagtgagcggggcatgaaggtgattgaaaatagagccatgaaggatgaggagaagatggagctgcaggagatgcagctgaaggaggccaagcacatcgccgaggacagcgacagaaaatatgaggaggtggccaggaagctggtgatcctggagggggagctggagaggtctgaggagagagctgaggtggccgagagcaaatgtggggacctggaggaggagctgaagatcgtgaccaacaacctgaagagcctggaggcccaggccgacaagtacagcaccaaggaggacaagtatgaggaggagatcaagctgctggaggagaagctgaaggaggccgagaccagggctgagtttgctgagaggtctgtggccaagctggagaagaccattgatgacctggaggagagcaccagcatcgccaccacagagcactggttcaccccagacaccctggccctgacagacacccccagcccctgcacagagcccacccacaagaccccctggcccaccctgaagcccctgtgcaccggcaccccctggctgagcctgagtgacagccccctgcacgtgggcacctgtggccccatcaagccctag

SEQ ID NO: 174525 - DNA, 858 bp, synthetic construct
  misc_feature 1..858: note = Description of Artificial Sequence: Synthetic coding sequence
  source 1..858: mol_type = other DNA
atgatggaggccatcaagaagaagatgcagatgctgaagctggacaaggaaaatgccctggacagagctgagcaggccgaggccgagcagaagcaggccgaggagaggagcaagcagctggaggatgagctggccgccatgcagaagaagctgaagggcacagaagatgagctggacaagtacagcgaggccctgaaggatgcccaggagaagctggagctggccgagaagaaggccgcagatgctgaggccgaggtggccagcctgaacagacgcatccagctggtggaggaggagctggaccgggcccaggagcggctggccacagccctgcagaagctggaggaggccgagaaggctgctgatgagagcgagcggggcatgaaggtgattgagaacagagccctgaaggatgaggagaagatggagctgcaggagatccagctgaaggaggccaagcacatcgccgaggaggccgacagaaaatatgaggaggtggccaggaagctggtgatcattgaaggagacctggagaggacagaggagcgggcagagctggccgagagccgctgccgggagatggatgagcagatccggctgatggaccagaacctgaagtgcctgtctgctgctgaggagaagtacagccagaaggaggacaagtatgaggaggagatcaagatcctgacagacaagctgaaggaggccgagaccagggctgagtttgctgagaggtctgtggccaagctggagaagaccattgatgacctggaggacaagctgaagtgcaccaaggaggagcacctgtgcacccagaggatgctggaccagaccctgctggacctgaatgagatgtag

SEQ ID NO: 174526 - DNA, 744 bp, synthetic construct
  misc_feature 1..744: note = Description of Artificial Sequence: Synthetic coding sequence
  source 1..744: mol_type = other DNA
atggccggcatcaccaccattgaagctgtgaagaggaagatccaggtgctgcagcagcaggctgatgatgctgaggagcgggcagagcggctgcagcgggaggtggagggggagcggcgggcccgggagcaggccgaggccgaggtggccagcctgaacagacgcatccagctggtggaggaggagctggaccgggcccaggagcggctggccacagccctgcagaagctggaggaggccgagaaggccgcagatgaaagtgagcggggcatgaaggtgattgaaaatagagccctgaaggatgaggagaagatggagctgcaggagatccagctgaaggaggccaagcacatcgccgaggaggccgacagaaaatatgaggaggtggccaggaagctggtgatcatcgagggggacctggagaggacagaggagagagctgagctggccgagagcaaatgttctgagctggaggaggagctgaagaatgtgaccaacaacctgaagagcctggaggcccaggccgagaagtacagccagaaggaggacaagtatgaggaggagatcaagatcctgacagacaagctgaaggaggccgagaccagggctgagtttgctgagaggtctgtggccaagctggagaagaccattgatgacctggaggagcggctgtacagccagctggagaggaaccggctgctgagcaatgagctgaagctgaccctgcatgacctgtgtgactag

SEQ ID NO: 174527 - DNA, 747 bp, synthetic construct
  misc_feature 1..747: note = Description of Artificial Sequence: Synthetic coding sequence
  source 1..747: mol_type = other DNA
atggccggcatcaccaccattgaagctgtgaagaggaagatccaggtgctgcagcagcaggctgatgatgctgaggagcgggcagagcggctgcagcgggaggtggagggggagcggcgggcccgggagcaggccgaggccgaggtggccagcctgaacagacgcatccagctggtggaggaggagctggaccgggcccaggagcggctggccacagccctgcagaagctggaggaggccgagaaggccgcagatgaaagtgagcggggcatgaaggtgattgaaaatagagccctgaaggatgaggagaagatggagctgcaggagatccagctgaaggaggccaagcacatcgccgaggaggccgacagaaaatatgaggaggtggccaggaagctggtgatcatcgagggggacctggagaggacagaggagagagctgagctggccgagagccgctgccgggagatggatgagcagatccggctgatggaccagaacctgaagtgcctgtctgctgctgaggagaagtacagccagaaggaggacaagtatgaggaggagatcaagatcctgacagacaagctgaaggaggccgagaccagggctgagtttgctgagaggtctgtggccaagctggagaagaccattgatgacctggaggatgagctgtatgcccagaagctgaagtacaaggccatcagcgaggagctggaccacgccctgaatgacatgaccagcatctag

SEQ ID NO: 174528 - DNA, 747 bp, synthetic construct
  misc_feature 1..747: note = Description of Artificial Sequence: Synthetic coding sequence
  source 1..747: mol_type = other DNA
atggccggcatcaccaccattgaagctgtgaagaggaagatccaggtgctgcagcagcaggctgatgatgctgaggagcgggcagagcggctgcagcgggaggtggagggggagcggcgggcccgggagcaggccgaggccgaggtggccagcctgaacagacgcatccagctggtggaggaggagctggaccgggcccaggagcggctggccacagccctgcagaagctggaggaggccgagaaggccgcagatgaaagtgagcggggcatgaaggtgattgaaaatagagccctgaaggatgaggagaagatggagctgcaggagatccagctgaaggaggccaagcacatcgccgaggaggccgacagaaaatatgaggaggtggccaggaagctggtgatcatcgagggggacctggagaggacagaggagagagctgagctggccgagagcaaatgttctgagctggaggaggagctgaagaatgtgaccaacaacctgaagagcctggaggcccaggccgagaagtacagccagaaggaggacaagtatgaggaggagatcaagatcctgacagacaagctgaaggaggccgagaccagggctgagtttgctgagaggtctgtggccaagctggagaagaccattgatgacctggaggacaagctgaagtgcaccaaggaggagcacctgtgcacccagaggatgctggaccagaccctgctggacctgaatgagatgtag

SEQ ID NO: 174529 - DNA, 675 bp, synthetic construct
  misc_feature 1..675: note = Description of Artificial Sequence: Synthetic coding sequence
  source 1..675: mol_type = other DNA
atggccggcatcaccaccattgaagctgtgaagaggaagatccaggtgctgcagcagcaggctgatgatgctgaggagcgggcagagcggctgcagcgggaggtggagggggagcggcgggcccgggagcagaggctggccacagccctgcagaagctggaggaggccgagaaggccgcagatgaaagtgagcggggcatgaaggtgattgaaaatagagccctgaaggatgaggagaagatggagctgcaggagatccagctgaaggaggccaagcacatcgccgaggaggccgacagaaaatatgaggaggtggccaggaagctggtgatcatcgagggggacctggagaggacagaggagagagctgagctggccgagagccgctgccgggagatggatgagcagatccggctgatggaccagaacctgaagtgcctgtctgctgctgaggagaagtacagccagaaggaggacaagtatgaggaggagatcaagatcctgacagacaagctgaaggaggccgagaccagggctgagtttgctgagaggtctgtggccaagctggagaagaccattgatgacctggaggacaagctgaagtgcaccaaggaggagcacctgtgcacccagaggatgctggaccagaccctgctggacctgaatgagatgtag

SEQ ID NO: 174530 - DNA, 858 bp, synthetic construct
  misc_feature 1..858: note = Description of Artificial Sequence: Synthetic coding sequence
  source 1..858: mol_type = other DNA
atgatggaggccatcaagaagaagatgcagatgctgaagctggacaaggaaaatgccctggacagagctgagcaggccgaggccgagcagaagcaggccgaggagaggagcaagcagctggaggatgagctggccgccatgcagaagaagctgaagggcacagaagatgagctggacaagtacagcgaggccctgaaggatgcccaggagaagctggagctggccgagaagaaggccgcagatgctgaggccgaggtggccagcctgaacagacgcatccagctggtggaggaggagctggaccgggcccaggagcggctggccacagccctgcagaagctggaggaggccgagaaggctgctgatgagagcgagcggggcatgaaggtgattgagaacagagccctgaaggatgaggagaagatggagctgcaggagatccagctgaaggaggccaagcacatcgccgaggaggccgacagaaaatatgaggaggtggccaggaagctggtgatcattgaaggagacctggagaggacagaggagcgggcagagctggccgagagcaagtgcagcgagctggaggaggagctgaagaatgtgaccaacaacctgaagagcctggaggcccaggccgagaagtacagccagaaggaggacaagtatgaggaggagatcaagatcctgacagacaagctgaaggaggccgagaccagggctgagtttgctgagaggtctgtggccaagctggagaagaccattgatgacctggaggatgagctgtatgcccagaagctgaagtacaaggccatcagcgaggagctggaccacgccctgaatgacatgaccagcatctag

SEQ ID NO: 174531 - DNA, 744 bp, synthetic construct
  misc_feature 1..744: note = Description of Artificial Sequence: Synthetic coding sequence
  source 1..744: mol_type = other DNA
atggccggcatcaccaccattgaagctgtgaagaggaagatccaggtgctgcagcagcaggctgatgatgctgaggagcgggcagagcggctgcagcgggaggtggagggggagcggcgggcccgggagcaggccgaggccgaggtggccagcctgaacagacgcatccagctggtggaggaggagctggaccgggcccaggagcggctggccacagccctgcagaagctggaggaggccgagaaggccgcagatgaaagtgagcggggcatgaaggtgattgaaaatagagccctgaaggatgaggagaagatggagctgcaggagatccagctgaaggaggccaagcacatcgccgaggaggccgacagaaaatatgaggaggtggccaggaagctggtgatcatcgagggggacctggagaggacagaggagagagctgagctggccgagagccgctgccgggagatggatgagcagatccggctgatggaccagaacctgaagtgcctgtctgctgctgaggagaagtacagccagaaggaggacaagtatgaggaggagatcaagatcctgacagacaagctgaaggaggccgagaccagggctgagtttgctgagaggtctgtggccaagctggagaagaccattgatgacctggaggagcggctgtacagccagctggagaggaaccggctgctgagcaatgagctgaagctgaccctgcatgacctgtgtgactag

SEQ ID NO: 174532 - DNA, 747 bp, synthetic construct
  misc_feature 1..747: note = Description of Artificial Sequence: Synthetic coding sequence
  source 1..747: mol_type = other DNA
atggccggcatcaccaccattgaagctgtgaagaggaagatccaggtgctgcagcagcaggctgatgatgctgaggagcgggcagagcggctgcagcgggaggtggagggggagcggcgggcccgggagcaggccgaggccgaggtggccagcctgaacagacgcatccagctggtggaggaggagctggaccgggcccaggagcggctggccacagccctgcagaagctggaggaggccgagaaggccgcagatgaaagtgagcggggcatgaaggtgattgaaaatagagccctgaaggatgaggagaagatggagctgcaggagatccagctgaaggaggccaagcacatcgccgaggaggccgacagaaaatatgaggaggtggccaggaagctggtgatcatcgagggggacctggagaggacagaggagagagctgagctggccgagagccgctgccgggagatggatgagcagatccggctgatggaccagaacctgaagtgcctgtctgctgctgaggagaagtacagccagaaggaggacaagtatgaggaggagatcaagatcctgacagacaagctgaaggaggccgagaccagggctgagtttgctgagaggtctgtggccaagctggagaagaccattgatgacctggaggacaagctgaagtgcaccaaggaggagcacctgtgcacccagaggatgctggaccagaccctgctggacctgaatgagatgtag

SEQ ID NO: 174533 - DNA, 228 bp, synthetic construct
  misc_feature 1..228: note = Description of Artificial Sequence: Synthetic coding sequence
  source 1..228: mol_type = other DNA
atgatggaggccatcaagaagaagatgcagatgctgaagctggacaaggaaaatgccctggacagagctgagcaggccgaggccgagcagaagcaggccgaggagaggagcaagcagctggaggatgagctggccgccatgcagaagaagctgaagggcacagaagatgagctggacaagtacagcgaggccctgaaggatgcccaggagaagctggagctggcctag

SEQ ID NO: 174534 - DNA, 747 bp, synthetic construct
  misc_feature 1..747: note = Description of Artificial Sequence: Synthetic coding sequence
  source 1..747: mol_type = other DNA
atggccggcctgaacagcctggaggccgtgaagaggaagatccaggccctgcagcagcaggctgatgaagcagaagatcgggcccagggcctgcagcgggagctggatggagagcgggagcggcgggagaaggccgagggagatgtggccgccctgaacagacgcatccagctggtggaggaggagctggaccgggcccaggagcggctggccacagccctgcagaagctggaggaggccgagaaggccgcagatgaaagtgagcggggcatgaaggtgattgaaaatagagccatgaaggatgaggagaagatggagatccaggagatgcagctgaaggaggccaagcacatcgccgaggaggccgacagaaaatatgaggaggtggccaggaagctggtgatcctggagggggagctggagagagctgaggagagagctgaggtgtctgagctgaagtgtggggacctggaggaggagctgaagaatgtgaccaacaacctgaagagcctggaggccgccagcgagaagtacagcgagaaggaggacaagtatgaggaggagatcaagctgctgagtgacaagctgaaggaggccgagaccagggctgagtttgctgagaggacagtggccaagctggagaagaccattgatgacctggaggagaagctggcccaggccaaggaggagaatgtgggcctgcaccagaccctggaccagaccctgaatgagctgaactgcatctag

SEQ ID NO: 174535 - DNA, 855 bp, synthetic construct
  misc_feature 1..855: note = Description of Artificial Sequence: Synthetic coding sequence
  source 1..855: mol_type = other DNA
atggaggccatcaagaagaagatgcagatgctgaagctggacaaggaaaatgccatcgacagagctgagcaggccgaggccgacaagaaggctgctgaggacaagtgcaagcaggtggaggaggagctgacccacctgcagaagaagctgaagggcacagaagatgagctggacaagtacagcgaggacctgaaggatgcccaggagaagctggagctgacagagaagaaggccagtgatgctgaaggagatgtggccgccctgaacagacgcatccagctggtggaggaggagctggaccgggcccaggagcggctggccacagccctgcagaagctggaggaggccgagaaggccgcagatgaaagtgagcggggcatgaaggtgattgaaaatagagccatgaaggatgaggagaagatggagatccaggagatgcagctgaaggaggccaagcacatcgccgaggaggccgacagaaaatatgaggaggtggccaggaagctggtgatcctggagggggagctggagagagctgaggagagagctgaggtgtctgagctgaagtgtggggacctggaggaggagctgaagaatgtgaccaacaacctgaagagcctggaggccgccagcgagaagtacagcgagaaggaggacaagtatgaggaggagatcaagctgctgagtgacaagctgaaggaggccgagaccagggctgagtttgctgagaggacagtggccaagctggagaagaccattgatgacctggaggagaagctggcccaggccaaggaggagaatgtgggcctgcaccagaccctggaccagaccctgaatgagctgaactgcatctag

SEQ ID NO: 174536 - DNA, 855 bp, synthetic construct; identical to SEQ ID NO: 174535
  misc_feature 1..855: note = Description of Artificial Sequence: Synthetic coding sequence
  source 1..855: mol_type = other DNA

SEQ ID NO: 174537 - DNA, 2244 bp, synthetic construct
  misc_feature 1..2244: note = Description of Artificial Sequence: Synthetic coding sequence
  source 1..2244: mol_type = other DNA
atgggccgcctgaatgagcagaggctcttccagcctgacctgtgtgatgtggacctggtgctggtgccccagaggagcgtcttccctgcccacaagggcgtgctggccgcctacagccagttcttccacagcctcttcacccagaacaagcagctgcagagggtggagctgagcctggaggccctggcccctgggggcctgcagcagatcctgaacttcatctacaccagcaagctgctggtgaatgctgccaacgtgcatgaggtgctgtctgctgccagcctgctgcagatggctgacattgctgccagctgccaggagctgctggatgcccggagcctgggccccccaggccctggcaccgtggccctggcccagcctgctgccagctgcaccccagctgccccaccctactactgtgacatcaagcaggaggccgacaccccaggcctgcccaagatctatgcccgggagggccctgacccctacagcgtgcgggtggaggatggagctggaacagctgggggcaccgtgcctgccaccatcggccctgcccagcccttcttcaaggaggagaaggagggcggcgtggaggaggccggcggccccccagccagcctgtgcaagctggagggcggggaggagctggaggaggagctgggcggcagcggcacctacagccggcgggagcagagccagatcatcgtggaggtgaacctgaacaaccagaccctgcacgtgtccactggacctgagggcaagccaggagctggccccagccctgccaccgtggtgctgggcagagaagatggcctgcagaggcacagtgatgaggaggaggaggatgatgaggaggaggaggaggaggaggaggaggaggagggcggcggcagcggccgggaggaggaggaggaggaggagggcggcagccagggcgaggaggaggaggaggaggaggatggccacagcgagcaggaggaggaggaggaggaggaggaggaggagggccccagcgagcaggaccaggagagcagcgaggaggaggagggggaggagggggaggccggcggcaagcagggcccccggggcagccgcagcagcagagctgaccccccaccccacagccacatggccaccaggagcagagaaaatgccaggagaagaggcaccccagagcctgaggaggccggccggcggggcggcaagaggcccaagcccccacctggggtggccagcgccagcgcccggggccccccagccacagatggcctgggcgccaaggtgaagctggaggagaagcagcaccacccctgccagaagtgccccagggtcttcaacaaccgctggtacctggagaagcacatgaatgtgacccacagcaggatgcagatctgtgaccagtgtgggaagcgcttcctgctggagagcgagctgctgctgcaccggcagacagactgtgagaggaacatccagtgtgtgacctgtgggaaggccttcaagaagctgtggagcctgcacgagcacaacaagatcgtgcacggctacgccgagaagaagttcagctgtgagatctgtgagaagaagttctacaccatggcccacgtgaggaagcacatggtggcccacaccaaggacatgcccttcacctgtgagacctgtgggaagagcttcaagaggtccatgagcctgaaggtgcacagcctgcagcacagcggggagaagcccttccgctgtgagaactgcaatgaacgcttccagtacaagtaccagctgcggagccacatgagcatccacatcggccacaagcagttcatgtgccagtggtgtgggaaggacttcaacatgaagcagtactttgatgagcacatgaagacccacactggagagaagccctacatctgtgagatctgtgggaagagcttcaccagccggcccaacatgaagaggcacaggaggacccacactggagagaagccctacccctgtgatgtgtgtggccagcgcttccgcttcagcaacatgctgaaggcccacaaggagaagtgcttccgggtgagccacaccctggccggagatggagtgcctgctgcccctggcctgccccccacccagccccaggcccacgccctgcccctgctgcccggcctgccccagaccctgcccccaccaccccacctgcccccacctccacccctcttccccaccacagccagccctgggggccgcatgaatgccaacaactag

SEQ ID NO: 174538 - DNA, 483 bp, synthetic construct
  misc_feature 1..483: note = Description of Artificial Sequence: Synthetic coding sequence
  source 1..483: mol_type = other DNA
atgacagaccagcaggccgaggcccggagctacctgtctgaggagatgattgctgagttcaaggccgcctttgacatgtttgatgctgatggcggcggggacatctctgtgaaggagctgggcaccgtgatgaggatgctgggccagacccccaccaaggaggagctggatgccatcatcgaggaggtggatgaagatggcagcggcaccatcgactttgaggagttcctggtgatgatggtgcggcagatgaaggaggatgccaagggcaagtctgaggaggagctggccgagtgcttccgcatctttgacagaaatgctgatggctacattgatcctgaggagctggccgagatcttccgggccagcggggagcacgtgacagatgaggagattgagagcctgatgaaggatggagacaagaacaatgatggaagaattgactttgatgagttcctgaagatgatggagggcgtgcagtag

SEQ ID NO: 174539 - DNA, 438 bp, synthetic construct
  misc_feature 1..438: note = Description of Artificial Sequence: Synthetic coding sequence
  source 1..438: mol_type = other DNA
atgattgctgagttcaaggccgcctttgacatgtttgatgctgatggcggcggggacatctctgtgaaggagctgggcaccgtgatgaggatgctgggccagacccccaccaaggaggagctggatgccatcatcgaggaggtggatgaagatggcagcggcaccatcgactttgaggagttcctggtgatgatggtgcggcagatgaaggaggatgccaagggcaagtctgaggaggagctggccgagtgcttccgcatctttgacagaaatgctgatggctacatcgaccctgaggagctggccgagatcttccgggccagcggggagcacgtgacagatgaggagattgagagcctgatgaaggatggagacaagaacaatgatggaagaattgactttgatgagttcctgaagatgatggagggcgtgcagtag

SEQ ID NO: 174540 - DNA, 564 bp, synthetic construct
  misc_feature 1..564: note = Description of Artificial Sequence: Synthetic coding sequence
  source 1..564: mol_type = other DNA
atgcctgaggtggagaggaagcccaagatcacagccagcaggaagctgctgctgaagagcctgatgctggccaaggccaaggagtgctgggagcaggagcacgaggagcgggaggccgagaaggtgcgctacctggccgagcgcatccccaccctgcagacccggggcctgagcctgagcgccctgcaggacctgtgccgggagctgcacgccaaggtggaggtggtggatgaggagagatatgacatcgaggccaagtgcctgcacaacacccgggagatcaaggacctgaagctgaaggtgatggacctgcggggcaagttcaagaggcctcccctgcggcgggtgcgggtgtctgcagatgccatgctgcgggccctgctgggcagcaagcacaaggtgtccatggacctgcgggccaacctgaagtctgtgaagaaggaggacacagagaaggagaggcctgtggaggtgggggactggaggaagaatgtggaggccatgagcggcatggagggcaggaagaagatgtttgatgctgccaagagccccaccagccagtag

SEQ ID NO: 174541 - DNA, 564 bp, synthetic construct
  misc_feature 1..564: note = Description of Artificial Sequence: Synthetic coding sequence
  source 1..564: mol_type = other DNA
atgcctgaggtgcagaggaagcccaagatcacagccagcaggaagctgctgctgaagagcctgatgctggccaaggccaaggagtgctgggagcaggagcacgaggagcgggaggccgagaaggtgcgctacctggccgagcgcatccccaccctgcagacccggggcctgagcctgagcgccctgcaggacctgtgccgggagctgcacgccaaggtggaggtggtggatgaggagagatatgacatcgaggccaagtgcctgcacaacacccgggagatcaaggacctgaagctgaaggtgatggacctgcggggcaagttcaagaggcctcccctgcggcgggtgcgggtgtctgcagatgccatgctgcgggccctgctgggcagcaagcacaaggtgtccatggacctgcgggccaacctgaagtctgtgaagaaggaggacacagagaaggagaggcctgtggaggtgggggactggaggaagaatgtggaggccatgagcggcatggagggcaggaagaagatgtttgatgctgccaagagccccaccagccagtag

SEQ ID NO: 174542 - DNA, 564 bp, synthetic construct; identical to SEQ ID NO: 174540
  misc_feature 1..564: note = Description of Artificial Sequence: Synthetic coding sequence
  source 1..564: mol_type = other DNA

SEQ ID NO: 174543 - DNA, 564 bp, synthetic construct; identical to SEQ ID NO: 174540
  misc_feature 1..564: note = Description of Artificial Sequence: Synthetic coding sequence
  source 1..564: mol_type = other DNA

SEQ ID NO: 174544 - DNA, 564 bp, synthetic construct; identical to SEQ ID NO: 174541
  misc_feature 1..564: note = Description of Artificial Sequence: Synthetic coding sequence
  source 1..564: mol_type = other DNA

SEQ ID NO: 174545 - DNA, 414 bp, synthetic construct
  misc_feature 1..414: note = Description of Artificial Sequence: Synthetic coding sequence
  source 1..414: mol_type = other DNA
atgcctgaggtggagaggaagcccaagatcacagccagcaggaagctgctgctgaagagcctgatgctggccaaggccaaggagtgctgggagcaggagcacgaggagcgggaggccgagaaggtgcgctacctggccgagcgcatccccaccctgcagacccggggcctgagcctgagcgccctgcaggacctgtgccgggagctgcacgccaaggtggaggtggtggatgaggagagatatgacatcgaggccaagtgcctgcacaacacccgggagatcaaggacctgaagctgaaggtgatggacctgcggggcaagttcaagaggcctcccctgcggcgggtgcgggtgtctgcagatgccatgctgcgggccctgctgggcagcaagcacaaggtgtccatggactag

SEQ ID NO: 174546 - DNA, 549 bp, synthetic construct
  misc_feature 1..549: note = Description of Artificial Sequence: Synthetic coding sequence
  source 1..549: mol_type = other DNA
atgagccagtgcaagaagaggaacagagccatcacagcccggcggcagcacctgaagtctgtgatgctgcagattgctgccacagagctggagaaggaggagagccggcgggaggccgagaagcagaactacctggccgagcactgcccccccctgcacatccctggctccatgtctgaggtgcaggagctgtgcaagcagctgcacgccaagattgatgctgctgaggaggagaagtatgacatggaggtgcgggtgcagaagaccagcaaggagctggaggacatgaaccagaagctgtttgacctgcggggcaagttcaagaggcctcccctgcggcgggtgaggatgtctgcagatgccatgctgaaggccctgctgggcagcaagcacaaggtgtgcatggacctgcgggccaacctgaagcaggtgaagaaggaggacacagagaaggagcgggacctgagagatgtgggggactggaggaagaacatcgaggagaagagcggcatggagggcaggaagaagatgtttgagagcgagagctag

SEQ ID NO: 174547 - DNA, 549 bp, synthetic construct
  misc_feature 1..549: note = Description of Artificial Sequence: Synthetic coding sequence
  source 1..549: mol_type = other DNA
atgggagatgaggagaagaggaacagagccatcacagcccggcggcagcacctgaagtctgtgatgctgcagattgctgccacagagctggagaaggaggagagccggcgggaggccgagaagcagaactacctggccgagcactgcccccccctgcacatccctggctccatgtctgaggtgcaggagctgtgcaagcagctgcacgccaagattgatgctgctgaggaggagaagtatgacatggaggtgcgggtgcagaagaccagcaaggagctggaggacatgaaccagaagctgtttgacctgcggggcaagttcaagaggcctcccctgcggcgggtgaggatgtctgcagatgccatgctgaaggccctgctgggcagcaagcacaaggtgtgcatggacctgcgggccaacctgaagcaggtgaagaaggaggacacagagaaggagcgggacctgagagatgtgggggactggaggaagaacatcgaggagaagagcggcatggagggcaggaagaagatgtttgagagcgagagctag

SEQ ID NO: 174548 - DNA, 549 bp, synthetic construct; identical to SEQ ID NO: 174547
  misc_feature 1..549: note = Description of Artificial Sequence: Synthetic coding sequence
  source 1..549: mol_type = other DNA

SEQ ID NO: 174549 - DNA, 549 bp, synthetic construct; identical to SEQ ID NO: 174547
  misc_feature 1..549: note = Description of Artificial Sequence: Synthetic coding sequence
  source 1..549: mol_type = other DNA

SEQ ID NO: 174550 - DNA, 633 bp, synthetic construct
  misc_feature 1..633: note = Description of Artificial Sequence: Synthetic coding sequence
  source 1..633: mol_type = other DNA
atggctgatggcagcagtgatgctgcccgggagcccaggcctgccccagcccccatcagaagaagaagcagcaactaccgggcctatgccacagagccccacgccaagaagaagagcaagatcagcgccagcaggaagctgcagctgaagaccctgctgctgcagatcgccaagcaggagctggagcgggaggccgaggagcggcggggggagaagggccgggccctgagcacccgctgccagcccctggagctggccggcctgggctttgctgagctgcaggacctgtgccggcagctgcacgcccgggtggacaaggtggatgaggagagatatgacatcgaggccaaggtgaccaagaacatcacagaaattgctgacctgacccagaagatctttgacctgcggggcaagttcaagaggcccaccctgcggcgggtgcgcatctctgcagatgccatgatgcaggccctgctgggcgcccgggccaaggagagcctggacctgcgggcccacctgaagcaggtgaagaaggaggacacagagaaggagaaccgggaggtgggggactggaggaagaacattgatgccctgagcggcatggagggcaggaagaagaagtttgagagctag

SEQ ID NO: 174551 - DNA, 837 bp, synthetic construct
  misc_feature 1..837: note = Description of Artificial Sequence: Synthetic coding sequence
  source 1..837: mol_type = other DNA
atgtctgacacagaggagcaggagtatgaggaggagcagcctgaggaggaggccgctgaggaggaggaggaggcccctgaggagcctgagcctgtggccgagcctgaggaggagcggcccaagcccagcaggcctgtggtgcccccactcatcccccccaagatccctgagggggagcgggtggactttgatgacatccacaggaagaggatggagaaggacctgctggagctgcagaccctgattgatgtgcactttgagcagaggaagaaggaggaggaggagctggtggccctgaaggagagaattgaaagaagaagaagtgaaagagctgagcagcagcgcttcagaacagagaaggagcgggagcggcaggccaagctggccgaggagaagatgaggaaggaggaggaggaggccaagaagagagcagaagatgatgccaagaagaagaaggtgctgagcaacatgggcgcccactttggaggctacctggtgaaggccgagcagaagaggggcaagaggcagacaggccgggagatgaaggtgcgcatcctgtctgagaggaagaagcccctggacatcgactacatgggagaggagcagctgcgggcccggagcgcctggctgccccccagccagcccagctgcccagcccgggagaaggcccaggagctgagtgactggatccaccagctggagagcgagaagtttgacctgatggccaagctgaagcagcagaagtatgagatcaacgtgctgtacaaccgcatcagccacgcccagaagttcaggaagggggccggcaagggccgggtgggcggccgctggaagtag

SEQ ID NO: 174552 - DNA, 837 bp, synthetic construct; identical to SEQ ID NO: 174551
  misc_feature 1..837: note = Description of Artificial Sequence: Synthetic coding sequence
  source 1..837: mol_type = other DNA

SEQ ID NO: 174553 - DNA, 756 bp, synthetic construct
  misc_feature 1..756: note = Description of Artificial Sequence: Synthetic coding sequence
  source 1..756: mol_type = other DNA
atgtctgacacagaggagcaggagtatgaggaggagcagcctgaggaggaggccgctgaggaggaggaggaggaggaggagcggcccaagcccagcaggcctgtggtgcccccactcatcccccccaagatccctgagggggagcgggtggactttgatgacatccacaggaagaggatggagaaggacctgctggagctgcagaccctgattgatgtgcactttgagcagaggaagaaggaggaggaggagctggtggccctgaaggagcgcatcgagaggagaagaagtgagcgggcagagcagcagcgcttcagaacagagaaggagcgggagcggcaggccaagctggccgaggagaagatgaggaaggaggaggaggaggccaagaagagagcagaagatgatgccaagaagaagaaggtgctgagcaacatgggcgcccactttggaggctacctggtgaaggccgagcagaagaggggcaagaggcagacaggccgggagatgaaggtgcgcatcctgtctgagaggaagaagcccctggacatcgactacatgggagaggagcagctgcgggagaaggcccaggagctgagtgactggatccaccagctggagagcgagaagtttgacctgatggccaagctgaagcagcagaagtatgagatcaacgtgctgtacaaccgcatcagccacgcccagaagttcagaaaaggagctgggaagggccgggtgggcggccgctggaagtag

SEQ ID NO: 174554 - DNA, 522 bp, synthetic construct
  misc_feature 1..522: note = Description of Artificial Sequence: Synthetic coding sequence
  source 1..522: mol_type = other DNA
agcaaggcccagccccaggacagccagcacctgcggcacagcctgggccgcaccaggatgtctgacacagaggagcaggagtatgaggaggagcagcctgaggaggaggccgctgaggaggaggaggagggggaggtgcctgattctgctgaggaggagcggcccaagcccagcaggcctgtggtgcccccactcatcccccccaagatccctgagggggagcgggtggactttgatgacatccacaggaagaggatggagaaggacctgctggagctgcagaccctgattgatgtgcactttgagcagaggaagaaggaggaggaggagctggtggccctgaaggagcgcatcgagaggagaagaagtgagcgggcagagcagcagcgcttcagaacagagaaggagcgggagcggcaggccaagctggccgaggagaagatgaggaaggaggaggaggaggccaagaagagagcagaagatgatgccaagaagaagaagaagaagaagaagaagaagtag

SEQ ID NO: 174555 - DNA, 756 bp, synthetic construct
  misc_feature 1..756: note = Description of Artificial Sequence: Synthetic coding sequence
  source 1..756: mol_type = other DNA
atgtctgacacagaggagcaggagtatgaggaggagcagcctgaggaggaggccgctgaggaggaggaggaggcccctgaggagcctgagcctgtgcggcctgtggtgcccccactcatcccccccaagatccctgagggggagcgggtggactttgatgacatccacaggaagaggatggagaaggacctgctggagctgcagaccctgattgatgtgcactttgagcagaggaagaaggaggaggaggagctggtggccctgaaggagcgcatcgagaggagaagaagtgagcgggcagagcagcagcgcttcagaacagagaaggagcgggagcggcaggccaagctggccgaggagaagatgaggaaggaggaggaggaggccaagaagagagcagaagatgatgccaagaagaagaaggtgctgagcaacatgggcgcccactttggaggctacctggtgaaggccgagcagaagaggggcaagaggcagacaggccgggagatgaaggtgcgcatcctgtctgagaggaagaagcccctggacatcgactacatgggagaggagcagctgcgggagaaggcccaggagctgagtgactggatccaccagctggagagcgagaagtttgacctgatggccaagctgaagcagcagaagtatgagatcaacgtgctgtacaaccgcatcagccacgcccagaagttcagaaaaggagctgggaagggccgggtgggcggccgctggaagtag

SEQ ID NO: 174556 - DNA, 579 bp, synthetic construct
  misc_feature 1..579: note = Description of Artificial Sequence: Synthetic coding sequence
  source 1..579: mol_type = other DNA
atggagaaggacctgctggagctgcagaccctgattgatgtgcactttgagcagaggaagaaggaggaggaggagctggtggccctgaaggagagaattgaaagaagaagaagtgaaagagctgagcagcagcgcttcagaacagagaaggagcgggagcggcaggccaagctggccgaggagaagatgaggaaggaggaggaggaggccaagaagagagcagaagatgatgccaagaagaagaaggtgctgagcaacatgggcgcccactttggaggctacctggtgaaggccgagcagaagaggggcaagaggcagacaggccgggagatgaaggtgcgcatcctgtctgagaggaagaagcccctggacatcgactacatgggagaggagcagctgcgggagaaggcccaggagctgagtgactggatccaccagctggagagcgagaagtttgacctgatggccaagctgaagcagcagaagtatgagatcaacgtgctgtacaaccgcatcagccacgcccagaagttcaggaagggggccggcaagggccgggtgggcggccgctggaagtag

SEQ ID NO: 174557 - DNA, 882 bp, synthetic construct
  misc_feature 1..882: note = Description of Artificial Sequence: Synthetic coding sequence
  source 1..882: mol_type = other DNA
atgtctgacatcgaggaggtggtggaggagtatgaggaggagcaccctgaggaggaggaggactggagagaagatgaagatgagcaggaggaggccgcagaagaagatgctgaggccgaggccgagacagaggagaccagggctgaggaggatgaggaggaggaggaggccaaggaggctgaagatggccccatggaggagagcaagcccaagcccaggagcttcatgcccaacctggtgccccccaagatcccagatggagagcgggtggactttgatgacatccacaggaagaggatggagaaggacctgaatgagctgcaggccctgattgaggcccactttgagaacaggaagaaggaggaggaggagctggtgtccctgaaggaccgcatcgagaggagaagagctgagcgggcagagcagcagaggatcagaaatgaaagagagaaggagcggcagaaccggctggccgaggagcgggcccggcgggaggaggaggagaacagaaggaaggccgaggatgaggccaggaagaagaaggccctgagcaacatgatgcactttggaggctacatccagaagcaggcccagacagagaggaagagcggcaagaggcagacagagcgggagaagaagaagaagatcctggccgagaggaggaaggtgctggccatcgaccacctgaatgaagaccagctgcgggagaaggccaaggagctgtggcagagcatctacaacctggaggccgagaagtttgacctgcaggagaagttcaagcagcagaagtatgagatcaacgtgctgaggaaccgcatcaatgacaaccagaaggtgtccaagacccggggcaaggccaaggtgacaggccgctggaagtag

SEQ ID NO: 174558 - DNA, 600 bp, synthetic construct
  misc_feature 1..600: note = Description of Artificial Sequence: Synthetic coding sequence
  source 1..600: mol_type = other DNA
atgtctgacatcgaggaggtggtggaggagtatgaggaggagatggccgccccccagcaccaggaggaggccgcagaagaagatgctgaggccgaggccgagacagaggagaccagggcagaagatgaggaggaggaggaggccaaggaggccgaggatggccccatggaggagagcaagcccaagcccaggagcttcatgcccaacctggtgccccccaagatcccagatggagagcgggtggactttgatgacatccacaggaagaggatggagaaggacctgaatgagctgcaggccctgattgaggcccactttgaaaataggaagaaggaggaggaggagctggtgtccctgaaggacagaattgaaagaagaagagctgagagagctgagcagcagaggatcagaaatgaaagagagaaggagcggcagaaccggctggccgaggagcgggcccggcgggaggaggaggagaacagaaggaaggcagaagatgaggccaggaagaagaaggccctgagcaacatgatgcactttggaggctacatccagaagcaccccccagacagagctgagaagtgggaggaggccgactag

SEQ ID NO: 174559 - DNA, 852 bp, synthetic construct
  misc_feature 1..852: note = Description of Artificial Sequence: Synthetic coding sequence
  source 1..852: mol_type = other DNA
atgtctgacatcgaggaggtggtggaggagtatgaggaggaggccaagctggagcaggaggaggccgcagaagaagatgctgaggccgaggccgagacagaggagaccagggctgaggaggatgaggaggaggaggaggccaaggaggctgaagatggccccatggaggagagcaagcccaagcccaggagcttcatgcccaacctggtgccccccaagatcccagatggagagcgggtggactttgatgacatccacaggaagaggatggagaaggacctgaatgagctgcaggccctgattgaggcccactttgagaacaggaagaaggaggaggaggagctggtgtccctgaaggaccgcatcgagaggagaagagctgagcgggcagagcagcagaggatcagaaatgaaagagagaaggagcggcagaaccggctggccgaggagcgggcccggcgggaggaggaggagaacagaaggaaggccgaggatgaggccaggaagaagaaggccctgagcaacatgatgcactttggaggctacatccagaagcaggcccagacagagaggaagagcggcaagaggcagacagagcgggagaagaagaagaagatcctggccgagaggaggaaggtgctggccatcgaccacctgaatgaagaccagctgcgggagaaggccaaggagctgtggcagagcatctacaacctggaggccgagaagtttgacctgcaggagaagttcaagcagcagaagtatgagatcaacgtgctgaggaaccgcatcaatgacaaccagaaggtgtccaagacccggggcaaggccaaggtgacaggccgctggaagtag

SEQ ID NO: 174560 - DNA, 858 bp, synthetic construct
  misc_feature 1..858: note = Description of Artificial Sequence: Synthetic coding sequence
  source 1..858: mol_type = other DNA
atgtctgacatcgaggaggtggtggaggagtatgaggaggaggagcaggaggaggccgctgtggaggagcaggaggaggccgctgaggaggatgctgaggccgaggccgagacagaggagaccagggcagaagaagatgaggaggaggaggaggccaaggaggccgaggatggccccatggaggagagcaagcccaagcccaggagcttcatgcccaacctggtgccccccaagatcccagatggagagcgggtggactttgatgacatccacaggaagaggatggagaaggacctgaatgagctgcaggccctgattgaggcccactttgaaaataggaagaaggaggaggaggagctggtgtccctgaaggacagaattgaaagaagaagagctgagagagctgagcagcagaggatcagaaatgaaagagagaaggagcggcagaaccggctggccgaggagcgggcccggcgggaggaggaggagaacagaaggaaggcagaagatgaggccaggaagaagaaggccctgagcaacatgatgcactttggaggctacatccagaagacagagaggaagagcggcaagaggcagacagagcgggagaagaagaagaagatcctggccgagaggaggaaggtgctggccatcgaccacctgaatgaagaccagctgcgggagaaggccaaggagctgtggcagagcatctacaacctggaggccgagaagtttgacctgcaggagaagttcaagcagcagaagtatgagatcaacgtgctgaggaaccgcatcaatgacaaccagaaggtgtccaagacccggggcaaggccaaggtgacaggccgctggaagtag

SEQ ID NO: 174561 - DNA, 867 bp, synthetic construct
  misc_feature 1..867: note = Description of Artificial Sequence: Synthetic coding sequence
  source 1..867: mol_type = other DNA
atgtctgacatcgaggaggtggtggaggagtatgaggaggaggagcaggaggaggccgctgtggaggagcaggaggaggccgctgaggaggatgctgaggccgaggccgagacagaggagaccagggcagaagaagatgaggaggaggaggaggccaaggaggccgaggatggccccatggaggagagcaagcccaagcccaggagcttcatgcccaacctggtgccccccaagatcccagatggagagcgggtggactttgatgacatccacaggaagaggatggagaaggacctgaatgagctgcaggccctgattgaggcccactttgaaaataggaagaaggaggaggaggagctggtgtccctgaaggacagaattgaaagaagaagagctgagagagctgagcagcagaggatcagaaatgaaagagagaaggagcggcagaaccggctggccgaggagcgggcccggcgggaggaggaggagaacagaaggaaggcagaagatgaggccaggaagaagaaggccctgagcaacatgatgcactttggaggctacatccagaagcaggcccagacagagaggaagagcggcaagaggcagacagagcgggagaagaagaagaagatcctggccgagaggaggaaggtgctggccatcgaccacctgaatgaagaccagctgcgggagaaggccaaggagctgtggcagagcatctacaacctggaggccgagaagtttgacctgcaggagaagttcaagcagcagaagtatgagatcaacgtgctgaggaaccgcatcaatgacaaccagaaggtgtccaagacccggggcaaggccaaggtgacaggccgctggaagtag

SEQ ID NO: 174562 - DNA, 867 bp, synthetic construct; identical to SEQ ID NO: 174561
  misc_feature 1..867: note = Description of Artificial Sequence: Synthetic coding sequence
  source 1..867: mol_type = other DNA

SEQ ID NO: 174563 - DNA, 681 bp, synthetic construct
  misc_feature 1..681: note = Description of Artificial Sequence: Synthetic coding sequence
  source 1..681: mol_type = other DNA
atggaggagagcaagcccaagcccaggagcttcatgcccaacctggtgccccccaagatcccagatggagagcgggtggactttgatgacatccacaggaagaggatggagaaggacctgaatgagctgcaggccctgattgaggcccactttgagaacaggaagaaggaggaggaggagctggtgtccctgaaggaccgcatcgagaggagaagagctgagcgggcagagcagcagaggatcagaaatgaaagagagaaggagcggcagaaccggctggccgaggagcgggcccggcgggaggaggaggagaacagaaggaaggccgaggatgaggccaggaagaagaaggccctgagcaacatgatgcactttggaggctacatccagaagacagagaggaagagcggcaagaggcagacagagcgggagaagaagaagaagatcctggccgagaggaggaaggtgctggccatcgaccacctgaatgaagaccagctgcgggagaaggccaaggagctgtggcagagcatctacaacctggaggccgagaagtttgacctgcaggagaagttcaagcagcagaagtatgagatcaacgtgctgaggaaccgcatcaatgacaaccagaaggtgtccaagacccggggcaaggccaaggtgacaggccgctggaagtag

SEQ ID NO: 174564 - DNA, 858 bp, synthetic construct; identical to SEQ ID NO: 174560
  misc_feature 1..858: note = Description of Artificial Sequence: Synthetic coding sequence
  source 1..858: mol_type = other DNA

SEQ ID NO: 174565 - DNA, 876 bp, synthetic construct
  misc_feature 1..876: note = Description of Artificial Sequence: Synthetic coding sequence
  source 1..876: mol_type = other DNA
atgtctgacatcgaggaggtggtggaggagtatgaggaggagtacctggagcacgccgaggccgctgtggaggagcaggaggaggccgctgaggaggatgctgaggccgaggccgagacagaggagaccagggcagaagaagatgaggaggaggaggaggccaaggaggccgaggatggccccatggaggagagcaagcccaagcccaggagcttcatgcccaacctggtgccccccaagatcccagatggagagcgggtggactttgatgacatccacaggaagaggatggagaaggacctgaatgagctgcaggccctgattgaggcccactttgaaaataggaagaaggaggaggaggagctggtgtccctgaaggacagaattgaaagaagaagagctgagagagctgagcagcagaggatcagaaatgaaagagagaaggagcggcagaaccggctggccgaggagcgggcccggcgggaggaggaggagaacagaaggaaggcagaagatgaggccaggaagaagaaggccctgagcaacatgatgcactttggaggctacatccagaagcacaccctgcagacagagaggaagagcggcaagaggcagacagagcgggagaagaagaagaagatcctggccgagaggaggaaggtgctggccatcgaccacctgaatgaagaccagctgcgggagaaggccaaggagctgtggcagagcatctacaacctggaggccgagaagtttgacctgcaggagaagttcaagcagcagaagtatgagatcaacgtgctgaggaaccgcatcaatgacaaccagaaggtgtccaagacccggggcaaggccaaggtgacaggccgctggaagtag

SEQ ID NO: 174566 - DNA, 894 bp, synthetic construct
  misc_feature 1..894: note = Description of Artificial Sequence: Synthetic coding sequence
  source 1..894: mol_type = other DNA
atgtctgacatcgaggaggtggtggaggagtatgaggaggagtacctggagcacgccgaggccgctgtggaggaggaggaggactggagagaagatgaagatgagcaggaggaggccgctgaggaggatgctgaggccgaggccgagacagaggagaccagggcagaagaagatgaggaggaggaggaggccaaggaggccgaggatggccccatggaggagagcaagcccaagcccaggagcttcatgcccaacctggtgccccccaagatcccagatggagagcgggtggactttgatgacatccacaggaagaggatggagaaggacctgaatgagctgcaggccctgattgaggcccactttgaaaataggaagaaggaggaggaggagctggtgtccctgaaggacagaattgaaagaagaagagctgagagagctgagcagcagaggatcagaaatgaaagagagaaggagcggcagaaccggctggccgaggagcgggcccggcgggaggaggaggagaacagaaggaaggcagaagatgaggccaggaagaagaaggccctgagcaacatgatgcactttggaggctacatccagaagacagagaggaagagcggcaagaggcagacagagcgggagaagaagaagaagatcctggccgagaggaggaaggtgctggccatcgaccacctgaatgaagaccagctgcgggagaaggccaaggagctgtggcagagcatctacaacctggaggccgagaagtttgacctgcaggagaagttcaagcagcagaagtatgagatcaacgtgctgaggaaccgcatcaatgacaaccagaaggtgtccaagacccggggcaaggccaaggtgacaggccgctggaagtag

SEQ ID NO: 174567 - DNA, 867 bp, synthetic construct; identical to SEQ ID NO: 174561
  misc_feature 1..867: note = Description of Artificial Sequence: Synthetic coding sequence
  source 1..867: mol_type = other DNA

SEQ ID NO: 174568 - DNA, 771 bp, synthetic construct
  misc_feature 1..771: note = Description of Artificial Sequence: Synthetic coding sequence
  source 1..771: mol_type = other DNA
atgtctgatgaggaggtggagcaggtggaggagcagtatgaggaggaggaggaggcccaggaggaggccgctgaggtgcatgaggaggtgcatgagcctgaggagaagccccggcccaagctgacagcccccaagatccctgagggggagaaggtggactttgatgacatccagaagaagaggcagaacaaggacctgatggagctgcaggccctgattgacagccactttgaggccaggaagaaggaggaggaggagctggtggccctgaaggagcgcatcgagaagagaagagctgagcgggcagagcagcagaggatccgggcagagaaggagcgggagcggcagaaccggctggccgaggagaaggcccggcgggaggaggaggatgccaagagaagagcagaagatgacctgaagaagaagaaggccctgagctccatgggcgccaactacagcagctacctggccaaggctgaccagaagaggggcaagaagcagacagcccgggagatgaagaagaagatcctggccgagaggaggaagcccctgaacatcgaccacctgggggaggacaagctgcgggacaaggccaaggagctgtgggagaccctgcaccagctggagattgacaagtttgaatttggagagaagctgaagaggcagaagtatgacatcaccaccctgcggagcagaattgaccaggcccagaagcacagcaagaaggccggcaccccagccaagggcaaggtgggcggccgctggaagtag

SEQ ID NO: 174569 - DNA, 777 bp, synthetic construct
  misc_feature 1..777: note = Description of Artificial Sequence: Synthetic coding sequence
  source 1..777: mol_type = other DNA
atgtctgatgaggaggtggagcaggtggaggagcagtatgaggaggaggaggaggcccaggaggaggaggaggtgcaggaggacacagctgaggaggatgctgaggaggagaagccccggcccaagctgacagcccccaagatccctgagggggagaaggtggactttgatgacatccagaagaagaggcagaacaaggacctgatggagctgcaggccctgattgacagccactttgaggccaggaagaaggaggaggaggagctggtggccctgaaggagcgcatcgagaagagaagagctgagcgggcagagcagcagaggatccgggcagagaaggagcgggagcggcagaaccggctggccgaggagaaggcccggcgggaggaggaggatgccaagagaagagcagaagatgacctgaagaagaagaaggccctgagctccatgggcgccaactacagcagctacctggccaaggctgaccagaagaggggcaagaagcagacagcccgggagatgaagaagaagatcctggccgagaggaggaagcccctgaacatcgaccacctgggggaggacaagctgcgggacaaggccaaggagctgtgggagaccctgcaccagctggagattgacaagtttgaatttggagagaagctgaagaggcagaagtatgacatcaccaccctgcggagcagaattgaccaggcccagaagcacagcaagaaggccggcaccccagccaagggcaaggtgggcggccgctggaagtag

SEQ ID NO: 174570 - DNA, 738 bp, synthetic construct
  misc_feature 1..738: note = Description of Artificial Sequence: Synthetic coding sequence
  source 1..738: mol_type = other DNA
atgtctgatgaggaggtggagcaggtggaggagcagtatgaggaggaggaggaggcccaggaggaggaggagaagccccggcccaagctgacagcccccaagatccctgagggggagaaggtggactttgatgacatccagaagaagaggcagaacaaggacctgatggagctgcaggccctgattgacagccactttgaggccaggaagaaggaggaggaggagctggtggccctgaaggagagaattgagaagagaagagctgagagagctgagcagcagaggatccgggcagagaaggagcgggagcggcagaaccggctggccgaggagaaggcccggcgggaggaggaggatgccaagagaagagcagaagatgacctgaagaagaagaaggccctgagctccatgggcgccaactacagcagctacctggccaaggctgaccagaagaggggcaagaagcagacagcccgggagatgaagaagaagatcctggccgagaggaggaagcccctgaacatcgaccacctgggggaggacaagctgcgggacaaggccaaggagctgtgggagaccctgcaccagctggagattgacaagtttgaatttggagagaagctgaagaggcagaagtatgacatcaccaccctgcggagcagaattgaccaggcccagaagcacagcaagaaggccggcaccccagccaagggcaaggtgggcggccgctggaagtag

SEQ ID NO: 174571 - DNA, 759 bp, synthetic construct
  misc_feature 1..759: note = Description of Artificial Sequence: Synthetic coding sequence
  source 1..759: mol_type = other DNA
atgtctgatgaggaggtggagcaggtggaggagcagtatgaggaggaggaggaggcccaggaggaggccgctgaggtgcatgaggaggaggagaagccccggcccaagctgacagcccccaagatccctgagggggagaaggtggactttgatgacatccagaagaagaggcagaacaaggacctgatggagctgcaggccctgattgacagccactttgaggccaggaagaaggaggaggaggagctggtggccctgaaggagcgcatcgagaagagaagagctgagcgggcagagcagcagaggatccgggcagagaaggagcgggagcggcagaaccggctggccgaggagaaggcccggcgggaggaggaggatgccaagagaagagcagaagatgacctgaagaagaagaaggccctgagctccatgggcgccaactacagcagctacctggccaaggctgaccagaagaggggcaagaagcagacagcccgggagatgaagaagaagatcctggccgagaggaggaagcccctgaacatcgaccacctgggggaggacaagctgcgggacaaggccaaggagctgtgggagaccctgcaccagctggagattgacaagtttgaatttggagagaagctgaagaggcagaagtatgacatcatgaatgtgcgggcccgggtgcagatgctggccaagttcagcaagaaggccggcaccccagccaagggcaaggtgggcggccgctggaagtag

SEQ ID NO: 174572 - DNA, 783 bp, synthetic construct
  misc_feature 1..783: note = Description of Artificial Sequence: Synthetic coding sequence
  source 1..783: mol_type = other DNA
atgtctgatgaggaggtggagcaggtggaggagcagtatgaggaggaggaggaggcccaggaggaggccgctgaggtgcatgaggaggacacagctgaggaggatgctgaggaggagaagccccggcccaagctgacagcccccaagatccctgagggggagaaggtggactttgatgacatccagaagaagaggcagaacaaggacctgatggagctgcaggccctgattgacagccactttgaggccaggaagaaggaggaggaggagctggtggccctgaaggagcgcatcgagaagagaagagctgagcgggcagagcagcagaggatccgggcagagaaggagcgggagcggcagaaccggctggccgaggagaaggcccggcgggaggaggaggatgccaagagaagagcagaagatgacctgaagaagaagaaggccctgagctccatgggcgccaactacagcagctacctggccaaggctgaccagaagaggggcaagaagcagacagcccgggagatgaagaagaagatcctggccgagaggaggaagcccctgaacatcgaccacctgggggaggacaagctgcgggacaaggccaaggagctgtgggagaccctgcaccagctggagattgacaagtttgaatttggagagaagctgaagaggcagaagtatgacatcaccaccctgcggagcagaattgaccaggcccagaagcacagcaagaaggccggcaccccagccaagggcaaggtgggcggccgctggaagtag

SEQ ID NO: 174573 - DNA, 753 bp, synthetic construct
  misc_feature 1..753: note = Description of Artificial Sequence: Synthetic coding sequence
  source 1..753: mol_type = other DNA
atgtctgatgaggaggtggagcaggtggaggagcagtatgaggaggaggaggaggcccaggaggaggaggaggtgcaggaggaggagaagccccggcccaagctgacagcccccaagatccctgagggggagaaggtggactttgatgacatccagaagaagaggcagaacaaggacctgatggagctgcaggccctgattgacagccactttgaggccaggaagaaggaggaggaggagctggtggccctgaaggagcgcatcgagaagagaagagctgagcgggcagagcagcagaggatccgggcagagaaggagcgggagcggcagaaccggctggccgaggagaaggcccggcgggaggaggaggatgccaagagaagagcagaagatgacctgaagaagaagaaggccctgagctccatgggcgccaactacagcagctacctggccaaggctgaccagaagaggggcaagaagcagacagcccgggagatgaagaagaagatcctggccgagaggaggaagcccctgaacatcgaccacctgggggaggacaagctgcgggacaaggccaaggagctgtgggagaccctgcaccagctggagattgacaagtttgaatttggagagaagctgaagaggcagaagtatgacatcaccaccctgcggagcagaattgaccaggcccagaagcacagcaagaaggccggcaccccagccaagggcaaggtgggcggccgctggaagtag

SEQ ID NO: 174574 - DNA, 786 bp, synthetic construct
  misc_feature 1..786: note = Description of Artificial Sequence: Synthetic coding sequence
  source 1..786: mol_type = other DNA
atgtctgatgaggaggtggagcaggtggaggagcagtatgaggaggaggaggaggcccaggaggaggccgctgaggtgcatgaggagggcatgaggacccaggacttcttccacgaggagaagccccggcccaagctgacagcccccaagatccctgagggggagaaggtggactttgatgacatccagaagaagaggcagaacaaggacctgatggagctgcaggccctgattgacagccactttgaggccaggaagaaggaggaggaggagctggtggccctgaaggagagaattgagaagagaagagctgagagagctgagcagcagaggatccgggcagagaaggagcgggagcggcagaaccggctggccgaggagaaggcccggcgggaggaggaggatgccaagagaagagcagaagatgacctgaagaagaagaaggccctgagctccatgggcgccaactacagcagctacctggccaaggctgaccagaagaggggcaagaagcagacagcccgggagatgaagaagaagatcctggccgagaggaggaagcccctgaacatcgaccacctgggggaggacaagctgcgggacaaggccaaggagctgtgggagaccctgcaccagctggagattgacaagtttgaatttggagagaagctgaagaggcagaagtatgacatcaccaccctgcggagcagaattgaccaggcccagaagcacagcaagaaggccggcaccccagccaagggcaaggtgggcggccgctggaagtag

SEQ ID NO: 174575 - DNA, 786 bp, synthetic construct
  misc_feature 1..786: note = Description of Artificial Sequence: Synthetic coding sequence
  source 1..786: mol_type = other DNA
atgtctgatgaggaggtggagcaggtggaggagcagtatgaggaggaggaggaggcccaggaggaggccgctgaggtgcatgaggaggtgcatgagcctgaggaggtgcaggaggaggagaagccccggcccaagctgacagcccccaagatccctgagggggagaaggtggactttgatgacatccagaagaagaggcagaacaaggacctgatggagctgcaggccctgattgacagccactttgaggccaggaagaaggaggaggaggagctggtggccctgaaggagagaattgagaagagaagagctgagagagctgagcagcagaggatccgggcagagaaggagcgggagcggcagaaccggctggccgaggagaaggcccggcgggaggaggaggatgccaagagaagagcagaagatgacctgaagaagaagaaggccctgagctccatgggcgccaactacagcagctacctggccaaggctgaccagaagaggggcaagaagcagacagcccgggagatgaagaagaagatcctggccgagaggaggaagcccctgaacatcgaccacctgggggaggacaagctgcgggacaaggccaaggagctgtgggagaccctgcaccagctggagattgacaagtttgaatttggagagaagctgaagaggcagaagtatgacatcaccaccctgcggagcagaattgaccaggcccagaagcacagcaagaaggccggcaccccagccaagggcaaggtgggcggccgctggaagtag

SEQ ID NO: 174576 - DNA, 753 bp, synthetic construct
  misc_feature 1..753: note = Description of Artificial Sequence: Synthetic coding sequence
  source 1..753: mol_type = other DNA
atgtctgatgaggaggtggagcaggtggaggagcagtatgaggaggaggaggaggcccaggaggaggaggaggtgcaggaggaggagaagccccggcccaagctgacagcccccaagatccctgagggggagaaggtggactttgatgacatccagaagaagaggcagaacaaggacctgatggagctgcaggccctgattgacagccactttgaggccaggaagaaggaggaggaggagctggtggccctgaaggagcgcatcgagaagagaagagctgagcgggcagagcagcagaggatccgggcagagaaggagcgggagcggcagaaccggctggccgaggagaaggcccggcgggaggaggaggatgccaagagaagagcagaagatgacctgaagaagaagaaggccctgagctccatgggcgccaactacagcagctacctggccaaggctgaccagaagaggggcaagaagcagacagcccgggagatgaagaagaagatcctggccgagaggaggaagcccctgaacatcgaccacctgggggaggacaagctgcgggacaaggccaaggagctgtgggagaccctgcaccagctggagattgacaagtttgaatttggagagaagctgaagaggcagaagtatgacatcatgaatgtgcgggcccgggtgcagatgctggccaagttcagcaagaaggccggcaccccagccaagggcaaggtgggcggccgctggaagtag

SEQ ID NO: 174577 - DNA, 810 bp, synthetic construct
  misc_feature 1..810: note = Description of Artificial Sequence: Synthetic coding sequence
  source 1..810: mol_type = other DNA
atgtctgatgaggaggtggagcaggtggaggagcagtatgaggaggaggaggaggcccaggaggaggccgctgaggtgcatgaggaggtgcatgagcctgaggaggtgcaggaggacacagcagaagaagatgctgaggaggagaagccccggcccaagctgacagcccccaagatccctgagggggagaaggtggactttgatgacatccagaagaagaggcagaacaaggacctgatggagctgcaggccctgattgacagccactttgaggccaggaagaaggaggaggaggagctggtggccctgaaggagagaattgagaagagaagagctgagagagctgagcagcagaggatccgggcagagaaggagcgggagcggcagaaccggctggccgaggagaaggcccggcgggaggaggaggatgccaagagaagagcagaagatgacctgaagaagaagaaggccctgagctccatgggcgccaactacagcagctacctggccaaggctgaccagaagaggggcaagaagcagacagcccgggagatgaagaagaagatcctggccgagaggaggaagcccctgaacatcgaccacctgggggaggacaagctgcgggacaaggccaaggagctgtgggagaccctgcaccagctggagattgacaagtttgaatttggagagaagctgaagaggcagaagtatgacatcaccaccctgcggagcagaattgaccaggcccagaagcacagcaagaaggccggcaccccagccaagggcaaggtgggcggccgctggaagtag

SEQ ID NO: 174578 - DNA, 813 bp, synthetic construct
  misc_feature 1..813: note = Description of Artificial Sequence: Synthetic coding sequence
  source 1..813: mol_type = other DNA
atgtctgatgaggaggtggagcaggtggaggagcagtatgaggaggaggaggaggcccaggaggaggccgctgaggtgcatgaggaggcccaccctggagaggagagcgtgcgggaggacacagctgaggaggatgctgaggaggagaagccccggcccaagctgacagcccccaagatccctgagggggagaaggtggactttgatgacatccagaagaagaggcagaacaaggacctgatggagctgcaggccctgattgacagccactttgaggccaggaagaaggaggaggaggagctggtggccctgaaggagcgcatcgagaagagaagagctgagcgggcagagcagcagaggatccgggcagagaaggagcgggagcggcagaaccggctggccgaggagaaggcccggcgggaggaggaggatgccaagagaagagcagaagatgacctgaagaagaagaaggccctgagctccatgggcgccaactacagcagctacctggccaaggctgaccagaagaggggcaagaagcagacagcccgggagatgaagaagaagatcctggccgagaggaggaagcccctgaacatcgaccacctgggggaggacaagctgcgggacaaggccaaggagctgtgggagaccctgcaccagctggagattgacaagtttgaatttggagagaagctgaagaggcagaagtatgacatcaccaccctgcggagcagaattgaccaggcccagaagcacagcaagaaggccggcaccccagccaagggcaaggtgggcggccgctggaagtag

SEQ ID NO: 174579 - DNA, 435 bp, synthetic construct
  misc_feature 1..435: note = Description of Artificial Sequence: Synthetic coding sequence
  source 1..435: mol_type = other DNA
atgtctgatgaggaggtggagcaggtggaggagcagtatgaggaggaggaggaggcccaggaggaggccgctgaggtgcatgaggaggagaggagagcagaagatgacctgaagaagaagaaggccctgagctccatgggcgccaactacagcagctacctggccaaggctgaccagaagaggggcaagaagcagacagcccgggagatgaagaagaagatcctggccgagaggaggaagcccctgaacatcgaccacctgggggaggacaagctgcgggacaaggccaaggagctgtgggagcccccccagagctgccagggcctgcctgacagccctgggggcggggaggccatccctggccggcccccccggctgtgcccctgctgcctgcaccccctgggccctgtgaacaaggctgctgagcccccatag

SEQ ID NO: 174580 - DNA, 1617 bp, synthetic construct
  misc_feature 1..1617: note = Description of Artificial Sequence: Synthetic coding sequence
  source 1..1617: mol_type = other DNA
atggaggagagcgtgaaccagatgcagcccctgaatgagaagcagatcgccaacagccaggacggctacgtgtggcaggtgacagacatgaaccggctgcaccgcttcctgtgctttggaagtgaaggaggcacctactacatcaaggagcagaagctgggcctggagaatgctgaggccctgatccggctgattgaagatggccggggctgtgaggtgatccaggagatcaagagcttcagccaggagggccgcaccaccaagcaggagcccatgctgtttgccctggccatctgcagccagtgcagcgacatcagcaccaagcaggccgccttcaaggctgtgtctgaggtgtgccgcatccccacccacctgttcaccttcatccagttcaagaaggacctgaaggagagcatgaagtgtggcatgtggggccgggccctgaggaaggccatcgctgactggtacaatgaaaaaggaggcatggccctggccctggccgtgaccaagtacaagcagagaaatggctggagccacaaggacctgctgcggctgagccacctgaagcccagcagcgagggcctggccatcgtgaccaagtacatcaccaagggctggaaggaggtgcatgagctgtacaaggagaaggccctgtctgtggagacagagaagctgctgaagtacctggaggccgtggagaaggtgaagaggaccagagatgagctggaggtgatccacctgattgaggagcaccggctggtgcgggagcacctgctgaccaaccacctgaagagcaaggaggtgtggaaggccctgctgcaggagatgcccctgacagccctgctgaggaacctgggcaagatgacagccaacagcgtgctggagcccggcaacagcgaggtgtccctggtgtgtgagaagctgtgcaatgagaagctgctgaagaaggcccgcatccaccccttccacatcctgattgccctggagacctacaagacaggccacggcctgcggggcaagctgaagtggaggccagatgaggagatcctgaaggccctggatgctgccttctacaagaccttcaagacagtggagcccaccgggaagcgcttcctgctggccgtggatgtgtctgcctccatgaaccagagggtgctgggcagcatcctgaatgccagcacagtggccgccgccatgtgcatggtggtgaccaggacagagaaggacagctatgtggtggccttcagtgatgagatggtgccctgccctgtgaccacagacatgaccctgcagcaggtgctgatggccatgagccagatcccagctgggggcacagactgcagcctgcccatgatctgggcccagaagaccaacaccccagcagatgtgttcatcgtgttcacagacaatgagacctttgctgggggcgtgcacccagccatcgccctgcgggagtacaggaagaagatggacatcccagccaagctgattgtgtgtggcatgaccagcaatggcttcaccatcgctgaccctgatgaccggggcatgctggacatgtgtggctttgacaccggggccctggatgtgatccggaacttcaccctggacatgatctag

SEQ ID NO: 174581 - DNA, 1557 bp, synthetic construct
  misc_feature 1..1557: note = Description of Artificial Sequence: Synthetic coding sequence
  source 1..1557: mol_type = other DNA
atggaggagagcgtgaaccagatgcagcccctgaatgagaagcagatcgccaacagccaggacggctacgtgtggcaggtgacagacatgaaccggctgcaccgcttcctgtgctttggaagtgaaggaggcacctactacatcaaggagcagaagctgggcctggagaatgctgaggccctgatccggctgattgaagatggccggggctgtgaggtgatccaggagatcaagagcttcagccaggagggccgcaccaccaagcaggagcccatgctgtttgccctggccatctgcagccagtgcagcgacatcagcaccaagcaggccgccttcaaggctgtgtctgaggtgtgccgcatccccacccacctgttcaccttcatccagttcaagaaggacctgaaggagagcatgaagtgtggcatgtggggccgggccctgaggaaggccatcgctgactggtacaatgaaaaaggaggcatggccctggccctggccgtgaccaagtacaagcagagaaatggctggagccacaaggacctgctgcggctgagccacctgaagcccagcagcgagggcctggccatcgtgaccaagtacatcaccaagggctggaaggaggtgcatgagctgtacaaggagaaggccctgtctgtggagacagagaagctgctgaagtacctggaggccgtggagaaggtgaagaggaccagagatgagctggaggtgatccacctgattgaggagcaccggctggtgcgggagcacctgctgaccaaccacctgaagagcaaggaggtgtggaaggccctgctgcaggagatgcccctgacagccctgctgaggaacctgggcaagatgacagccaacagcgtgctggagcccggcaacagcgaggtgtccctggtgtgtgagaagctgtgcaatgagaagctgctgaagaaggcccgcatccaccccttccacatcctgattgccctggagacctacaagacaggccacggcctgcggggcaagctgaagtggaggccagatgaggagatcctgaaggccctggatgctgccttctacaagaccttcaagacagtggagcccaccgggaagcgcttcctgctggccgtggatgtgtctgcctccatgaaccagagggtgctgggcagcatcctgaatgccagcacagtggccgccgccatgtgcatggtggtgaccaggacagagaaggacagctatgtggtggccttcagtgatgagatggtgccctgccctgtgaccacagacatgaccctgcagcaggtgctgatggccatgagccagatcccagctgggggcacagactgcagcctgcccatgatctgggcccagaagaccaacaccccagcagatgtgttcatcgtgttcacagacaatgagacctttgctgggggcgtgcacccagccatcgccctgcgggagtacaggaagaagatggacatcccagccaagctgattgtgtgtggcatgaccagcaatggcttcaccatcgctgaccctgatgaccgggacacagtgaagtag

SEQ ID NO: 174582 - DNA, 1578 bp, synthetic construct
  misc_feature 1..1578: note = Description of Artificial Sequence: Synthetic coding sequence
  source 1..1578: mol_type = other DNA
atggaggagagcgtgaaccagatgcagcccctgaatgagaagcagatcgccaacagccaggacggctacgtgtggcaggtgacagacatgaaccggctgcaccgcttcctgtgctttggaagtgaaggaggcacctactacatcaaggagcagaagctgggcctggagaatgctgaggccctgatccggctgattgaagatggccggggctgtgaggtgatccaggagatcaagagcttcagccaggagggccgcaccaccaagcaggagcccatgctgtttgccctggccatctgcagccagtgcagcgacatcagcaccaagcaggccgccttcaaggctgtgtctgaggtgtgccgcatccccacccacctgttcaccttcatccagttcaagaaggacctgaaggagagcatgaagtgtggcatgtggggccgggccctgaggaaggccatcgctgactggtacaatgaaaaaggaggcatggccctggccctggccgtgaccaagtacaagcagagaaatggctggagccacaaggacctgctgcggctgagccacctgaagcccagcagcgagggcctggccatcgtgaccaagtacatcaccaagggctggaaggaggtgcatgagctgtacaaggagaaggccctgtctgtggagacagagaagctgctgaagtacctggaggccgtggagaaggtgaagaggaccagagatgagctggaggtgatccacctgattgaggagcaccggctggtgcgggagcacctgctgaccaaccacctgaagagcaaggaggtgtggaaggccctgctgcaggagatgcccctgacagccctgctgaggaacctgggcaagatgacagccaacagcgtgctggagcccggcaacagcgaggtgtccctggtgtgtgagaagctgtgcaatgagaagctgctgaagaaggcccgcatccaccccttccacatcctgattgccctggagacctacaagacaggccacggcctgcggggcaagctgaagtggaggccagatgaggagatcctgaaggccctggatgctgccttctacaagaccttcaagacagtggagcccaccgggaagcgcttcctgctggccgtggatgtgtctgcctccatgaaccagagggtgctgggcagcatcctgaatgccagcacagtggccgccgccatgtgcatggtggtgaccaggacagagaaggacagctatgtggtggccttcagtgatgagatggtgccctgccctgtgaccacagacatgaccctgcagcaggtgctgatggccatgagccagatcccagctgggggcacagactgcagcctgcccatgatctgggcccagaagaccaacaccccagcagatgtgttcatcgtgttcacagacaatgagacctttgctgggggcgtgcacccagccatcgccctgcgggagtacaggaagaagatggacatcccagccaagctgattgtgtgtggcatgaccagcaatggcttcaccatcgctgaccctgatgaccgggccctgcagaacaccctgctgaacaagagcttctag

SEQ ID NO: 174583 - DNA, 1605 bp, synthetic construct
  misc_feature 1..1605: note = Description of Artificial Sequence: Synthetic coding sequence
  source 1..1605: mol_type = other DNA
atggaggagagcgtgaaccagatgcagcccctgaatgagaagcagatcgccaacagccaggacggctacgtgtggcaggtgacagacatgaaccggctgcaccgcttcctgtgctttggaagtgaaggaggcacctactacatcaaggagcagaagctgggcctggagaatgctgaggccctgatccggctgattgaagatggccggggctgtgaggtgatccaggagatcaagagcttcagccaggagggccgcaccaccaagcaggagcccatgctgtttgccctggccatctgcagccagtgcagcgacatcagcaccaagcaggccgccttcaaggctgtgtctgaggtgtgccgcatccccacccacctgttcaccttcatccagttcaagaaggacctgaaggagagcatgaagtgtggcatgtggggccgggccctgaggaaggccatcgctgactggtacaatgaaaaaggaggcatggccctggccctggccgtgaccaagtacaagcagagaaatggctggagccacaaggacctgctgcggctgagccacctgaagcccagcagcgagggcctggccatcgtgaccaagtacatcaccaagggctggaaggaggtgcatgagctgtacaaggagaaggccctgtctgtggagacagagaagctgctgaagtacctggaggccgtggagaaggtgaagaggaccagagatgagctggaggtgatccacctgattgaggagcaccggctggtgcgggagcacctgctgaccaaccacctgaagagcaaggaggtgtggaaggccctgctgcaggagatgcccctgacagccctgctgaggaacctgggcaagatgacagccaacagcgtgctggagcccggcaacagcgaggtgtccctggtgtgtgagaagctgtgcaatgagaagctgctgaagaaggcccgcatccaccccttccacatcctgattgccctggagacctacaagacaggccacggcctgcggggcaagctgaagtggaggccagatgaggagatcctgaaggccctggatgctgccttctacaagaccttcaagacagtggagcccaccgggaagcgcttcctgctggccgtggatgtgtctgcctccatgaaccagagggtgctgggcagcatcctgaatgccagcacagtggccgccgccatgtgcatggtggtgaccaggacagagaaggacagctatgtggtggccttcagtgatgagatggtgccctgccctgtgaccacagacatgaccctgcagcaggtgctgatggccatgagccagatcccagctgggggcacagactgcagcctgcccatgatctgggcccagaagaccaacaccccagcagatgtgttcatcgtgttcacagacaatgagacctttgctgggggcgtgcacccagccatcgccctgcgggagtacaggaagaagatggacatcccagccaagctgattgtgtgtggcatgaccagcaatggcttcaccatcgctgaccctgatgaccggggcatgctggacatgtgtggctttgacaccggggccctggacccctgcaagatcccctactag

SEQ ID NO: 174584 - DNA, 1617 bp, synthetic construct; identical to SEQ ID NO: 174580
  misc_feature 1..1617: note = Description of Artificial Sequence: Synthetic coding sequence
  source 1..1617: mol_type = other DNA

SEQ ID NO: 174585 - DNA, 1617 bp, synthetic construct; identical to SEQ ID NO: 174580
  misc_feature 1..1617: note = Description of Artificial Sequence: Synthetic coding sequence
  source 1..1617: mol_type = other DNA

SEQ ID NO: 174586 - DNA, 792 bp, synthetic construct
  misc_feature 1..792: note = Description of Artificial Sequence: Synthetic coding sequence
  source 1..792: mol_type = other DNA
atgcccctgacagccctgctgaggaacctgggcaagatgacagccaacagcgtgctggagcccggcaacagcgaggtgtccctggtgtgtgagaagctgtgcaatgagaagctgctgaagaaggcccgcatccaccccttccacatcctgattgccctggagacctacaagacaggccacggcctgcggggcaagctgaagtggaggccagatgaggagatcctgaaggccctggatgctgccttctacaagaccttcaagacagtggagcccaccgggaagcgcttcctgctggccgtggatgtgtctgcctccatgaaccagagggtgctgggcagcatcctgaatgccagcacagtggccgccgccatgtgcatggtggtgaccaggacagagaaggacagctatgtggtggccttcagtgatgagatggtgccctgccctgtgaccacagacatgaccctgcagcaggtgctgatggccatgagccagatcccagctgggggcacagactgcagcctgcccatgatctgggcccagaagaccaacaccccagcagatgtgttcatcgtgttcacagacaatgagacctttgctggaggagtgcacccagccatcgccctgcgggagtacaggaagaagatggacatcccagccaagctgattgtgtgtggcatgaccagcaatggcttcaccatcgctgaccctgatgaccggggcatgctggacatgtgtggctttgacacaggagccctggatgtgatccggaacttcaccctggacatgatctag

SEQ ID NO: 174587 - DNA, 126 bp, synthetic construct
  misc_feature 1..126: note = Description of Artificial Sequence: Synthetic coding sequence
  source 1..126: mol_type = other DNA
atggaggagagcgtgaaccagatgcagcccctgaatgagaagcagatcgccaacagccaggacggctacgtgtggcaggtgacagacatgaaccggctgcaccgcttcctgtgcttcggcagctag

SEQ ID NO: 174588 - DNA, 1050 bp, synthetic construct
  misc_feature 1..1050: note = Description of Artificial Sequence: Synthetic coding sequence
  source 1..1050: mol_type = other DNA
atggccgccagcgaggccgctgtggtgagcagccccagcctgaagacagacaccagccctgtgctggagacagctggcaccgtggccgccatggccgccacccccagcgcccgggctgctgctgctgtggtggccgctgctgccaggacaggcagcgaggcccgggtgtccaaggccgccctggccaccaagctgctgagcctgtctggagtgtttgctgtgcacaagcccaagggccccaccagcgctgagctgctgaaccggctgaaggagaagctgctggccgaggccggcatgcccagccctgagtggaccaagaggaagaagcagaccctgaagattggccacggcggcaccctggacagcgctgcccggggcgtgctggtggtgggcatcggcagcggcaccaagatgctgacctccatgctgagcggcagcaagcgctacacagccatcggggagctgggcaaggccacagacaccctggacagcacaggccgggtgacagaggagaagccctatgacaagatcacccaggaggacatcgagggcatcctgcagaagttcaccggcaacatcatgcaggtgccccccctgtacagcgccctgaagaaggatggccagaggctgagcaccctgatgaagagaggagaggtggtggaggccaagccagcccggcctgtgacagtgtacagcatcagcctgcagaagttccagccccccttcttcaccctggatgtggagtgtggcggcggcttctacatccgcagcctggtgtctgacatcggcaaggagctgagcagctgtgccaacgtgctggagctgaccaggaccaagcagggccccttcaccctggaggagcacgccctgcctgaggacaagtggaccattgatgacatcgcccagagcctggagcactgcagcagcctcttccctgctgagctggccctgaagaagagcaagccagagagcaatgagcaggtgctgagctgtgagtacatcaccctgaatgagcccaagcgggaggatgatgtgatcaagacctgctag

SEQ ID NO: 174589 - DNA, 996 bp, synthetic construct
  misc_feature 1..996: note = Description of Artificial Sequence: Synthetic coding sequence
  source 1..996: mol_type = other DNA
atgggcagcgctggcctgagccggctgcacggcctgtttgctgtgtacaagcccccaggcctgaagtggaagcacctgcgggacacagtggagctgcagctgctgaagggcctgaatgccaggaagcccccagcccccaagcagagggtgcgcttcctgctgggccccatggagggcagcgaggagaaggagctgaccctgacagccacctctgtgcccagcttcatcaaccaccccctggtgtgtggccctgcctttgcccacctgaaggtgggcgtgggccaccggctggatgcccaggccagcggcgtgctggtgctgggcgtgggccacggctgccgcctgctgacagacatgtacaatgcccacctgaccaaggactacacagtgcggggcctgctgggcaaggccacagatgacttcagagaagatggccgcctggtggagaagaccacctatgaccacgtgacccgggagaagctggaccgcatcctggccgtcatccagggcagccaccagaaggccctggtgatgtacagcaacctggacctgaagacccaggaggcctatgagatggctgtgcggggcctcatccggcccatgaacaagagccccatgctgatcaccggcatccgctgcctgtactttgcccctcctgagttcctgctggaggtgcagtgcatgcatgagacccagaaggagctgaggaagctggtgcatgagatcggcctggagctgaagaccacagctgtgtgcacccaggtgcggaggaccagagatggcttcttcaccctggacagcgccctgctgcggacccagtgggacctgaccaacatccaggatgccatccgggccgccaccccccaggtggccgctgagctggagaagagcctgagccctggcctggacaccaagcagctgcccagccctggctggagctgggacagccagggccccagcagcaccctgggcctggagagaggagctggccagtag

SEQ ID NO: 174590 - DNA, 828 bp, synthetic construct
  misc_feature 1..828: note = Description of Artificial Sequence: Synthetic coding sequence
  source 1..828: mol_type = other DNA
atggagggcagcgaggagaaggagctgaccctgacagccacctctgtgcccagcttcatcaaccaccccctggtgtgtggccctgcctttgcccacctgaaggtgggcgtgggccaccggctggatgcccaggccagcggcgtgctggtgctgggcgtgggccacggctgccgcctgctgacagacatgtacaatgcccacctgaccaaggactacacagtgcggggcctgctgggcaaggccacagatgacttcagagaagatggccgcctggtggagaagaccacctatgaccacgtgacccgggagaagctggaccgcatcctggccgtcatccagggcagccaccagaaggccctggtgatgtacagcaacctggacctgaagacccaggaggcctatgagatggctgtgcggggcctcatccggcccatgaacaagagccccatgctgatcaccggcatccgctgcctgtactttgcccctcctgagttcctgctggaggtgcagtgcatgcatgagacccagaaggagctgaggaagctggtgcatgagatcggcctggagctgaagaccacagctgtgtgcacccaggtgcggaggaccagagatggcttcttcaccctggacagcgccctgctgcggacccagtgggacctgaccaacatccaggatgccatccgggccgccaccccccaggtggccgctgagctggagaagagcctgagccctggcctggacaccaagcagctgcccagccctggctggagctgggacagccagggccccagcagcaccctgggcctggagagaggagctggccagtag

SEQ ID NO: 174591 - DNA, 1701 bp, synthetic construct
  misc_feature 1..1701: note = Description of Artificial Sequence: Synthetic coding sequence
  source 1..1701: mol_type = other DNA
atgaggcggcagtggggcagcgccatgagagctgctgagcaggccggctgcatggtgtctgccagccgggccggccagcctgaggccggcccctggagctgcagcggggtcatcctgagccgcagccctggcctggtgctgtgccacggcggcatctttgtgcccttcctgcgggccggcagcgaggtgctgacagctgctggagctgtgttcctgcccggggacagctgcagagatgacctgcggctgcacgtgcagtgggcccccacagctgctggccctgggggcggcgctgagcggggccggcccggcctgtgcaccccccagtgtgccagcctggagcccggccccccagcccccagccggggccggcccctgcagccccggctgcctgctgagctgctgctgctgctgagctgcccagccttctgggcccactttgcccggctgtttggagatgaagctgctgagcagtggaggttcagcagcgctgccagagatgatgaggtgtctgaagatgaggaggccgaccagctgcgggccctgggctggtttgccctgctgggcgtgcggctgggccaggaggaggtggaggaggagcggggccctgccatggctgtgagccccctgggcgctgtgcccaagggggcccccctgctggtgtgtggcagcccctttggagccttctgcccagacatcttcctgaacaccctgagctgtggggtgctgagcaatgtggccggccccctgctgctgacagatgcccgctgcctgcctggaacagaaggaggaggagtcttcaccgcccggcctgctggggccctggtggccctggtggtggcccccctgtgctggaaggccggggagtgggtgggcttcaccctgctgtgtgccgccgcccccctcttccgggccgccagagatgccctgcaccggctgccccacagcacagctgccctggccgccctgctgcccccagaggtgggcgtgccctggggcctgcccctgcgggacagcggccccctgtgggccgctgctgctgtgctggtggagtgtggcaccgtgtggggcagcggcgtggccgtggccccccggctggtggtgacctgccgccacgtgagcccccgggaggccgcccgggtgctggtgcgcagcaccacccccaagtctgtggccatctggggccgggtggtgtttgccacccaggagacctgcccctatgacattgctgtggtgtccctggaggaggacctggatgatgtgcccatccctgtgcctgctgagcacttccatgaaggagaggccgtgtctgtggtgggctttggagtgtttggccagagctgtggccccagcgtgaccagcggcatcctgtctgctgtggtgcaggtgaatggcacccctgtgatgctgcagaccacctgtgctgtgcacagcggcagcagcggcggccccctcttcagcaaccacagcggcaacctgctgggcatcatcaccagcaacacccgggacaacaacacaggagccacctacccccacctgaacttcagcatccccatcaccgtgctgcagcctgccctgcagcagtacagccagacccaggacctgggcggcctgcgggagctggacagagctgctgagcctgtgcgggtggtgtggaggctgcagaggcccctggccgaggcccccaggagcaagctgtag

SEQ ID NO: 174592 - DNA, 1197 bp, synthetic construct
  misc_feature 1..1197: note = Description of Artificial Sequence: Synthetic coding sequence
  source 1..1197: mol_type = other DNA
atgaggcggcagtggggcagcgccatgagagctgctgagcaggccggctgcatggtgtctgccagccgggccggccagcctgaggccggcccctggagctgcagcggggtcatcctgagccgcagccctggcctggtgctgtgccacggcggcatctttgtgcccttcctgcgggccggcagcgaggtgctgacagctgctggagctgtgttcctgcccggggacagctgcagagatgacctgcggctgcacgtgcagtgggcccccacagctgctggccctgggggcggcgctgagcggggccggcccggcctgtgcaccccccagtgtgccagcctggagcccggccccccagcccccagccggggccggcccctgcagccccggctgcctgctgagctgctgctgctgctgagctgcccagccttctgggcccactttgcccggctgtttggagatgaagctgctgagcagtggaggttcagcagcgctgccagagatgatgaggtgtctgaagatgaggaggccgaccagctgcgggccctgggctggtttgccctgctgggcgtgcggctgggccaggaggaggtggaggaggagcggggccctgccatggctgtgagccccctgggcgctgtgcccaagggggcccccctgctggtgtgtggcagcccctttggagccttctgcccagacatcttcctgaacaccctgagctgtggggtgctgagcaatgtggccggccccctgctgctgacagatgcccgctgcctgcctggaacagaaggaggaggagtcttcaccgcccggcctgctggggccctggtggccctggtggtggcccccctgtgctggaaggccggggagtgggtgggcttcaccctgctgtgtgccgccgcccccctcttccgggccgccagagatgccctgcaccggctgccccacagcacagctgccctggccgccctgctgcccccagaggtgggcgtgccctggggcctgcccctgcgggacagcggccccctgtgggccgctgctgctgtgctggtggagtgtggcaccgtgtggggcagcggcgtggccgtggccccccggctggtggtgacctgccgccacgtgagcccccgggaggccgcccgggtgctggtgcgcagcaccacccccaagcacaaccaccagcagcaccctggccagtag

SEQ ID NO: 174593 - DNA, 828 bp, synthetic construct
  misc_feature 1..828: note = Description of Artificial Sequence: Synthetic coding sequence
  source 1..828: mol_type = other DNA
atgctgaacctgctgctgctggccctgcctgtgctggccagccgggcctatgctgccccagcccctggccaggccctgcagagggtgggcatcgtgggcggccaggaggcccccaggagcaagtggccctggcaggtgtccctgcgggtgcacggcccctactggatgcacttctgtggcggcagcctcatccacccccagtgggtgctgacagctgcccactgtgtgggcccagatgtgaaggacctggccgccctgcgggtgcagctgcgggagcagcacctgtactaccaggaccagctgctgcctgtgagccgcatcatcgtgcacccccagttctacacagcccagatcggggctgacatcgccctgctggagctggaggagcctgtgaatgtgagcagccacgtgcacacagtgaccctgcccccagccagcgagaccttccccccaggcatgccctgctgggtgacaggctggggagatgtggacaatgatgagcggctgcccccacccttccccctgaagcaggtgaaggtgcccatcatggagaaccacatctgtgatgccaagtaccacctgggcgcctacacaggagatgatgtgcgcatcgtgagagatgacatgctgtgtgccggcaacacccggcgggacagctgccagggcgacagcggcggccccctggtgtgcaaggtgaatggcacctggctgcaggccggcgtggtgtcctggggcgagggctgtgcccagcccaaccggcccggcatctacaccagggtgacctactacctggactggatccaccactacgtgcccaagaagccctag

SEQ ID NO: 174594 - DNA, 849 bp, synthetic construct
  misc_feature 1..849: note = Description of Artificial Sequence: Synthetic coding sequence
  source 1..849: mol_type = other DNA
atgctgctgctggccccccagatgctgaacctgctgctgctggccctgcctgtgctggccagccgggcctatgctgccccagcccctggccaggccctgcagagggtgggcatcgtgggcggccaggaggcccccaggagcaagtggccctggcaggtgtccctgcgggtgcacggcccctactggatgcacttctgtggcggcagcctcatccacccccagtgggtgctgacagctgcccactgtgtgggcccagatgtgaaggacctggccgccctgcgggtgcagctgcgggagcagcacctgtactaccaggaccagctgctgcctgtgagccgcatcatcgtgcacccccagttctacacagcccagattggagctgacatcgccctgctggagctggaggagcctgtgaatgtgagcagccacgtgcacacagtgaccctgcccccagccagcgagaccttccccccaggcatgccctgctgggtgacaggctggggagatgtggacaatgatgagcggctgcccccacccttccccctgaagcaggtgaaggtgcccatcatggagaaccacatctgtgatgccaagtaccacctgggcgcctacacaggagatgatgtgagaattgtgagagatgacatgctgtgtgccggcaacacccggcgggacagctgccagggcgacagcggcggccccctggtgtgcaaggtgaatggcacctggctgcaggccggcgtggtgtcctggggcgagggctgtgcccagcccaacagacctggcatctacaccagggtgacctactacctggactggatccaccactacgtgcccaagaagccctag

SEQ ID NO: 174595 - DNA, 2532 bp, synthetic construct
  misc_feature 1..2532: note = Description of Artificial Sequence: Synthetic coding sequence
  source 1..2532: mol_type = other DNA
atgtggggccgcctgtggcccctgctgctgagcatcctgacagccacagctgtgcccggccccagcctgcggcggcccagccgggagctggatgccacccccaggatgaccatcccctatgaggagctgagcggcaccaggcacttcaagggccaggcccagaactacagcaccctgctgctggaggaggccagcgcccggctgctggtgggcgcccggggggccctcttcagcctgagcgccaatgacattggagatggagcccacaaggagatccactgggaggccagccctgagatgcagagcaagtgccaccagaagggcaagaacaaccagacagagtgcttcaaccacgtgcgcttcctgcagaggctgaacagcacccacctgtatgcctgtggcacccacgccttccagcccctgtgtgccgccattgatgctgaggccttcaccctgcccaccagctttgaggagggcaaggagaagtgcccctatgaccctgcccggggcttcaccggcctcatcattgatggcggcctgtacacagccaccaggtatgagttccgcagcatcccagacatcagaagaagccgccacccccacagcctgaggacagaggagacccccatgcactggctgaatgatgctgagtttgtgttttctgtgctggtgcgggagagcaaggccagcgctgtgggagatgatgacaaggtgtactacttcttcacagagcgggccacagaggagggcagcggcagcttcacccagagccgcagcagccaccgggtggcccgggtggcccgggtgtgcaagggggacctgggcggcaagaagatcctgcagaagaagtggaccagcttcctgaaggcccggctcatctgccacatccccctgtatgagaccctgcggggcgtgtgcagcctggatgctgagaccagcagcaggacccacttctacgccgccttcaccctgagcacccagtggaagaccctggaggccagcgccatctgccgctatgacctggccgagatccaggccgtgtttgctggcccctacatggagtaccaggacggcagccgccgctggggccgctatgaaggaggagtgcctgagccccggcccggcagctgcatcacagacagcctgcggagccagggctacaacagcagccaggacctgcccagcctggtgctggactttgtgaagctgcaccccctgatggcccggcctgtggtgcccacccggggccggcccctgctgctgaagaggaacatccgctacacccacctgaccggcacccctgtgaccaccccagctggccccacctatgacctgctcttcctgggcacagcagatggctggatccacaaggctgtggtgctgggcagcggcatgcacatcatcgaggagacccaggtgttccgggagagccagagcgtggagaacctggtgatcagcctgctgcagcacagcctgtatgtgggcgcccccagcggggtcatccagctgcccctgagcagctgcagccgctaccgcagctgctatgactgcatcctggcccgggacccctactgcggctgggaccccggcacccacgcctgtgccgccgccaccaccatcgccaacagaagccagggcagcaggacagccctgatccaggacatcgagcggggcaacagaggctgtgagagcagccgggacaccggccccccaccacccctgaagaccaggtctgtgctgcggggagatgatgtgctgctgccctgtgaccagcccagcaacctggcccgggccctgtggctgctgaatggctccatgggcctgagtgatggccagggcggctacagagtgggcgtggatggcctgctggtgacagatgcccagcctgagcacagcggcaactacggctgctacgcagaagaaaatggcctgcggaccctgctggccagctacagcctgactgtgcggcctgccaccccagccccagcccccaaggccccagccacccctggggcccagctggccccagatgtgcggctgctgtatgtgctggccatcgccgccctgggcggcctgtgcctgatcctggccagcagcctgctgtatgtggcctgcctgcgggagggccggcggggcagaagaaggaagtacagcctgggccgggccagcagagctgggggcagcgctgtgcagctgcagacagtgtctggccagtgccctggagaagaagatgaaggagatgatgagggcgccggcggcctggagggcagctgcctgcagatcatccctggagagggcgccccagcccctcctcctcctcctcctcctcctcctcctgctgagctgaccaacggcctggtggccctgcccagccggctgcggaggatgaatggaaacagctatgtgctgctgcggcagagcaacaatggagtgcctgctggcccctgcagctttgctgaggagctgagccgcatcctggagaagaggaagcacacccagctggtggagcagctggatgagagctctgtgtag

SEQ ID NO: 174596 - DNA, 708 bp, synthetic construct
  misc_feature 1..708: note = Description of Artificial Sequence: Synthetic coding sequence
  source 1..708: mol_type = other DNA
atgctgagcctgctgctgctggccctgcctgtgctggccagccctgcctacgtggccccagcccctggccaggccctgcagcagacaggaattgtgggcggccaggaggcccccaggagcaagtggccctggcaggtgtccctgcgggtgcggggcccctactggatgcacttctgtggcggcagcctcatccacccccagtgggtgctgacagctgcccactgtgtggagccagacatcaaggacctggccgccctgcgggtgcagctgcgggagcagcacctgtactaccaggaccagctgctgcctgtgagccgcatcatcgtgcacccccagttctacatcatccagacaggagctgacatcgccctgctggagctggaggagcctgtgaacatcagcagccacatccacacagtgaccctgcccccagccagcgagaccttccccccaggcatgccctgctgggtgacaggctggggagatgtggacaacaacgtgcacctgcccccaccctaccccctgaaggaggtggaggtgcctgtggtggagaaccacctgtgcaatgctgagtaccacacaggcctgcacacaggccacagcttccagatcgtgagagatgacatgctgtgtgccggctctgaaaatcatgacagctgccagggcgacagcggcggccccctggtgtgcaaggtgaatggcacctag

SEQ ID NO: 174597 - DNA, 4281 bp, synthetic construct
  misc_feature 1..4281: note = Description of Artificial Sequence: Synthetic coding sequence
  source 1..4281: mol_type = other DNA
atgcacagcagcaaccccaaggtgcgcagcagccccagcggcaacacccagagcagccccaagagcaagcaggaggtgatggtgcggccccccaccgtgatgagccccagcggcaacccccagctggacagcaagttcagcaaccagggcaagcagggcggcagcgccagccagagccagcccagcccctgtgacagcaagagcggcggccacacccccaaggccctgcccggccctgggggctccatgggcctgaagaatggagctggaaatggagccaagggcaagggcaagcgggagaggagcatctctgctgacagctttgaccagagggaccccggcaccccaaatgatgacagcgacatcaaggagtgcaacagcgctgaccacatcaagagccaggacagccagcacaccccccacagcatgacccccagcaatgccacagcccccaggagcagcacccccagccacggccagaccacagccacagagcccaccccagcccagaagaccccagccaaggtggtgtatgtgttcagcacagagatggccaacaaggctgctgaggccgtgctgaagggccaggtggagaccatcgtgtccttccacatccagaacatcagcaacaacaagacagagaggagcacagcccccctgaacacccagatcagcgccctgagaaatgaccccaagcccctgccccagcagcccccagccccagccaaccaggaccagaacagcagccagaacacccggctgcagcccaccccacccatcccagccccagcccccaagccagctgccccaccccggcccctggaccgggagagccctggggtggagaacaagctgatccccagcgtgggcagccctgccagcagcacccccctgcccccagatggcaccggccccaacagcacccccaacaacagagctgtgacccctgtgtcccagggcagcaacagcagcagcgctgaccccaaggcccctcctcctcctcctgtgagcagcggggagccccccaccctgggggagaacccagatggcctgagccaggagcagctggagcaccgggagaggagcctgcagaccctgcgggacatccagaggatgctgttcccagatgagaaggagttcaccggggcccagagcggcggcccccagcagaaccctggggtgctggatggcccccagaagaagccagagggccccatccaggccatgatggcccagagccagagcctgggcaagggccctggccccaggacagatgtgggcgcccccttcggcccccagggccacagagatgtgcccttctccccagatgagatggtgcccccatccatgaacagccagagcggcaccatcggccctgaccacctggaccacatgaccccagagcagatcgcctggctgaagctgcagcaggagttctatgaggagaagaggaggaagcaggagcaggtggtggtgcagcagtgcagcctgcaggacatgatggtgcaccagcacggcccccggggcgtggtgcggggccccccaccaccctaccagatgaccccatctgagggctgggcccctgggggcacagagcccttcagtgatggcatcaacatgccccacagcctgcccccccggggcatggccccccaccccaacatgcctggcagccagatgaggctgcccggctttgctggcatgatcaacagcgagatggagggccccaacgtgcccaacccagccagcaggcctggcctgagcggcgtgtcctggccagatgatgtgcccaagatcccagatggaagaaacttccccccaggccagggcatcttcagcggccctggccgcggggagcgcttccccaacccccagggcctgtctgaggagatgttccagcagcagctggccgagaagcagctgggcctgcccccaggcatggccatggagggcatccggcccagcatggagatgaacaggatgatccctggcagccagaggcacatggagcccggcaacaaccccatcttcccccgcatccctgtggagggccccctgagccccagcagaggagacttccccaagggcatccccccccagatgggccctggccgggagctggagtttggcatggtgcccagcggcatgaagggagatgtgaacctgaatgtgaacatgggcagcaacagccagatgatcccccagaagatgagggaggccggggccggccctgaggagatgctgaagctgcggcctgggggcagtgacatgctgcctgcccagcagaagatggtgcccctgccctttggagagcacccccagcaggagtatggcatgggcccccggcccttcctgcccatgagccagggccctggcagcaacagcggcctgaggaacctgcgggagcccatcggccctgaccagaggaccaacagccggctgagccacatgccacccctgcccctgaaccccagcagcaaccccaccagcctgaacacagcccctcctgtgcagaggggcctgggcaggaagcccctggacatctctgtggccggcagccaggtgcacagccctggcatcaaccccctgaagagccccaccatgcaccaggtgcagagccccatgctgggcagccccagcggcaacctgaagagcccccagacccccagccagctggccggcatgctggccggccctgctgctgctgccagcatcaagagcccccctgtgctgggcagcgctgctgccagccctgtgcacctgaagagccccagcctgcctgcccccagccctggctggaccagcagccccaagccacccctgcagagccctggcatcccccccaaccacaaggcccccctgaccatggccagccctgccatgctgggcaatgtggagagcggcggccccccaccacccacagccagccagcctgcctctgtgaacatccctggcagcctgcccagcagcaccccctacaccatgcctcctgagcccaccctgagccagaaccccctgagcatcatgatgagcaggatgagcaagtttgccatgcccagcagcacccccctgtaccatgatgccatcaagacagtggccagcagtgatgatgacagccccccagcccggagccccaacctgcccagcatgaacaacatgcctggcatgggcatcaacacccagaacccccgcatcagcggccccaaccctgtggtgcccatgcccaccctgagccccatgggcatgacccagcccctgagccacagcaaccagatgcccagccccaatgctgtgggccccaacatcccccctcatggagtgcccatgggccctggcctgatgagccacaaccccatcatgggccacggcagccaggagccccccatggtgccccagggccgcatgggcttcccccagggcttcccccctgtgcagagccccccccagcaggtgcccttcccccacaacggccccagcggcggccagggcagcttccctgggggcatgggcttccctggagagggccccctgggccggcccagcaacctgccccagagcagcgcagatgctgccctgtgcaagccaggcggccctgggggccctgacagcttcaccgtgctgggcaacagcatgcccagcgtcttcacagatcctgacctgcaggaggtgatccggcctggggccaccggcatccctgagtttgacctgagccgcatcatccccagcgagaagcccagccagaccctgcagtacttccccagaggagaggtgcccggcaggaagcagccccagggccctggccctggcttcagccacatgcagggcatgatgggagagcaggcccccaggatgggcctggccctgcccggcatgggcggccctggccctgtgggcaccccagacatccccctgggcacagcccccagcatgcctggccacaaccccatgaggcccccagccttcctgcagcagggcatgatgggcccccaccacaggatgatgagccctgcccagagcaccatgcctggccagcccaccctgatgagcaacccagctgctgctgtgggcatgatccctgggaaggaccggggccctgctggcctgtacacccaccctggccctgtgggcagccctggcatgatgatgtccatgcagggcatgatgggcccccagcagaacatcatgatccccccccagatgaggccccggggcatggctgctgatgtgggcatgggcggcttcagccagggccctggcaaccctggcaacatgatgttttag

SEQ ID NO: 174598 - DNA, 1221 bp, synthetic construct
  misc_feature 1..1221: note = Description of Artificial Sequence: Synthetic coding sequence
  source 1..1221: mol_type = other DNA
atgagcggctgccccttcctgggcaacaactttggctacaccttcaagaagctgcctgtggagggcagcgaggaggacaagagccagacaggagtgaacagagccagcaaaggaggcctcatctacggcaactacctgcacctggagaaggtgctgaatgcccaggagctgcagagcgagaccaagggcaacaagatccatgatgagcacctgttcatcatcacccaccaggcctatgagctgtggttcaagcagatcctgtgggagctggacagcgtgcgggagatcttccagaatggacatgtgagagatgagaggaacatgctgaaggtggtgtccaggatgcaccgggtgtctgtcatcctgaagctgctggtgcagcagttcagcatcctggagaccatgacagccctggacttcaatgacttccgggagtacctgagccctgccagcggcttccagagcctgcagttccggctgctggagaacaagattggagtgctgcagaacatgagggtgccctacaacagaagacactacagagacaacttcaagggggaggagaatgagctgctgctgaagtctgagcaggagaagaccctgctggagctggtggaggcctggctggagaggaccccaggcctggagccccacggcttcaacttctggggcaagctggagaagaacatcacccggggcctggaggaggagttcatccgcatccaggccaaggaggagagcgaggagaaggaggagcaggtggccgagttccagaagcagaaggaggtgctgctgagcctgtttgatgagaagagacatgagcacctgctgagcaaaggagagcggcggctgagctaccgggccctgcagggcgccctgatgatctacttctaccgggaggagccccgcttccaggtgcccttccagctgctgaccagcctgatggacatcgacagcctgatgaccaagtggagatacaaccacgtgtgcatggtgcacaggatgctgggcagcaaggccggcaccggcggcagcagcggctaccactacctgcggagcacagtgtctgaccgctacaaggtgtttgtggacctcttcaacctgagcacctacctgatccccaggcactggatccccaagatgaaccccaccatccacaagttcctgtacacagctgagtactgtgacagcagctacttcagcagtgatgaaagtgactag

SEQ ID NO: 174599 - DNA, 1335 bp, synthetic construct
  misc_feature 1..1335: note = Description of Artificial Sequence: Synthetic coding sequence
  source 1..1335: mol_type = other DNA
atgattgaggacaacaaggagaacaaggaccacagcctggagcggggccgggccagcctcatcttcagcctgaagaatgaggtgggcggcctcatcaaggccctgaagatcttccaggagaagcacgtgaacctgctgcacatcgagagcaggaagagcaagagaagaaacagcgagtttgagatctttgtggactgtgacatcaaccgggagcagctgaatgacatcttccacctgctgaagagccacaccaacgtgctgtctgtgaacctgcctgacaacttcaccctgaaggaggatggcatggagaccgtgccctggttccccaagaagatcagtgacctggaccactgtgccaacagagtgctgatgtatggcagcgagctggatgctgaccaccctggcttcaaggacaacgtgtacaggaagaggaggaagtactttgctgacctggccatgaactacaagcatggagaccccatccccaaggtggagttcacagaggaggagatcaagacctggggcaccgtcttccaggagctgaacaagctgtaccccacccacgcctgccgggagtacctgaagaacctgcccctgctgagcaagtactgcggctaccgggaggacaacatcccccagctggaggatgtgagcaacttcctgaaggagaggacaggcttcagcatccggcctgtggccggctacctgagcccccgggacttcctgagcggcctggccttccgggtcttccactgcacccagtatgtgcgccacagcagtgaccccttctacaccccagagccagacacctgccacgagctgctgggccacgtgcccctgctggccgagcccagctttgcccagttcagccaggagatcggcctggccagcctgggcgccagcgaggaggccgtgcagaagctggccacctgctacttcttcaccgtggagtttggcctgtgcaagcaggacggccagctgcgggtgtttggagctggcctgctgagcagcatcagcgagctgaagcacgccctgagcggccacgccaaggtgaagccctttgaccccaagatcacctgcaagcaggagtgcctgatcaccaccttccaggatgtgtactttgtgtctgagagctttgaagatgccaaggagaagatgagggagttcaccaagaccatcaagaggccctttggagtgaagtacaacccctacaccaggagcatccagatcctgaaggacaccaagagcatcaccagcgccatgaatgagctgcagcacgacctggatgtggtgtctgatgccctggccaaggtgtccaggaagcccagcatctag

SEQ ID NO: 174600 - DNA, 1401 bp, synthetic construct
  misc_feature 1..1401: note = Description of Artificial Sequence: Synthetic coding sequence
  source 1..1401: mol_type = other DNA
atgattgaggacaacaaggagaacaaggaccacagcctggagcggggccgggccagcctcatcttcagcctgaagaatgaggtgggcggcctcatcaaggccctgaagatcttccaggagaagcacgtgaacctgctgcacatcgagagcaggaagagcaagagaagaaacagcgagtttgagatctttgtggactgtgacatcaaccgggagcagctgaatgacatcttccacctgctgaagagccacaccaacgtgctgtctgtgaacctgcctgacaacttcaccctgaaggaggatggcatggagaccgtgccctggttccccaagaagatcagtgacctggaccactgtgccaacagagtgctgatgtatggcagcgagctggatgctgaccaccctggcttcaaggacaacgtgtacaggaagaggaggaagtactttgctgacctggccatgaactacaagcatggagaccccatccccaaggtggagttcacagaggaggagatcaagacctggggcaccgtcttccaggagctgaacaagctgtaccccacccacgcctgccgggagtacctgaagaacctgcccctgctgagcaagtactgcggctaccgggaggacaacatcccccagctggaggatgtgagcaacttcctgaaggagaggacaggcttcagcatccggcctgtggccggctacctgagcccccgggacttcctgagcggcctggccttccgggtcttccactgcacccagtatgtgcgccacagcagtgaccccttctacaccccagagccagacacctgccacgagctgctgggccacgtgcccctgctggccgagcccagctttgcccagttcagccaggagatcggcctggccagcctgggcgccagcgaggaggccgtgcagaagctggccacctgctacttcttcaccgtggagtttggcctgtgcaagcaggacggccagctgcgggtgtttggagctggcctgctgagcagcatcagcgagctgaagcacgccctgagcggccacgccaaggtgaagccctttgaccccaagatcacctgcaagcaggagtgcctgatcaccaccttccaggatgtgtactttgtgtctgagagctttgaagatgccaaggagaagatgagggagttcaccaagaccatcaagaggccctttggagtgaagtacaacccctacaccaggagcatccagatcctgaaggacaccaagagcatcaccagcgccatgaatgagctgcagcacgacctggatgtggtgtctgatgccctggccaagagcctgaatgaagatgtgctgcaggtgtctgtgtttgccctgctgctcttcctgcccagcctgcatggagagtgccacccagacacctag

SEQ ID NO: 174601 - DNA, 753 bp, synthetic construct
  misc_feature 1..753: note = Description of Artificial Sequence: Synthetic coding sequence
  source 1..753: mol_type = other DNA
atgcagcctgccatgatgatgttcagcagcaagtactgggcccggcggggcttcagcctggacagcgctgtgcctgaggagcaccagctgctgggcagcagcaccctgaacaagcccaacagcggcaagaatgatgacaagggcaacaagggcagcagcaagcgggaggccgccacagaaagtggcaagacagctgtggtgttcagcctgaagaatgaggtgggcggcctggtgaaggccctgcggctcttccaggagaagagggtgaacatggtgcacatcgagagcaggaagagcagaagaagaagcagcgaggtggagatctttgtggactgtgaatgtgggaagacagagttcaatgagctgatccagctgctgaagttccagaccaccatcgtgaccctgaaccccccagagaacatctggacagaggaggaggagctggaggatgtgccctggttccccaggaagatcagcgagctggacaagtgcagccaccgggtgctgatgtatggcagcgagctggatgctgaccaccctggcttcaaggacaacgtgtaccggcagaggaggaagtactttgtggatgtggccatgggctacaagtatggcccccggctgctggccgccatcggggactgggagttccagctgttctctgtgagcagcagcctgagcagcagcagcctgtgcatgctgtctgtgcacatcctgatggatgtgcgcagcatcgtggtggccgtggacatctag

SEQ ID NO: 174602 - DNA, 1473 bp, synthetic construct
  misc_feature 1..1473: note = Description of Artificial Sequence: Synthetic coding sequence
  source 1..1473: mol_type = other DNA
atgcagcctgccatgatgatgttcagcagcaagtactgggcccggcggggcttcagcctggacagcgctgtgcctgaggagcaccagctgctgggcagcagcaccctgaacaagcccaacagcggcaagaatgatgacaagggcaacaagggcagcagcaagcgggaggccgccacagaaagtggcaagacagctgtggtgttcagcctgaagaatgaggtgggcggcctggtgaaggccctgcggctcttccaggagaagagggtgaacatggtgcacatcgagagcaggaagagcagaagaagaagcagcgaggtggagatctttgtggactgtgaatgtgggaagacagagttcaatgagctgatccagctgctgaagttccagaccaccatcgtgaccctgaaccccccagagaacatctggacagaggaggaggagctggaggatgtgccctggttccccaggaagatcagcgagctggacaagtgcagccaccgggtgctgatgtatggcagcgagctggatgctgaccaccctggcttcaaggacaacgtgtaccggcagaggaggaagtactttgtggatgtggccatgggctacaagtatggccagcccatcccccgggtggagtacacagaggaggagaccaagacctggggcgtggtgttccgggagctgagcaagctgtaccccacccacgcctgccgggagtacctgaagaacttccccctgctgaccaagtactgcggctaccgggaggacaacgtgccccagctggaggatgtgtccatgttcctgaaggagaggagcggcttcaccgtgcggcctgtggccggctacctgagcccccgggacttcctggccggcctggcctacagagtcttccactgcacccagtacatccgccacggcagtgaccccctgtacaccccagagccagacacctgccacgagctgctgggccacgtgcccctgctggccgaccccaagtttgcccagttcagccaggagatcggcctggccagcctgggcgccagtgatgaagatgtgcagaagctggccacctgctacttcttcaccatcgagtttggcctgtgcaagcaggagggccagctgcgggcctacggggccggcctgctgagcagcatcggggagctgaagcacgccctgagtgacaaggcctgtgtgaaggcctttgaccccaagaccacctgcctgcaggagtgcctgatcaccaccttccaggaggcctactttgtgtctgagagctttgaggaggccaaggagaagatgagggactttgccaagagcatcacccggcccttctctgtgtacttcaacccctacacccagagcattgagatcctgaaggacaccaggagcattgaaaatgtggtgcaggacctgcggagtgacctgaacacagtgtgtgatgccctgaacaagatgaaccagtacctgggcatctag

SEQ ID NO: 174603 - DNA, 525 bp, synthetic construct
  misc_feature 1..525: note = Description of Artificial Sequence: Synthetic coding sequence
  source 1..525: mol_type = other DNA
atgagcagcgctgctgctgaccactgggcctggctgctggtgctgagctttgtgtttggctgcaatgtgctgcgcatcctgctgcccagcttcagcagcttcatgagccgggtgctgcagaaggatgctgagcaggagagccagatgagagctgagatccaggacatgaagcaggagctgagcacagtgaacatgatggatgaatttgcccgctatgcccggctggagaggaagatcaacaagatgacagacaagctgaagacccacgtgaaggccaggacagcccagctggccaagatcaagtgggtgatctctgtggccttctacgtgctgcaggccgccctgatgatcagcctcatctggaagtactacagcgtgcctgtggccgtggtgcccagcaagtggatcacccccctggaccggctggtggccttccccaccagggtggccggcggcgtgggcatcacctgctggatcctggtgtgcaacaaggtggtggccatcgtgctgcaccccttctcctag

SEQ ID NO: 174604 - DNA, 423 bp, synthetic construct
  misc_feature 1..423: note = Description of Artificial Sequence: Synthetic coding sequence
  source 1..423: mol_type = other DNA
atgagccgggtgctgcagaaggatgctgagcaggagagccagatgagagctgagatccaggacatgaagcaggagctgagcacagtgaacatgatggatgaatttgcccgctatgcccggctggagaggaagatcaacaagatgacagacaagctgaagacccacgtgaaggccaggacagcccagctggccaagatcaagtgggtgatctctgtggccttctacgtgctgcaggccgccctgatgatcagcctcatctggaagtactacagcgtgcctgtggccgtggtgcccagcaagtggatcacccccctggaccggctggtggccttccccaccagggtggccggcggcgtgggcatcacctgctggatcctggtgtgcaacaaggtggtggccatcgtgctgcaccccttctcctag

SEQ ID NO: 174605 - DNA, 423 bp, synthetic construct; identical to SEQ ID NO: 174604
  misc_feature 1..423: note = Description of Artificial Sequence: Synthetic coding sequence
  source 1..423: mol_type = other DNA

SEQ ID NO: 174606 - DNA, 519 bp, synthetic construct
  misc_feature 1..519: note = Description of Artificial Sequence: Synthetic coding sequence
  source 1..519: mol_type = other DNA
atgagcagcgctgctgctgaccactgggcctggctgctggtgctgagctttgtgtttggctgcaatgtgctgcgcatcctgctgcccagcttcagcagcttcatgagccgggtgctgcagaaggatgctgagcaggagagccagatgagagctgagatccaggacatgaagcaggagctgagcacagtgaacatgatggatgaatttgcccgctatgcccggctggagaggaagatcaacaagatgacagacaagctgaagacccacgtgaaggccaggacagcccagctggccaagatcaagtgggtgatctctgtggccttctacgtgctgcaggccgccctgatgatcagcctcatctggaagtactacagcgtgcctgtggccgtggtgcccagcaagtggatcacccccctggaccggctggtggccttccccaccagggtggccgtgttcagcagcagcatctggaccagcaagtgcttcagcagcccagacaagagcatcctggagaagtag

SEQ ID NO: 174607 - DNA, 1083 bp, synthetic construct
  misc_feature 1..1083: note = Description of Artificial Sequence: Synthetic coding sequence
  source 1..1083: mol_type = other DNA
atggccctgcacagcatgaggaaggcccgggagcgctggagcttcatccgggccctgcacaagggcagcgctgctgccccagccctgcagaaggacagcaagaagagggtcttcagcggcatccagcccaccggcatcctgcacctgggcaactacctgggcgccatcgagagctgggtgcggctgcaggatgaatatgacagcgtgctgtacagcatcgtggacctgcacagcatcaccgtgccccaggaccctgctgtgctgcggcagagcatcctggacatgacagctgtgctgctggcctgtggcatcaaccctgagaagagcatcctcttccagcagagccaggtgtctgagcacacccagctgtcctggatcctgagctgcatggtgcggctgccccggctgcagcacctgcaccagtggaaggccaagaccaccaagcagaagcatgatggcaccgtgggcctgctgacctaccctgtgctgcaggccgctgacatcctgctgtacaagagcacccacgtgcctgtgggggaggaccaggtgcagcacatggagctggtgcaggacctggcccagggcttcaacaagaagtacggggagttcttccctgtgcctgagagcatcctgacctccatgaagaaggtgaagagcctgcgggaccccagcgccaagatgagcaagagtgaccctgacaagctggccaccgtgcgcatcacagacagccctgaggagatcgtgcagaagttcaggaaggctgtgacagacttcaccagcgaggtgacctatgaccctgctggccgggccggcgtgagcaacatcgtggccgtgcacgccgctgtgacaggcctgtctgtggaggaggtggtgcggcgctctgctggcatgaacacagcccgctacaagctggccgtggctgatgctgtgattgagaagtttgcccccatcaagcgggagattgagaagctgaagctggacaaggaccacctggagaaggtgctgcagatcggcagcgccaaggccaaggagctggcctacacagtgtgccaggaggtgaagaagctggtgggcttcctgtag

SEQ ID NO: 174608 - DNA, 663 bp, synthetic construct
  misc_feature 1..663: note = Description of Artificial Sequence: Synthetic coding sequence
  source 1..663: mol_type = other DNA
atggccctgcacagcatgaggaaggcccgggagcgctggagcttcatccgggccctgcacaagggcagcgctgctgccccagccctgcagaaggacagcaagaagagggtcttcagcggcatccagcccaccggcatcctgcacctgggcaactacctgggcgccatcgagagctgggtgcggctgcaggatgaatatgacagcgtgctgtacagcatcgtggacctgcacagcatcaccgtgccccaggaccctgctgtgctgcggcagagcatcctggacatgacagctgtgctgctggcctgtggcatcaaccctgagaagagcatcctcttccagcagagccaggtgtctgagcacacccagctgtcctggatcctgagctgcatggtgcggctgccccggctgcagcacctgcaccagtggaaggccaagaccaccaagcagaagcatgatggcaccgtgggcctgctgacctaccctgtgctgcaggccgctgacatcctgctgtacaagagcacccacgtgcctgtgggggaggaccaggtgcagcacatggagctggtgcaggacctggcccagggcttcaacaagaagtacggggagttcttccctgtgcctgagagcatcctgtccatgtgtgtgctggtgttcctgacctag

SEQ ID NO: 174609 - DNA, 801 bp, synthetic construct
  misc_feature 1..801: note = Description of Artificial Sequence: Synthetic coding sequence
  source 1..801: mol_type = other DNA
atgacagctgtgctgctggcctgtggcatcaaccctgagaagagcatcctcttccagcagagccaggtgtctgagcacacccagctgtcctggatcctgagctgcatggtgcggctgccccggctgcagcacctgcaccagtggaaggccaagaccaccaagcagaagcatgatggcaccgtgggcctgctgacctaccctgtgctgcaggccgctgacatcctgctgtacaagagcacccacgtgcctgtgggggaggaccaggtgcagcacatggagctggtgcaggacctggcccagggcttcaacaagaagtacggggagttcttccctgtgcctgagagcatcctgacctccatgaagaaggtgaagagcctgcgggaccccagcgccaagatgagcaagagtgaccctgacaagctggccaccgtgcgcatcacagacagccctgaggagatcgtgcagaagttcaggaaggctgtgacagacttcaccagcgaggtgacctatgaccctgctggccgggccggcgtgagcaacatcgtggccgtgcacgccgctgtgacaggcctgtctgtggaggaggtggtgcggcgctctgctggcatgaacacagcccgctacaagctggccgtggctgatgctgtgattgagaagtttgcccccatcaagcgggagattgagaagctgaagctggacaaggaccacctggagaaggtgctgcagatcggcagcgccaaggccaaggagctggcctacacagtgtgccaggaggtgaagaagctggtgggcttcctgtag

SEQ ID NO: 174610 - DNA, 1293 bp, synthetic construct
  misc_feature 1..1293: note = Description of Artificial Sequence: Synthetic coding sequence
  source 1..1293: mol_type = other DNA
atgctggtgtccctgaagatgagctacaaggctgctgctggggaggactacaaggctgactgccccccaggcaacccagcccccaccagcaaccacggcccagatgccacagaagcagaagaagattttgtggacccctggacagtgcagaccagcagcgccaagggcattgattatgacaagctgattgtgcgcttcggcagcagcaagattgacaaggagctgatcaacagaattgagcgggccaccggccagaggccccaccacttcctgcggcggggcatcttcttcagccaccgggacatgaaccaggtgctggatgcctatgagaacaagaagcccttctacctgtacacaggccggggccccagcagcgaggccatgcacgtgggccacctgatccccttcatcttcaccaagtggctgcaggatgtgttcaacgtgcccctggtgatccagatgacagatgatgagaagtacctgtggaaggacctgaccctggaccaggcctacagctatgctgtggagaatgccaaggacatcatcgcctgtggctttgacatcaacaagaccttcatcttcagtgacctggactacatgggcatgagcagcggcttctacaagaatgtggtgaagatccagaagcacgtgaccttcaaccaggtgaagggcatcttcggcttcacagacagcgactgcatcggcaagatctccttccctgccatccaggccgcccccagcttcagcaacagcttcccccagatcttccgggacagaacagacatccagtgcctgatcccctgtgccatcgaccaggacccctacttcaggatgaccagagatgtggccccccgcatcggctaccccaagccagccctgctgcacagcaccttcttccctgccctgcagggcgcccagaccaagatgtctgccagtgaccccaacagcagcatcttcctgacagacacagccaagcagatcaagaccaaggtgaacaagcacgccttcagcggcggccgggacaccatcgaggagcaccggcagtttggaggcaactgtgatgtggatgtgtccttcatgtacctgaccttcttcctggaggatgatgacaagctggagcagatcaggaaggactacaccagcggggccatgctgaccggggagctgaagaaggccctgattgaggtgctgcagcccctgattgctgagcaccaggcccggaggaaggaggtgacagatgaaattgtgaaggagttcatgacccccaggaagctgagctttgacttccagtag

SEQ ID NO: 174611 - DNA, 1416 bp, synthetic construct
  misc_feature 1..1416: note = Description of Artificial Sequence: Synthetic coding sequence
  source 1..1416: mol_type = other DNA
atgcccaacagcgagcccgccagcctgctggagctgttcaacagcatcgccacccagggcgagctggtgcgcagcctgaaggctggaaatgccagcaaggatgaaattgacagcgctgtgaagatgctggtgtccctgaagatgagctacaaggctgctgctggggaggactacaaggctgactgccccccaggcaacccagcccccaccagcaaccacggcccagatgccacagaggccgaggaggactttgtggacccctggacagtgcagaccagcagcgccaagggcatcgactatgacaagctgattgtgcgcttcggcagcagcaagattgacaaggagctgatcaaccgcatcgagcgggccaccggccagaggccccaccacttcctgcggcggggcatcttcttcagccaccgggacatgaaccaggtgctggatgcctatgagaacaagaagcccttctacctgtacacaggccggggccccagcagcgaggccatgcacgtgggccacctgatccccttcatcttcaccaagtggctgcaggatgtgttcaacgtgcccctggtgatccagatgacagatgatgagaagtacctgtggaaggacctgaccctggaccaggcctacagctatgctgtggagaatgccaaggacatcatcgcctgtggctttgacatcaacaagaccttcatcttcagtgacctggactacatgggcatgagcagcggcttctacaagaatgtggtgaagatccagaagcacgtgaccttcaaccaggtgaagggcatcttcggcttcacagacagcgactgcatcggcaagatctccttccctgccatccaggccgcccccagcttcagcaacagcttcccccagatcttccgggacagaacagacatccagtgcctgatcccctgtgccatcgaccaggacccctacttcaggatgaccagagatgtggcccccagaattggctaccccaagccagccctgctgcacagcaccttcttccctgccctgcagggcgcccagaccaagatgtctgccagtgaccccaacagcagcatcttcctgacagacacagccaagcagatcaagaccaaggtgaacaagcacgccttcagcggcggccgggacaccatcgaggagcaccggcagtttggaggcaactgtgatgtggatgtgtccttcatgtacctgaccttcttcctggaggatgatgacaagctggagcagatcaggaaggactacaccagcggggccatgctgactggagagctgaagaaggccctgattgaggtgctgcagcccctgattgctgagcaccaggcccggaggaaggaggtgacagatgagatcgtgaaggagttcatgacccccaggaagctgagctttgacttccagtag

SEQ ID NO: 174612 - DNA, 1293 bp, synthetic construct; identical to SEQ ID NO: 174610
  misc_feature 1..1293: note = Description of Artificial Sequence: Synthetic coding sequence
  source 1..1293: mol_type = other DNA

SEQ ID NO: 174613 - DNA, 1416 bp, synthetic construct; identical to SEQ ID NO: 174611
  misc_feature 1..1416: note = Description of Artificial Sequence: Synthetic coding sequence
  source 1..1416: mol_type = other DNA

SEQ ID NO: 174614 - DNA, 684 bp, synthetic construct
  misc_feature 1..684: note = Description of Artificial Sequence: Synthetic coding sequence
  source 1..684: mol_type = other DNA
atgctggtgtccctgaagatgagctacaaggctgctgctggggaggactacaaggctgactgccccccaggcaacccagcccccaccagcaaccacggcccagatgccacagaagcagaagaagattttgtggacccctggacagtgcagaccagcagcgccaagggcattgattatgacaagctgattgtgcgcttcggcagcagcaagattgacaaggagctgatcaacagaattgagcgggccaccggccagaggccccaccacttcctgcggcggggcatcttcttcagccaccgggacatgaaccaggtgctggatgcctatgagaacaagaagcccttctacctgtacacaggccggggccccagcagcgaggccatgcacgtgggccacctgatccccttcatcttcaccaagtggctgcaggatgtgttcaacgtgcccctggtgatccagatgacagatgatgagaagtacctgtggaaggacctgaccctggaccaggcctacagctatgctgtggagaatgccaaggacatcatcgcctgtggctttgacatcaacaagaccttcatcttcagtgacctggactacatgggcatgagcagcggcttctacaagaatgtggtgaagatccagaagcacgtgaccttcaaccaggtgaagggcatcttcggctag

SEQ ID NO: 174615 - DNA, 324 bp, synthetic construct
  misc_feature 1..324: note = Description of Artificial Sequence: Synthetic coding sequence
  source 1..324: mol_type = other DNA
atgcccaacagcgagcccgccagcctgctggagctgttcaacagcatcgccacccagggcgagctggtgcgcagcctgaaggctggaaatgccagcaaggatgaaattgacagcgctgtgaagatgctggtgtccctgaagatgagctacaaggctgctgctggggaggactacaaggctgactgccccccaggcaacccagcccccaccagcaaccacggcccagatgccacagaggccgaggaggactttgtggacccctggacagtgcagaccagcagcgccaagggcatcgactatgacaagctgattgtgcgcttctag

SEQ ID NO: 174616 - DNA, 453 bp, synthetic construct
  misc_feature 1..453: note = Description of Artificial Sequence: Synthetic coding sequence
  source 1..453: mol_type = other DNA
atgcccaacagcgagcccgccagcctgctggagctgttcaacagcatcgccacccagggcgagctggtgcgcagcctgaaggctggaaatgccagcaaggatgaaattgacagcgctgtgaagatgctggtgtccctgaagatgagctacaaggctgctgctggggaggactacaaggctgactgccccccaggcaacccagcccccaccagcaaccacggcccagatgccacagaggccgaggaggactttgtggacccctggacagtgcagaccagcagcgccaagggcatcgactatgacaagctgattgtgcgcttcggcagcagcaagattgacaaggagctgatcaaccgcatcgagcgggccaccggccagaggccccaccacttcctgcggcggggcatcttcttcagccaccgggacatgaaccaggtgctggatgcctactag

SEQ ID NO: 174617 - DNA, 294 bp, synthetic construct
  misc_feature 1..294: note = Description of Artificial Sequence: Synthetic coding sequence
  source 1..294: mol_type = other DNA
atgcccaacagcgagcccgccagcctgctggagctgttcaacagcatcgccacccagggcgagctggtgcgcagcctgaaggctggaaatgccagcaaggatgaaattgacagcgctgtgaagatgctggtgtccctgaagatgagctacaaggctgctgctggggaggactacaaggctgactgccccccaggcaacccagcccccaccagcaaccacggcccagatgccacagaggccgaggaggactttgtggacccctggacagtgcagaccagcagcgccaagggctag

SEQ ID NO: 174618 - DNA, 81 bp, synthetic construct
  misc_feature 1..81: note = Description of Artificial Sequence: Synthetic coding sequence
  source 1..81: mol_type = other DNA
atgcccaacagcgagcccgccagcctgctggagctgttcaacagcatcgccacccagggcgagctggtgcgcagcctgtag

SEQ ID NO: 174619 - DNA, 318 bp, synthetic construct
  misc_feature 1..318: note = Description of Artificial Sequence: Synthetic coding sequence
  source 1..318: mol_type = other DNA
atgcccaacagcgagcccgccagcctgctggagctgttcaacagcatcgccacccagggcgagctggtgcgcagcctgaaggctggaaatgccagcaaggatgaaattgacagcgctgtgaagatgctggtgtccctgaagatgagctacaaggctgctgctggggaggactacaaggctgactgccccccaggcaacccagcccccaccagcaaccacggcccagatgccacagaggccgaggaggactttgtggacccctggacagtgcagaccagcagcgccaagggcatcgactatgacaagctgattgtgtag

SEQ ID NO: 174620 - DNA, 102 bp, synthetic construct
  misc_feature 1..102: note = Description of Artificial Sequence: Synthetic coding sequence
  source 1..102: mol_type = other DNA
atgcccaacagcgagcccgccagcctgctggagctgttcaacagcatcgccacccagggcgagctggtgcgcagcctgaaggctggaaatgccagcaagtag

SEQ ID NO: 174621 - DNA, 207 bp, synthetic construct
  misc_feature 1..207: note = Description of Artificial Sequence: Synthetic coding sequence
  source 1..207: mol_type = other DNA
atgcccaacagcgagcccgccagcctgctggagctgttcaacagcatcgccacccagggcgagctggtgcgcagcctgaaggctggaaatgccagcaaggatgaaattgacagcgctgtgaagatgctggtgtccctgaagatgagctacaaggctgctgctggggaggactacaaggctgactgccccccaggcaacccagcctag

SEQ ID NO: 174622 - DNA, 375 bp, synthetic construct
  misc_feature 1..375: note = Description of Artificial Sequence: Synthetic coding sequence
  source 1..375: mol_type = other DNA
atgcccaacagcgagcccgccagcctgctggagctgttcaacagcatcgccacccagggcgagctggtgcgcagcctgaaggctggaaatgccagcaaggatgaaattgacagcgctgtgaagatgctggtgtccctgaagatgagctacaaggctgctgctggggaggactacaaggctgactgccccccaggcaacccagcccccaccagcaaccacggcccagatgccacagaggccgaggaggactttgtggacccctggacagtgcagaccagcagcgccaagggcatcgactatgacaagctgattgtgcgcttcggcagcagcaagattgacaaggagctgatcaaccgcatcgagcgggccacctag

SEQ ID NO: 174623 - DNA, 261 bp, synthetic construct
  misc_feature 1..261: note = Description of Artificial Sequence: Synthetic coding sequence
  source 1..261: mol_type = other DNA
atgcccaacagcgagcccgccagcctgctggagctgttcaacagcatcgccacccagggcgagctggtgcgcagcctgaaggctggaaatgccagcaaggatgaaattgacagcgctgtgaagatgctggtgtccctgaagatgagctacaaggctgctgctggggaggactacaaggctgactgccccccaggcaacccagcccccaccagcaaccacggcccagatgccacagaggccgaggaggactttgtggactag

SEQ ID NO: 174624 - DNA, 168 bp, synthetic construct
  misc_feature 1..168: note = Description of Artificial Sequence: Synthetic coding sequence
  source 1..168: mol_type = other DNA
atgcccaacagcgagcccgccagcctgctggagctgttcaacagcatcgccacccagggcgagctggtgcgcagcctgaaggctggaaatgccagcaaggatgaaattgacagcgctgtgaagatgctggtgtccctgaagatgagctacaaggctgctgctggatag

SEQ ID NO: 174625 - DNA, 192 bp, synthetic construct
  misc_feature 1..192: note = Description of Artificial Sequence: Synthetic coding sequence
  source 1..192: mol_type = other DNA
atgcccaacagcgagcccgccagcctgctggagctgttcaacagcatcgccacccagggcgagctggtgcgcagcctgaaggctggaaatgccagcaaggatgaaattgacagcgctgtgaagatgctggtgtccctgaagatgagctacaaggctgctgctggggaggactacaaggctgactgcccctag

SEQ ID NO: 174626 - DNA, 213 bp, synthetic construct
  misc_feature 1..213: note = Description of Artificial Sequence: Synthetic coding sequence
  source 1..213: mol_type = other DNA
atgcccaacagcgagcccgccagcctgctggagctgttcaacagcatcgccacccagggcgagctggtgcgcagcctgaaggctggaaatgccagcaaggatgaaattgacagcgctgtgaagatgctggtgtccctgaagatgagctacaaggctgctgctggggaggactacaaggctgactgccccccaggcaacccagcccccacctag

SEQ ID NO: 174627 - DNA, 177 bp, synthetic construct
  misc_feature 1..177: note = Description of Artificial Sequence: Synthetic coding sequence
  source 1..177: mol_type = other DNA
atgcccaacagcgagcccgccagcctgctggagctgttcaacagcatcgccacccagggcgagctggtgcgcagcctgaaggctggaaatgccagcaaggatgaaattgacagcgctgtgaagatgctggtgtccctgaagatgagctacaaggctgctgctggggaggactactag

SEQ ID NO: 174628 - DNA, 423 bp, synthetic construct
  misc_feature 1..423: note = Description of Artificial Sequence: Synthetic coding sequence
  source 1..423: mol_type = other DNA
atgctggtgtccctgaagatgagctacaaggctgctgctggggaggactacaaggctgactgccccccaggcaacccagcccccaccagcaaccacggcccagatgccacagaagcagaagaagattttgtggacccctggacagtgcagaccagcagcgccaagggcattgattatgacaagctgattgtgcgcttcggcagcagcaagattgacaaggagctgatcaacagaattgagcgggccaccggccagaggccccaccacttcctgcggcggggcatcttcttcagccaccgggacatgaaccaggtgctggatgcctatgagaacaagaagcccttctacctgtacacaggccggggccccagcagcgaggccatgcacgtgggccacctgatccccttcatcttcaccaagtag

SEQ ID NO: 174629 - DNA, 462 bp, synthetic construct
  misc_feature 1..462: note = Description of Artificial Sequence: Synthetic coding sequence
  source 1..462: mol_type = other DNA
atgctggtgtccctgaagatgagctacaaggctgctgctggggaggactacaaggctgactgccccccaggcaacccagcccccaccagcaaccacggcccagatgccacagaagcagaagaagattttgtggacccctggacagtgcagaccagcagcgccaagggcattgattatgacaagctgattgtgcgcttcggcagcagcaagattgacaaggagctgatcaacagaattgagcgggccaccggccagaggccccaccacttcctgcggcggggcatcttcttcagccaccgggacatgaaccaggtgctggatgcctatgagaacaagaagcccttctacctgtacacaggccggggccccagcagcgaggccatgcacgtgggccacctgatccccttcatcttcaccaagtggctgcaggatgtgttcaacgtgcccctggtgatccagtag

SEQ ID NO: 174630 - DNA, 675 bp, synthetic construct
  misc_feature 1..675: note = Description of Artificial Sequence: Synthetic coding sequence
  source 1..675: mol_type = other DNA
atgctggtgtccctgaagatgagctacaaggctgctgctggggaggactacaaggctgactgccccccaggcaacccagcccccaccagcaaccacggcccagatgccacagaagcagaagaagattttgtggacccctggacagtgcagaccagcagcgccaagggcattgattatgacaagctgattgtgcgcttcggcagcagcaagattgacaaggagctgatcaacagaattgagcgggccaccggccagaggccccaccacttcctgcggcggggcatcttcttcagccaccgggacatgaaccaggtgctggatgcctatgagaacaagaagcccttctacctgtacacaggccggggccccagcagcgaggccatgcacgtgggccacctgatccccttcatcttcaccaagtggctgcaggatgtgttcaacgtgcccctggtgatccagatgacagatgatgagaagtacctgtggaaggacctgaccctggaccaggcctacagctatgctgtggagaatgccaaggacatcatcgcctgtggctttgacatcaacaagaccttcatcttcagtgacctggactacatgggcatgagcagcggcttctacaagaatgtggtgaagatccagaagcacgtgaccttcaaccaggtgaagggctag

SEQ ID NO: 174631 - DNA, 1293 bp, synthetic construct; identical to SEQ ID NO: 174610
  misc_feature 1..1293: note = Description of Artificial Sequence: Synthetic coding sequence
  source 1..1293: mol_type = other DNA

SEQ ID NO: 174632 - DNA, 345 bp, synthetic construct
  misc_feature 1..345: note = Description of Artificial Sequence: Synthetic coding sequence
  source 1..345: mol_type = other DNA
atgcccaacagcgagcccgccagcctgctggagctgttcaacagcatcgccacccagggcgagctggtgcgcagcctgaaggctggaaatgccagcaaggatgaaattgacagcgctgtgaagatgctggtgtccctgaagatgagctacaaggctgctgctggggaggactacaaggctgactgccccccaggcaacccagcccccaccagcaaccacggcccagatgccacagaggccgaggaggactttgtggacccctggacagtgcagaccagcagcgccaagggcatcgactatgacaagctgattgtgcgcttcggcagcagcaagattgacaagtag

SEQ ID NO: 174633 - DNA, 177 bp, synthetic construct; identical to SEQ ID NO: 174627
  misc_feature 1..177: note = Description of Artificial Sequence: Synthetic coding sequence
  source 1..177: mol_type = other DNA

SEQ ID NO: 174634 - DNA, 459 bp, synthetic construct
  misc_feature 1..459: note = Description of Artificial Sequence: Synthetic coding sequence
  source 1..459: mol_type = other DNA
atgcccaacagcgagcccgccagcctgctggagctgttcaacagcatcgccacccagggcgagctggtgcgcagcctgaaggctggaaatgccagcaaggatgaaattgacagcgctgtgaagatgctggtgtccctgaagatgagctacaaggctgctgctggggaggactacaaggctgactgccccccaggcaacccagcccccaccagcaaccacggcccagatgccacagaggccgaggaggactttgtggacccctggacagtgcagaccagcagcgccaagggcatcgactatgacaagctgattgtgcgcttcggcagcagcaagattgacaaggagctgatcaaccgcatcgagcgggccaccggccagaggccccaccacttcctgcggcggggcatcttcttcagccaccgggacatgaaccaggtgctggatgcctatgaaaattag

SEQ ID NO: 174635 - DNA, 1416 bp, synthetic construct; identical to SEQ ID NO: 174611
  misc_feature 1..1416: note = Description of Artificial Sequence: Synthetic coding sequence
  source 1..1416: mol_type = other DNA

SEQ ID NO: 174636 - DNA, 465 bp, synthetic construct
  misc_feature 1..465: note = Description of Artificial Sequence: Synthetic coding sequence
  source 1..465: mol_type = other DNA
atgctggtgtccctgaagatgagctacaaggctgctgctggggaggactacaaggctgactgccccccaggcaacccagcccccaccagcaaccacggcccagatgccacagaagcagaagaagattttgtggacccctggacagtgcagaccagcagcgccaagggcattgattatgacaagctgattgtgcgcttcggcagcagcaagattgacaaggagctgatcaacagaattgagcgggccaccggccagaggccccaccacttcctgcggcggggcatcttcttcagccaccgggacatgaaccaggtgctggatgcctatgagaacaagaagcccttctacctgtacacaggccggggccccagcagcgaggccatgcacgtgggccacctgatccccttcatcttcaccaagtggctgcaggatgtgttcaacgtgcccctggtgatccagatgtag

SEQ ID NO: 174637 - DNA, 639 bp, synthetic construct
  misc_feature 1..639: note = Description of Artificial Sequence: Synthetic coding sequence
  source 1..639: mol_type = other DNA
atgcccaacagcgagcccgccagcctgctggagctgttcaacagcatcgccacccagggcgagctggtgcgcagcctgaaggctggaaatgccagcaaggatgaaattgacagcgctgtgaagatgctggtgtccctgaagatgagctacaaggctgctgctggggaggactacaaggctgactgccccccaggcaacccagcccccaccagcaaccacggcccagatgccacagaggccgaggaggactttgtggacccctggacagtgcagaccagcagcgccaagggcatcgactatgacaagctgattgtgcgcttcggcagcagcaagattgacaaggagctgatcaaccgcatcgagcgggccaccggccagaggccccaccacttcctgcggcggggcatcttcttcagccaccgggacatgaaccaggtgctggatgcctatgagaacaagaagcccttctacctgtacacaggccggggccccagcagcgaggccatgcacgtgggccacctgatccccttcatcttcaccaagtggctgcaggatgtgttcaacgtgcccctggtgatccagatgacagatgatgagaagtacctgtggaaggacctgaccctggaccaggcctactag

SEQ ID NO: 174638 - DNA, 1041 bp, synthetic construct
  misc_feature 1..1041: note = Description of Artificial Sequence: Synthetic coding sequence
  source 1..1041: mol_type = other DNA
atgagcctgctgcggagcctgcgggtcttcctggtggccaggacaggcagctacccagctggcagcctgctgcggcagagcccccagcccaggcacaccttctacgccggcccccggctgagcgccagcgccagcagcaaggagctgctgatgaagctgcggaggaagacaggctacagctttgtgaactgcaagaaggccctggagacctgtggcggggacctgaagcaggccgagatctggctgcacaaggaggcccagaaggagggctggagcaaggccgccaagctgcagggcaggaagaccaaggagggcctgattggcctgctgcaggagggcaacaccaccgtgctggtggaggtgaactgtgaaacagactttgtgtccaggaacctgaagttccagctgctggtgcagcaggtggccctgggcaccatgatgcactgccagaccctgaaggaccagcccagcgcctacagcaaggtgcagtggctgacccctgtgaacctggccctgtgggaggccgaggccggcggcagcctggagggcttcctgaacagcagcgagctgagcggcctgcctgctggccctgaccgggagggcagcctgaaggaccagctggccctggccatcggcaagctgggggagaacatgatcctgaagagagctgcctgggtgaaggtgcccagcggcttctacgtgggcagctatgtgcatggagccatgcagagccccagcctgcacaagctggtgctgggcaagtatggagccctggtgatctgtgagaccagcgagcagaagaccaacctggaggatgtgggccgccgcctgggccagcacgtggtgggcatggcccccctgtctgtgggcagcctggatgatgagcccggcggggaggccgagaccaagatgctgagccagccctacctgctggaccccagcatcaccctgggccagtatgtgcagccccagggcgtgtctgtggtggactttgtgcgctttgaatgtggggagggggaggaggccgctgagacagaatag

SEQ ID NO: 174639 - DNA, 858 bp, synthetic construct
  misc_feature 1..858: note = Description of Artificial Sequence: Synthetic coding sequence
  source 1..858: mol_type = other DNA
atggtgtactgcaccaccacctgggccatctggaactgccagctgctgctgggctacaagcccctgcagaatgtgacaggcctgaacacagtgggcagctgcaacacagtggccgagatctggctgcacaaggaggcccagaaggagggctggagcaaggccgccaagctgcagggcaggaagaccaaggagggcctgattggcctgctgcaggagggcaacaccaccgtgctggtggaggtgaactgtgaaacagactttgtgtccaggaacctgaagttccagctgctggtgcagcaggtggccctgggcaccatgatgcactgccagaccctgaaggaccagcccagcgcctacagcaagggcttcctgaacagcagcgagctgagcggcctgcctgctggccctgaccgggagggcagcctgaaggaccagctggccctggccatcggcaagctgggggagaacatgatcctgaagagagctgcctgggtgaaggtgcccagcggcttctacgtgggcagctatgtgcacggggccatgcagagccccagcctgcacaagctggtgctgggcaagtacggggccctggtgatctgtgagaccagcgagcagaagaccaacctggaggatgtgggccggcggctgggccagcacgtggtgggcatggcccccctgtctgtgggcagcctggatgatgagcctggaggagaggccgagaccaagatgctgagccagccctacctgctggaccccagcatcaccctgggccagtatgtgcagccccagggcgtgtctgtggtggactttgtgcgctttgaatgtggggagggggaggaggccgctgagacagaatag

SEQ ID NO: 174640 - DNA, 978 bp, synthetic construct
  misc_feature 1..978: note = Description of Artificial Sequence: Synthetic coding sequence
  source 1..978: mol_type = other DNA
atgagcctgctgcggagcctgcgggtcttcctggtggccaggacaggcagctacccagctggcagcctgctgcggcagagcccccagcccaggcacaccttctacgccggcccccggctgagcgccagcgccagcagcaaggagctgctgatgaagctgcggaggaagacaggctacagctttgtgaactgcaagaaggccctggagacctgtggcggggacctgaagcaggccgagatctggctgcacaaggaggcccagaaggagggctggagcaaggccgccaagctgcagggcaggaagaccaaggagggcctgattggcctgctgcaggagggcaacaccaccgtgctggtggaggtgaactgtgaaacagactttgtgtccaggaacctgaagttccagctgctggtgcagcaggtggccctgggcaccatgatgcactgccagaccctgaaggaccagcccagcgcctacagcaagggcttcctgaacagcagcgagctgagcggcctgcctgctggccctgaccgggagggcagcctgaaggaccagctggccctggccatcggcaagctgggggagaacatgatcctgaagagagctgcctgggtgaaggtgcccagcggcttctacgtgggcagctatgtgcacggggccatgcagagccccagcctgcacaagctggtgctgggcaagtacggggccctggtgatctgtgagaccagcgagcagaagaccaacctggaggatgtgggccggcggctgggccagcacgtggtgggcatggcccccctgtctgtgggcagcctggatgatgagcctggaggagaggccgagaccaagatgctgagccagccctacctgctggaccccagcatcaccctgggccagtatgtgcagccccagggcgtgtctgtggtggactttgtgcgctttgaatgtggggagggggaggaggccgctgagacagaatag

SEQ ID NO: 174641 - DNA, 504 bp, synthetic construct
  misc_feature 1..504: note = Description of Artificial Sequence: Synthetic coding sequence
  source 1..504: mol_type = other DNA
atgagcctgctgcggagcctgcgggtcttcctggtggccaggacaggcagctacccagctggcagcctgctgcggcagagcccccagcccaggcacaccttctacgccggcccccggctgagcgccagcgccagcagcaaggagctgctgatgaagctgcggaggaagacaggctacagctttgtgaactgcaagaaggccctggagacctgtggcggggacctgaagcaggccgagatctggctgcacaaggaggcccagaaggagggctggagcaaggccgccaagctgcagggcaggaagaccaaggagggcctgattggcctgctgcaggagggcaacaccaccgtgctggtggaggtgaactgtgaaacagactttgtgtccaggaacctgaagttccagctgctggtgcagcaggtggccctgggcaccatgatgcactgccagaccctgaaggaccagcccagcgcctacagcaaggagaactgggagaagacctag

SEQ ID NO: 174642 - DNA, 648 bp, synthetic construct
  misc_feature 1..648: note = Description of Artificial Sequence: Synthetic coding sequence
  source 1..648: mol_type = other DNA
atgagcctgctgcggagcctgcgggtcttcctggtggccaggacaggcagctacccagctggcagcctgctgcggcagagcccccagcccaggcacaccttctacgccggcccccggctgagcgccagcgccagcagcaaggagctgctgatgaagctgcggaggaagacaggctacagctttgtgaactgcaagaaggccctggagacctgtggcggggacctgaagcaggccgagatctggctgcacaaggaggcccagaaggagggctggagcaaggccgccaagctgcagggcaggaagaccaaggagggcctgattggcctgctgcaggagggcaacaccaccgtgctggtggaggtgaactgtgaaacagactttgtgtccaggaacctgaagttccagctgctggtgcagcaggtggccctgggcaccatgatgcactgccagaccctgaaggaccagcccagcgcctacagcaagggcttcctgaacagcagcgagctgagcggcctgcctgctggccctgaccgggagggcagcctgaaggaccagctggccctggccatcggcctgcccttccagatcggggctgtgtctgagctgcagctgcctgagagcaacttcctgcagaacaccagcagctag

SEQ ID NO: 174643 - DNA, 435 bp, synthetic construct
  misc_feature 1..435: note = Description of Artificial Sequence: Synthetic coding sequence
  source 1..435: mol_type = other DNA
atgaagagccagtggtgcaggcctgtggccatggacctgggcgtgtaccagctgcggcacttcagcatctccttcctgagcagcctgctgggcacagaaaatgcctctgtgcggctggacaacagcagcagcggggcctctgtggtggccatcgacaacaagattgagcaggccatggacctggtgaagagccacctgatgtatgctgtgcgggaggaggtggaggtgctgaaggagcagatcaaggagctgattgagaagaacagccagctggagcaggagaacaacctgctgaagaccctggccagccctgagcagctggcccagttccaggcccagctgcagacaggcagccccccagccaccacccagccccagggcaccacccagcccccagcccagcctgccagccagggcagcggccccacagcctag

SEQ ID NO: 174644 - DNA, 3222 bp, synthetic construct
  misc_feature 1..3222: note = Description of Artificial Sequence: Synthetic coding sequence
  source 1..3222: mol_type = other DNA
atgcaccagcccccagagagcacagctgctgctgctgctgctgctgacatcagcgccaggaagatggcccacccagccatgttcccccggcggggcagcggcagcggcagcgccagcgccctgaatgctgctggcaccggggtgggcagcaatgccaccagcagcgaggacttccccccacccagcctgctgcagcccccacctcctgctgccagcagcaccagcggcccccagcccccaccaccccagagcctgaacctgctgagccaggcccagctgcaggcccagcccctggcccctgggggcacccagatgaagaagaagagcggcttccagatcacctctgtgaccccagcccagatcagcgccagcatcagcagcaacaacagcattgctgaggacacagagagctatgatgacctggatgagagccacacagaggacctgagcagcagcgagatcctggatgtgtccctgagccgggccacagacctgggggagcctgagaggagcagcagcgaggagaccctgaacaacttccaggaggccgagaccccaggagctgtgagccccaaccagccccacctgccccagccccacctgccccacctgccccagcagaatgtggtgatcaatggaaatgcccacccccaccacctgcaccaccaccaccagatccaccacggccaccacctgcagcacggccaccaccaccccagccacgtggccgtggccagcgccagcatcaccggcggcccccccagcagccctgtgtccaggaagctgagcaccaccggcagcagtgacagcatcacccctgtggcccccaccagcgctgtgagcagcagcggcagccctgcctctgtgatgaccaacatgagggcccccagcaccactggaggcatcggcatcaacagcgtgacaggcaccagcacagtgaacaacgtgaacatcacagctgtgggcagcttcaaccccaacgtgaccagctccatgctgggcaatgtgaacatcagcaccagcaacatccccagcgctgctggggtgtctgtgggccctggggtgaccagcggcgtgaatgtgaacatcctgagcggcatgggaaatggcaccatcagcagcagcgctgctgtgtcctctgtgcccaatgctgctgctggcatgactggaggctctgtgagcagccagcagcagcagcccaccgtgaacaccagccgcttccgggtggtgaagctggacagcagcagcgagcccttcaagaagggccgctggacctgcacagagttctatgagaaggaaaatgctgtgcctgccacagaaggagtgctgatcaacaaggtggtggagaccgtgaagcagaaccccatcgaggtgaccagcgagcgggagagcaccagcggcagctctgtgagcagctctgtgtccaccctgagccactacacagaatctgtgggcagcggggagatgggcgcccccaccgtggtggtgcagcagcagcagcagcagcagcagcagcagcagcagcagcctgccctgcagggcgtgaccctgcagcagatggactttggcagcacaggcccccagagcatcccagctgtgtccatcccccagagcatcagccagagccagatcagccaggtgcagctgcagagccaggagctgagctaccagcagaagcagggcctgcagcctgtgcccctgcaggccaccatgtctgctgccaccggcatccagcccagccctgtgaatgtggtgggcgtgaccagcgccctgggccagcagcccagcatcagcagcctggcccagccccagctgccctacagccaggccgcccctcctgtgcagacccccctgcccggggcccccccaccccagcagctgcagtatggccagcagcagcccatggtgtccacccagatggcccctggccacgtgaagtctgtgacccagaacccagcctctgaatatgtgcagcagcagcccatcctgcagacagccatgagcagcggccagcccagcagcgctggggtgggcgccggcaccaccgtcatccctgtggcccagccccagggcatccagctgcctgtgcagcccacagctgtgcctgcccagcctgctggggcctctgtgcagcctgtgggccaggccccagctgctgtgtctgctgtgcccaccggcagccagatcgccaacatcggccagcaggccaacatccccacagctgtgcagcagcccagcacccaggtgccccccagcgtcatccagcagggcgccccacccagcagccaggtggtgcccccagcccagacaggcatcatccaccagggcgtgcagaccagcgcccccagcctgccccagcagctggtgattgccagccagagcagcctgctgactgtgcccccccagccccagggcgtggagcctgtggcccagggcatcgtgtcccagcagctgcctgctgtgagcagcctgcccagcgccagcagcatctctgtgaccagccaggtgagcagcacaggccccagcggcatgcccagcgcccccaccaacctggtgcccccccagaacatcgcccagaccccagccacccagaatggaaacctggtgcagagcgtgtcccagcccccactcatcgccaccaacaccaacctgcccctggcccagcagatccccctgagcagcacccagttcagcgcccagagcctggcccaggccatcggcagccagattgaagatgcccggcgggctgctgagcccagcctggtgggcctgccccagaccatcagcggggacagcggcggcatgtctgctgtgtctgatggcagcagcagcagcctggccgccagcgccagcctcttccccctgaaggtgctgcccctgaccacccccctggtggatggagaagatgagagcagcagcggggcctctgtggtggccatcgacaacaagattgagcaggccatggacctggtgaagagccacctgatgtatgctgtgcgggaggaggtggaggtgctgaaggagcagatcaaggagctgattgagaagaacagccagctggagcaggagaacaacctgctgaagaccctggccagccctgagcagctggcccagttccaggcccagctgcagacaggcagccccccagccaccacccagccccagggcaccacccagcccccagcccagcctgccagccagggcagcggccccacagcctag

SEQ ID NO: 174645 - DNA, 126 bp, synthetic construct
  misc_feature 1..126: note = Description of Artificial Sequence: Synthetic coding sequence
  source 1..126: mol_type = other DNA
atgaagagccagtggtgcaggcctgtggccatggacctgggcgtgtaccagctgcggcacttcagcatctccttcctgagcagcctgctgggcacagaaaatgcctctgtgcggctggacaactag

SEQ ID NO: 174646 - DNA, 429 bp, synthetic construct
  misc_feature 1..429: note = Description of Artificial Sequence: Synthetic coding sequence
  source 1..429: mol_type = other DNA
atgcaccagcccccagagagcacagctgctgctgctgctgctgctgacatcagcgccaggaagatggcccacccagccatgttcccccggcggggcagcggcagcggcagcgccagcgccctgaatgctgctggcaccggggtgggcagcaatgccaccagcagcgaggacttccccccacccagcctgctgcagcccccacctcctgctgccagcagcaccagcggcccccagcccccaccaccccagagcctgaacctgctgagccaggcccagctgcaggcccagcccctggcccctgggggcacccagatgaagaagaagagcggcttccagatcacctctgtgaccccagcccagatcagcgccagcatcagcagcaacaacagcattgctgaggacacagagagctatgatgacctggactag

SEQ ID NO: 174647 - DNA, 1713 bp, synthetic construct
  misc_feature 1..1713: note = Description of Artificial Sequence: Synthetic coding sequence
  source 1..1713: mol_type = other DNA
atgcaccagcccccagagagcacagctgctgctgctgctgctgctgacatcagcgccaggaagatggcccacccagccatgttcccccggcggggcagcggcagcggcagcgccagcgccctgaatgctgctggcaccggggtgggcagcaatgccaccagcagcgaggacttccccccacccagcctgctgcagcccccacctcctgctgccagcagcaccagcggcccccagcccccaccaccccagagcctgaacctgctgagccaggcccagctgcaggcccagcccctggcccctgggggcacccagatgaagaagaagagcggcttccagatcacctctgtgaccccagcccagatcagcgccagcatcagcagcaacaacagcattgctgaggacacagagagctatgatgacctggatgagagccacacagaggacctgagcagcagcgagatcctggatgtgtccctgagccgggccacagacctgggggagcctgagaggagcagcagcgaggagaccctgaacaacttccaggaggccgagaccccaggagctgtgagccccaaccagccccacctgccccagccccacctgccccacctgccccagcagaatgtggtgatcaatggaaatgcccacccccaccacctgcaccaccaccaccagatccaccacggccaccacctgcagcacggccaccaccaccccagccacgtggccgtggccagcgccagcatcaccggcggcccccccagcagccctgtgtccaggaagctgagcaccaccggcagcagtgacagcatcacccctgtggcccccaccagcgctgtgagcagcagcggcagccctgcctctgtgatgaccaacatgagggcccccagcaccactggaggcatcggcatcaacagcgtgacaggcaccagcacagtgaacaacgtgaacatcacagctgtgggcagcttcaaccccaacgtgaccagctccatgctgggcaatgtgaacatcagcaccagcaacatccccagcgctgctggggtgtctgtgggccctggggtgaccagcggcgtgaatgtgaacatcctgagcggcatgggaaatggcaccatcagcagcagcgctgctgtgtcctctgtgcccaatgctgctgctggcatgactggaggctctgtgagcagccagcagcagcagcccaccgtgaacaccagccgcttccgggtggtgaagctggacagcagcagcgagcccttcaagaagggccgctggacctgcacagagttctatgagaaggaaaatgctgtgcctgccacagaaggagtgctgatcaacaaggtggtggagaccgtgaagcagaaccccatcgaggtgaccagcgagcgggagagcaccagcggcagctctgtgagcagctctgtgtccaccctgagccactacacagaatctgtgggcagcggggagatgggcgcccccaccgtggtggtgcagcagcagcagcagcagcagcagcagcagcagcagcagcctgccctgcagggcgtgaccctgcagcagatggactttggcagcacaggcccccagagcatcccagctgtgtccatcccccagagcatcagccagagccagatcagccaggtgcagctgcagagccaggagctgagctacctgaccatgaaggtggtgctgctgattgtgtacctgtgcatgtag

SEQ ID NO: 174648 - DNA, 603 bp, synthetic construct
  misc_feature 1..603: note = Description of Artificial Sequence: Synthetic coding sequence
  source 1..603: mol_type = other DNA
atggcccagagcaagctggactgccgcagccctgtgggcctggactgctgcaactgctgcctggacctggcccacaggagcggcctgcagaggggcagcagcggggagaacaacaaccctggcagccccaccgtgagcaacttccggcagctgcaggagaagctggtgtttgagaacctgaacacagacaagctgaacagcatcatgaggcaggacagcctggagcctgtgctgcgggacccctgctacctgatcaatgaaggcatctgcaacagaaacatcgaccagaccatgctgagcatcctgctcttcttccacagcgccagcggggcctctgtggtggccatcgacaacaagattgagcaggccatggacctggtgaagaaccacctgatgtatgctgtgcgggaggaggtggagatcctgaaggagcagatccgggagctggtggagaagaacagccagctggagcgggagaacaccctgctgaagaccctggccagccctgagcagctggagaagttccagagctgcctgagccctgaggagcccgcccctgagagcccccaggtgcctgaggcccctgggggcagcgctgtgtag

SEQ ID NO: 174649 - DNA, 333 bp, synthetic construct
  misc_feature 1..333: note = Description of Artificial Sequence: Synthetic coding sequence
  source 1..333: mol_type = other DNA
atggccttccagcccccctacagcagcagcctcttcaggaagagggacaatgccagcggggcctctgtggtggccatcgacaacaagattgagcaggccatggacctggtgaagaaccacctgatgtatgctgtgcgggaggaggtggagatcctgaaggagcagatccgggagctggtggagaagaacagccagctggagcgggagaacaccctgctgaagaccctggccagccctgagcagctggagaagttccagagctgcctgagccctgaggagcccgcccctgagagcccccaggtgcctgaggcccctgggggcagcgctgtgtag

SEQ ID NO: 174650 - DNA, 603 bp, synthetic construct; identical to SEQ ID NO: 174648
  misc_feature 1..603: note = Description of Artificial Sequence: Synthetic coding sequence
  source 1..603: mol_type = other DNA

SEQ ID NO: 174651 - DNA, 603 bp, synthetic construct; identical to SEQ ID NO: 174648
  misc_feature 1..603: note = Description of Artificial Sequence: Synthetic coding sequence
  source 1..603: mol_type = other DNA

SEQ ID NO: 174652 - DNA, 234 bp, synthetic construct
  misc_feature 1..234: note = Description of Artificial Sequence: Synthetic coding sequence
  source 1..234: mol_type = other DNA
atggacctggtgaagaaccacctgatgtatgctgtgcgggaggaggtggagatcctgaaggagcagatccgggagctggtggagaagaacagccagctggagcgggagaacaccctgctgaagaccctggccagccctgagcagctggagaagttccagagctgcctgagccctgaggagcccgcccctgagagcccccaggtgcctgaggcccctgggggcagcgctgtgtag

SEQ ID NO: 174653 - DNA, 405 bp, synthetic construct
  misc_feature 1..405: note = Description of Artificial Sequence: Synthetic coding sequence
  source 1..405: mol_type = other DNA
atgaacacagagatgtaccagacccccatggaggtggccgtgtaccagctgcacaacttcagcatctccttcttcagcagcctgctgggcggagatgtggtgtctgtgaagctggacaacagcgccagcggggcctctgtggtggccatcgacaacaagattgagcaggccatggacctggtgaagaaccacctgatgtatgctgtgcgggaggaggtggagatcctgaaggagcagatccgggagctggtggagaagaacagccagctggagcgggagaacaccctgctgaagaccctggccagccctgagcagctggagaagttccagagctgcctgagccctgaggagcccgcccctgagagcccccaggtgcctgaggcccctgggggcagcgctgtgtag

SEQ ID NO: 174654 - DNA, 540 bp, synthetic construct
  misc_feature 1..540: note = Description of Artificial Sequence: Synthetic coding sequence
  source 1..540: mol_type = other DNA
atggcccagagcaagctggactgccgcagccctgtgggcctggactgctgcaactgctgcctggacctggcccacaggagcggcctgcagaggggcagcagcggggagaacaacaaccctggcagccccaccgtgagcaacttccggcaggacagcctggagcctgtgctgcgggacccctgctacctgatcaatgaaggcatctgcaacagaaatattgaccagaccatgctgagcatcctgctcttcttccacagcgccagcggggcctctgtggtggccatcgacaacaagattgagcaggccatggacctggtgaagaaccacctgatgtatgctgtgcgggaggaggtggagatcctgaaggagcagatccgggagctggtggagaagaacagccagctggagcgggagaacaccctgctgaagaccctggccagccctgagcagctggagaagttccagagctgcctgagccctgaggagcccgcccctgagagcccccaggtgcctgaggcccctgggggcagcgctgtgtag

SEQ ID NO: 174655 - DNA, 372 bp, synthetic construct
  misc_feature 1..372: note = Description of Artificial Sequence: Synthetic coding sequence
  source 1..372: mol_type = other DNA
atggcccagagcaagctggactgccgcagccctgtgggcctggactgctgcaactgctgcctggacctggcccacaggagcggcctgcagaggggcagcagcggggagaacaacaaccctggcagccccaccgtgagcaacttccggcagctgcaggagaagctggtgtttgagaacctgaacacagacaagctgaacagcatcatgaggcaggacagcctggagcctgtgctgcgggacccctgctacctgatcaatgaaggcatctgcaacagaaacatcgaccagaccatgctgagcatcctgctcttcttccacagcgccagcggggcctctgtggtggccatcgacaacaagattgagcaggcctag

SEQ ID NO: 174656 - DNA, 78 bp, synthetic construct
  misc_feature 1..78: note = Description of Artificial Sequence: Synthetic coding sequence
  source 1..78: mol_type = other DNA
atggacctggtgaagaaccacctgatgtatgctgtgcgggaggaggtggagatcctgaaggagcagatccgggagtag

SEQ ID NO: 174657 - DNA, 351 bp, synthetic construct
  misc_feature 1..351: note = Description of Artificial Sequence: Synthetic coding sequence
  source 1..351: mol_type = other DNA
atggcccagagcaagctggactgccgcagccctgtgggcctggactgctgcaactgctgcctggacctggcccacaggagcggcctgcagaggggcagcagcggggagaacaacaaccctggcagccccaccgtgagcaacttccggcagctgcaggagaagctggtgtttgagaacctgaacacagacaagctgaacagcatcatgaggcaggacagcctggagcctgtgctgcgggacccctgctacctgatcaatgaaggcatctgcaacagaaacatcgaccagaccatgctgagcatcctgctcttcttccacagcgccagcggggcctctgtggtggccatctag

SEQ ID NO: 174658 - DNA, 177 bp, synthetic construct
  misc_feature 1..177: note = Description of Artificial Sequence: Synthetic coding sequence
  source 1..177: mol_type = other DNA
atggcccagagcaagctggactgccgcagccctgtgggcctggactgctgcaactgctgcctggacctggcccacaggagcggcctgcagaggggcagcagcggggagaacaacaaccctggcagccccaccgtgagcaacttccggcagctgcaggagaagctggtgtttgaatag

SEQ ID NO: 174659 - DNA, 255 bp, synthetic construct
  misc_feature 1..255: note = Description of Artificial Sequence: Synthetic coding sequence
  source 1..255: mol_type = other DNA
atggcccagagcaagctggactgccgcagccctgtgggcctggactgctgcaactgctgcctggacctggcccacaggagcggcctgcagaggggcagcagcggggagaacaacaaccctggcagccccaccgtgagcaacttccggcagctgcaggagaagctggtgtttgagaacctgaacacagacaagctgaacagcatcatgaggcaggacagcctggagcctgtgctgcgggacccctgctacctgtag

SEQ ID NO: 174660 - DNA, 603 bp, synthetic construct; identical to SEQ ID NO: 174648
  misc_feature 1..603: note = Description of Artificial Sequence: Synthetic coding sequence
  source 1..603: mol_type = other DNA

SEQ ID NO: 174661 - DNA, 303 bp, synthetic construct
  misc_feature 1..303: note = Description of Artificial Sequence: Synthetic coding sequence
  source 1..303: mol_type = other DNA
atggcccagagcaagctggactgccgcagccctgtgggcctggactgctgcaactgctgcctggacctggcccacaggagcggcctgcagaggggcagcagcggggagaacaacaaccctggcagccccaccgtgagcaacttccggcagctgcaggagaagctggtgtttgagaacctgaacacagacaagctgaacagcatcatgaggcaggacagcctggagcctgtgctgcgggacccctgctacctgatcaatgaaggcatctgcaacagaaacatcgaccagaccatgctgtcctag

SEQ ID NO: 174662 - DNA, 360 bp, synthetic construct
  misc_feature 1..360: note = Description of Artificial Sequence: Synthetic coding sequence
  source 1..360: mol_type = other DNA
atggcccagagcaagctggactgccgcagccctgtgggcctggactgctgcaactgctgcctggacctggcccacaggagcggcctgcagaggggcagcagcggggagaacaacaaccctggcagccccaccgtgagcaacttccggcagctgcaggagaagctggtgtttgagaacctgaacacagacaagctgaacagcatcatgaggcaggacagcctggagcctgtgctgcgggacccctgctacctgatcaatgaaggcatctgcaacagaaacatcgaccagaccatgctgagcatcctgctcttcttccacagcgccagcggggcctctgtggtggccatcgacaacaagtag

SEQ ID NO: 174663 - DNA, 399 bp, synthetic construct
  misc_feature 1..399: note = Description of Artificial Sequence: Synthetic coding sequence
  source 1..399: mol_type = other DNA
atgaggcaggacagcctggagcctgtgctgcgggacccctgctacctgatcaatgaaggcatctgcaacagaaacatcgaccagaccatgctgagcatcctgctcttcttccacagcgccagcggggcctctgtggtggccatcgacaacaagattgagcaggccatggacctggtgaagaaccacctgatgtatgctgtgcgggaggaggtggagatcctgaaggagcagatccgggagctggtggagaagaacagccagctggagcgggagaacaccctgctgaagaccctggccagccctgagcagctggagaagttccagagctgcctgagccctgaggagcccgcccctgagagcccccaggtgcctgaggcccctgggggcagcgctgtgtag

SEQ ID NO: 174664 - DNA, 375 bp, synthetic construct
  misc_feature 1..375: note = Description of Artificial Sequence: Synthetic coding sequence
  source 1..375: mol_type = other DNA
atggcccagagcaagctggactgccgcagccctgtgggcctggactgctgcaactgctgcctggacctggcccacaggagcggcctgcagaggggcagcagcggggagaacaacaaccctggcagccccaccgtgagcaacttccggcagctgcaggagaagctggtgtttgagaacctgaacacagacaagctgaacagcatcatgaggcaggacagcctggagcctgtgctgcgggacccctgctacctgatcaatgaaggcatctgcaacagaaacatcgaccagaccatgctgagcatcctgctcttcttccacagcgccagcggggcctctgtggtggccatcgacaacaagattgagcaggccatgtag

SEQ ID NO: 174665 - DNA, 1188 bp, synthetic construct
  misc_feature 1..1188: note = Description of Artificial Sequence: Synthetic coding sequence
  source 1..1188: mol_type = other DNA
atgtctgggggcaagaagaagagcagcttccagatcacctctgtgaccacagattatgagggccctggcagccctggggccagtgacccccccaccccccagcccccaactggacctccaccccggctgcccaatggagagcccagcccagaccccggcggcaagggcaccccaagaaatggcagccccccacctggggcccccagcagccgcttccgggtggtgaagctgccccacggcctgggggagccctaccgccggggccgctggacctgtgtggatgtgtatgaaagagacctggagccccacagctttggaggcctgctggagggcatccggggggccagcggcggggccggcggccgcagcctggacagccggctggagctggccagcctgggcctgggcgcccccaccccacccagcggcctgagccagggccccacctcctggctgcggcccccacccaccagccctggcccccaggcccgctccttcaccggcggcctgggccagctggtggtgcccagcaaggccaaggccgagaagccacccctgagcgccagcagcccccagcagaggcctcctgagcctgagaccggggagagcgctggcaccagcagagctgccacccccctgcccagcctgcgggtggaggccgaggccggcggcagcggggcccggaccccacccctgagcaggaggaaggctgtggacatgaggctgaggatggagctgggcgcccctgaggagatgggccaggtgccccccctggacagccggcccagcagccctgccctgtacttcacccatgatgccagcctggtgcacaagagcccagacccctttggagctgtggccgcccagaagttcagcctggcccacagcatgctggccatcagcggccacctggacagtgatgatgacagcggcagcggcagcctggtgggcatcgacaacaagattgagcaggccatggacctggtgaagagccacctgatgtttgctgtgcgggaggaggtggaggtgctgaaggagcagatccgggagctggccgagagaaatgctgccctggagcaggagaatggcctgctgcgggccctggccagccctgagcagctggcccagctgcccagcagcggcgtgccccggctgggccccccagccccaaatggccccagcgtgtag

SEQ ID NO: 174666 - DNA, 1314 bp, synthetic construct
  misc_feature 1..1314: note = Description of Artificial Sequence: Synthetic coding sequence
  source 1..1314: mol_type = other DNA
atgagcggcctggatggagtgaagaggaccacccccctgcagacccacagcatcatcatcagtgaccaggtgcccagcgaccaggatgcccaccagtacctgcggctgcgggaccagagcgaggccacccaggtgatggccgagcctggagagggcggcagcgagaccgtggccctgcccccacctcctccttctgaggagggcggcgtgccccaggatgctgctggccggggcggcaccccccagatccgggtggtgggcggccggggccacgtggccatcaaggccggccaggaggagggccagcccccagctgagggcctggccgccgcctctgtggtgatggctgctgacaggagcctgaagaagggcgtgcagggcggggagaaggccctggagatctgtggggcccagaggtctgccagcgagctgacagctggagctgaggccgaggccgaggaggtgaagacaggaaaatgtgccaccgtgtctgctgctgtggccgagcgggagagcgctgaggtggtgaaggagggcctggccgagaaggaggtgatggaggagcagatggaggtggaggagcagcccccagagggggaggagattgaggtggccgaggaggaccggctggaggaggaggcccgggaggaggagggcccctggcccctgcacgaggccctgaggatggaccccctggaggccatccagctggagctggacacagtgaatgcccaggccgaccgggccttccagcagctggagcacaagtttggaaggatgagaagacactacctggagaggaggaactacatcatccagaacatccctggcttctggatgacagccttcaggaaccacccccagctgagcgccatgatccggggccaggatgctgagatgctgcgctacatcaccaacctggaggtgaaggagctgcggcaccccaggacaggctgcaagttcaagttcttcttcagaagaaacccctacttcaggaacaagctgattgtgaaggagtatgaggtgcgcagcagcggccgggtggtgtccctgagcacccccatcatctggaggcggggccacgagccccagagcttcatcagaagaaaccaggacctgatctgcagcttcttcacctggttcagtgaccacagcctgcctgagagtgacaagattgctgagatcatcaaggaggacctgtggcccaaccccctgcagtactacctgctgcgggagggcgtgagaagagccaggagaagacccctgcgggagcctgtggagatcccccggcccttcggcttccagagcggctag

SEQ ID NO: 174667 - DNA, 522 bp, synthetic construct
  misc_feature 1..522: note = Description of Artificial Sequence: Synthetic coding sequence
  source 1..522: mol_type = other DNA
atgagcggcctggatggagtgaagaggaccacccccctgcagacccacagcatcatcatcagtgaccaggtgcccagcgaccaggatgcccaccagtacctgcggctgcgggaccagagcgaggccacccaggtgatggccgagcctggagagggcggcagcgagaccgtggccctgcccccacctcctccttctgaggagggcggcgtgccccaggatgctgctggccggggcggcaccccccagatccgggtggtgggcggccggggccacgtggccatcaaggccggccaggaggagggccagcccccagctgagggcctggccgccgcctctgtggtgatggctgctgacaggagcctgaagaagggcgtgcagggcggggagaaggccctggagatctgtggggcccagaggtctgccagcgagctgacagctggagctgaggccgaggccgaggaggtgaagacaggaaaatgtgccaccgtgtctgctgctgtggccaagatgcagcgctgctag

SEQ ID NO: 174668 - DNA, 2082 bp, synthetic construct
  misc_feature 1..2082: note = Description of Artificial Sequence: Synthetic coding sequence
  source 1..2082: mol_type = other DNA
atggacagaccagatgagggccccccagccaagacccggcggctgagcagcagcgagagcccccagagggaccccccacctcctcctcctcctccacccctgctgcggctgcccctgcccccaccccagcagaggccccggctgcaggaggagacagaggccgcccaggtgctggccgacatgagaggagtgggcctgggccctgccctgcccccacctccaccctacgtgatcctggaggagggcggcatccgggcctacttcaccctgggcgcagaatgtcctggctgggacagcaccattgaaagtggctatggagaggcccccccacccacagagagcctggaggccctgcccaccccagaggccagcggcggcagcctggagattgacttccaggtggtgcagagcagcagctttggaggagagggcgccctggagacctgcagcgctgtgggctgggccccccagaggctggtggaccccaagagcaaggaggaggccatcatcatcgtggaggatgaagatgaagatgagcgggagagcatgaggagcagcagaagaagaagaagaagaagaagaaggaagcagaggaaggtgaagcgggagagccgggagagaaatgctgagaggatggagagcatcctgcaggccctggaggacatccagctggacctggaggccgtgaacatcaaggccggcaaggccttcctgcggctgaagaggaagttcatccagatgaggcggcccttcctggagcggcgggacctgatcatccagcacatccctggcttctgggtgaaggccttcctgaaccacccccgcatcagcatcctgatcaacagaagagatgaggacatcttccgctacctgaccaacctgcaggtgcaggacctgcggcacatctccatgggctacaagatgaagctgtacttccagaccaacccctacttcaccaacatggtgattgtgaaggagttccagaggaacagaagtggccgcctggtgagccacagcacccccatccgctggcaccggggccaggagccccaggccaggagacatggcaaccaggatgccagccacagcttcttctcctggttcagcaaccacagcctgcctgaggccgacagaattgctgagatcatcaagaatgacctgtgggtgaaccccctgcgctactacctgcgggagcggggcagccgcatcaagaggaagaagcaggagatgaagaagaggaagacccggggccgctgtgaggtggtgatcatggaggatgccccagactactatgctgtggaggacatcttcagcgagatcagtgacattgatgagaccatccatgacatcaagatcagtgacttcatggagaccacagactactttgagaccacagacaatgagatcacagacatcaatgaaaacatctgtgacagcgagaacccagaccacaatgaggtgcccaacaatgagaccacagacaacaatgaatctgcagatgaccacgagaccacagacaacaatgaatctgcagatgacaacaatgaaaatcctgaggacaacaacaagaacacagatgacaatgaggagaaccccaacaacaatgaaaacacctacggcaacaacttcttcaagggcggcttctggggcagccacggcaacaaccaggacagcagtgacagcgacaatgaagcagatgaggccagtgatgatgaggacaatgatggaaatgaaggagacaatgaaggaagtgatgatgatggaaatgaaggagacaatgaaggaagtgatgatgatgaccgggacatcgagtactatgagaaggtgattgaagattttgacaaggaccaggccgactatgaagatgtgattgagatcatcagtgatgaatctgtggaggaggagggcatcgaggagggcatccagcaggatgaggacatctatgaggagggcaactatgaggaggagggctctgaagatgtgtgggaggagggggaggacagtgatgacagcgacctggaggatgtgctgcaggtgcccaacggctgggccaaccctgggaagaggggcaagacaggatag

SEQ ID NO: 174669 - DNA, 1062 bp, synthetic construct
  misc_feature 1..1062: note = Description of Artificial Sequence: Synthetic coding sequence
  source 1..1062: mol_type = other DNA
atgccctggcccctgctgctgctgctggccgtgtctggggcccagaccacccggccctgcttccctggctgccagtgtgaggtggagaccttcggcctgtttgacagcttcagcctgaccagggtggactgcagcggcctgggcccccacatcatgcctgtgcccatccccctggacacagcccacctggacctgagcagcaaccggctggagatggtgaatgaatctgtgctggccggccctggctacaccaccctggccggcctggacctgagccacaacctgctgaccagcatcagccccacagccttcagccggctgcgctacctggagagcctggacctgagccacaacggcctgacagccctgcctgctgagagcttcaccagcagccccctgagtgatgtgaacctgagccacaaccagctgcgggaggtgtctgtgtctgccttcaccacccacagccagggccgggccctgcacgtggacctgagccacaacctgatccaccggctggtgccccaccccaccagggctggcctgcctgcccccaccatccagagcctgaacctggcctggaaccggctgcatgctgtgcccaacctgcgggacctgcccctgcgctacctgagcctggatggcaaccccctggccgtcatcggccctggggcctttgctggcctgggcggcctgacccacctgagcctggccagcctgcagaggctgcctgagctggcccccagcggcttccgggagctgcccggcctgcaggtgctggacctgagcggcaaccccaagctgaactgggccggggctgaggtgttcagcggcctgagcagcctgcaggagctggacctgagcggcaccaacctggtgcccctgcctgaggccctgctgctgcacctgcctgccctgcagagcgtgtctgtgggccaggatgtgcgctgccggcggctggtgcgggagggcacctaccccaggaggcctggcagcagccccaaggtggccctgcactgtgtggacacccgggacagcgctgcccggggccccaccatcctgtag

SEQ ID NO: 174670 - DNA, 966 bp, synthetic construct
  misc_feature 1..966: note = Description of Artificial Sequence: Synthetic coding sequence
  source 1..966: mol_type = other DNA
atgccctggcccctgctgctgctgctggccgtgtctggggcccagaccacccggccctgcttccctggctgccagtgtgaggtggagaccttcggcctgtttgacagcttcagcctgaccagggtggactgcagcggcctgggcccccacatcatgcctgtgcccatccccctggacacagcccacctggacctgagcagcaaccggctggagatggtgaatgaatctgtgctggccggccctggctacaccaccctggccggcctggacctgagccacaacctgctgaccagcagccccctgagtgatgtgaacctgagccacaaccagctgcgggaggtgtctgtgtctgccttcaccacccacagccagggccgggccctgcacgtggacctgagccacaacctgatccaccggctggtgccccaccccaccagggctggcctgcctgcccccaccatccagagcctgaacctggcctggaaccggctgcatgctgtgcccaacctgcgggacctgcccctgcgctacctgagcctggatggcaaccccctggccgtcatcggccctggggcctttgctggcctgggcggcctgacccacctgagcctggccagcctgcagaggctgcctgagctggcccccagcggcttccgggagctgcccggcctgcaggtgctggacctgagcggcaaccccaagctgaactgggccggggctgaggtgttcagcggcctgagcagcctgcaggagctggacctgagcggcaccaacctggtgcccctgcctgaggccctgctgctgcacctgcctgccctgcagagcgtgtctgtgggccaggatgtgcgctgccggcggctggtgcgggagggcacctaccccaggaggcctggcagcagccccaaggtggccctgcactgtgtggacacccgggacagcgctgcccggggccccaccatcctgtag

SEQ ID NO: 174671 - DNA, 318 bp, synthetic construct
  misc_feature 1..318: note = Description of Artificial Sequence: Synthetic coding sequence
  source 1..318: mol_type = other DNA
atgccctggcccctgctgctgctgctggccgtgtctggggcccagaccacccggccctgcttccctggctgccagtgtgaggtggagaccttcggcctgtttgacagcttcagcctgaccagggtggactgcagcggcctgggcccccacatcatgcctgtgcccatccccctggacacagcccacctggacctgagcagcaaccggctggagatggtgaatgaatctgtgctggccggccctggctacaccaccctggccggcctggacctgagccacaacctgctgaccagcatcagccccacagccttctcctag

SEQ ID NO: 174672 - DNA, 1062 bp, synthetic construct; identical to SEQ ID NO: 174669
  misc_feature 1..1062: note = Description of Artificial Sequence: Synthetic coding sequence
  source 1..1062: mol_type = other DNA

SEQ ID NO: 174673 - DNA, 453 bp, synthetic construct
  misc_feature 1..453: note = Description of Artificial Sequence: Synthetic coding sequence
  source 1..453: mol_type = other DNA
atgccctggcccctgctgctgctgctggccgtgtctggggcccagaccacccggccctgcttccctggctgccagtgtgaggtggagaccttcggcctgtttgacagcttcagcctgaccagggtggactgcagcggcctgggcccccacatcatgcctgtgcccatccccctggacacagcccacctggacctgagcagcaaccggctggagatggtgaatgaatctgtgctggccggccctggctacaccaccctggccggcctggacctgagccacaacctgctgaccagcatcagccccacagccttcagccggctgcgctacctggagagcctggacctgagccacaacggcctgacagccctgcctgctgagagcttcaccagcagccccctgagtgatgtgaacctgagccacaaccagctgcgggaggtgtctgtgtctgcctag

SEQ ID NO: 174674 - DNA, 2574 bp, synthetic construct
  misc_feature 1..2574: note = Description of Artificial Sequence: Synthetic coding sequence
  source 1..2574: mol_type = other DNA
atggagagcgaggacctgagcggccgggagctgaccatcgacagcatcatgaacaaggtgcgggacatcaagaacaagttcaagaatgaagacctgacagatgagctgagcctgaacaagatctctgctgacaccacagacaacagcggcaccgtgaaccagatcatgatgatggccaacaaccctgaggactggctgagcctgctgctgaagctggagaagaacagcgtgcccctgagtgatgccctgctgaacaagctgattggccgctacagccaggccatcgaggccctgcccccagacaagtatggccagaatgaaagctttgcccgcatccaggtgcgctttgctgagctgaaggccatccaggagccagatgatgcccgggactacttccagatggcccgggccaactgcaagaagtttgcctttgtgcacatcagctttgcccagtttgagctgagccagggcaatgtgaagaagagcaagcagctgctgcagaaggctgtggagagaggagctgtgcccctggagatgctggagatcgccctgaggaacctgaacctgcagaagaagcagctgctgtctgaggaggagaagaagaacctgagcgccagcacagtgctgacagcccaggagagcttcagcggcagcctgggccacctgcagaacagaaacaacagctgtgacagccggggccagaccaccaaggcccgcttcctgtatggagagaacatgccaccccaggatgctgagatcggctacagaaacagcctgcggcagaccaacaagaccaagcagagctgccccttcggccgggtgcctgtgaacctgctgaacagcccagactgtgatgtgaagacagatgattctgtggtgccctgcttcatgaagaggcagaccagccgctcagaatgtcgggacctggtggtgcccggcagcaagcccagcggaaatgacagctgtgagctgaggaacctgaagtctgtgcagaacagccacttcaaggagcccctggtgtctgatgagaagagcagcgagctgatcatcacagacagcatcaccctgaagaacaagacagagagcagcctgctggccaagctggaggagaccaaggagtaccaggagcctgaggtgcctgagagcaaccagaagcagtggcagagcaagaggaagtctgagtgcatcaaccagaacccagctgccagcagcaaccactggcagatccctgagctggccaggaaggtgaacacagagcagaagcacaccacctttgagcagcccgtcttctctgtgtccaagcagagcccccccatcagcaccagcaagtggtttgaccccaagagcatctgcaagacccccagcagcaacaccctggatgactacatgagctgcttccgcacccctgtggtgaagaatgacttccccccagcctgccagctgagcaccccctacggccagcctgcctgcttccagcagcagcagcaccagatcctggccacccccctgcagaacctgcaggtgctggccagcagcagcgccaatgaatgcatctctgtgaagggccgcatctacagcatcctgaagcagatcggcagcggcggcagcagcaaggtgttccaggtgctgaatgagaagaagcagatctatgccatcaagtatgtgaacctggaggaggccgacaaccagaccctggacagctacagaaatgagatcgcctacctgaacaagctgcagcagcacagcgacaagatcatccggctgtatgactatgagatcacagaccagtacatctacatggtgatggagtgtggcaacatcgacctgaacagctggctgaagaagaagaagagcattgacccctgggagaggaagagctactggaagaacatgctggaggccgtgcacaccatccaccagcacggcatcgtgcacagcgacctgaagccagccaacttcctgattgtggatggcatgctgaagctgattgactttggaattgccaaccagatgcagcctgacaccacctctgtggtgaaggacagccaggtgggcaccgtgaactacatgcctcctgaggccatcaaggacatgagcagcagcagagaaaatggcaagagcaagagcaagatcagccccaagagtgatgtgtggagcctgggctgcatcctgtactacatgacctacggcaagacccccttccagcagatcatcaaccagatcagcaagctgcacgccatcatcgaccccaaccacgagattgagttcccagacatccctgagaaggacctgcaggatgtgctgaagtgctgcctgaagagggaccccaagcagaggatcagcatccctgagctgctggcccacccctacgtgcagatccagacccaccctgtgaaccagatggccaagggcaccacagaggagatgaagtatgtgctgggccagctggtgggcctgaacagccccaacagcatcctgaaggccgccaagaccctgtatgagcactacagcggcggggagagccacaacagcagcagcagcaagacctttgagaagaagaggggcaagaagtag

SEQ ID NO: 174675 - DNA, 420 bp, synthetic construct
  misc_feature 1..420: note = Description of Artificial Sequence: Synthetic coding sequence
  source 1..420: mol_type = other DNA
atggagagcgaggacctgagcggccgggagctgaccatcgacagcatcatgaacaaggtgcgggacatcaagaacaagttcaagaatgaagacctgacagatgagctgagcctgaacaagatctctgctgacaccacagacaacagcggcaccgtgaaccagatcatgatgatggccaacaaccctgaggactggctgagcctgctgctgaagctggagaagaacagcgtgcccctgagtgatgccctgctgaacaagctgattggccgctacagccaggccatcgaggccctgcccccagacaagtatggccagaatgaaagctttgcccgcatccaggtgcgctttgctgagctgaaggccatccaggagccagatgatgcccgggactacttccagatggcccgggccaactgctag

SEQ ID NO: 174676 - DNA, 531 bp, synthetic construct
  misc_feature 1..531: note = Description of Artificial Sequence: Synthetic coding sequence
  source 1..531: mol_type = other DNA
atggagagcgaggacctgagcggccgggagctgaccatcgacagcatcatgaacaaggtgcgggacatcaagaacaagttcaagaatgaagacctgacagatgagctgagcctgaacaagatctctgctgacaccacagacaacagcggcaccgtgaaccagatcatgatgatggccaacaaccctgaggactggctgagcctgctgctgaagctggagaagaacagcgtgcccctgagtgatgccctgctgaacaagctgattggccgctacagccaggccatcgaggccctgcccccagacaagtatggccagaatgaaagctttgcccgcatccaggtgcgctttgctgagctgaaggccatccaggagccagatgatgcccgggactacttccagatggcccgggccaactgcaagaagtttgcctttgtgcacatcagctttgcccagtttgagctgagccagggcaatgtgaagaagagcaagcagctgctgcagaaggctgtggagagaggagctgtgccctag

SEQ ID NO: 174677 - DNA, 453 bp, synthetic construct
  misc_feature 1..453: note = Description of Artificial Sequence: Synthetic coding sequence
  source 1..453: mol_type = other DNA
atggagagcgaggacctgagcggccgggagctgaccatcgacagcatcatgaacaaggtgcgggacatcaagaacaagttcaagaatgaagacctgacagatgagctgagcctgaacaagatctctgctgacaccacagacaacagcggcaccgtgaaccagatcatgatgatggccaacaaccctgaggactggctgagcctgctgctgaagctggagaagaacagcgtgcccctgagtgatgccctgctgaacaagctgattggccgctacagccaggccatcgaggccctgcccccagacaagtatggccagaatgaaagctttgcccgcatccaggtgcgctttgctgagctgaaggccatccaggagccagatgatgcccgggactacttccagatggcccgggccaactgcaagaagtttgcctttgtgcacatcagctttgcctag

SEQ ID NO: 174678 - DNA, 492 bp, synthetic construct
  misc_feature 1..492: note = Description of Artificial Sequence: Synthetic coding sequence
  source 1..492: mol_type = other DNA
atggccgagggcggcggccagaaccaccacgaggtggtgaagttcatggatgtgtaccagaggagctactgccaccccatcgagaccctggtggacatcttccaggagtacccagatgaaattgagtacatcttcaagcccagctgtgtgcccctgatgagatgtggcggctgctgcaatgatgagggcctggagtgtgtgcccacagaggagagcaacatcaccatgcagatcatgaggatcaagccccaccagggccagcacatcggggagatgtccttcctgcagcacaacaagtgtgaatgtcggcccaagaaggaccgggcccggcaggagaacccctgtggcccctgcagcgagaggaggaagcacctgtttgtgcaggacccccagacctgcaagtgcagctgcaagaacacagacagccgctgcaaggcccggcagctggagctgaatgaaagaacctgccgctgtgacaagcccaggaggtag

SEQ ID NO: 174679 - DNA, 1368 bp, synthetic construct
  misc_feature 1..1368: note = Description of Artificial Sequence: Synthetic coding sequence
  source 1..1368: mol_type = other DNA
atgaccaccatggccgccgccaccctgctgcgggccaccccccacttcagcggcctggccgccggccgcaccttcctgctgcagggcctgctgcggctgctgaaggccccagccctgcccctgctgtgccggggcctggccgtggaggccaagaagacctacgtgcgggacaagccccacgtgaatgtgggcaccatcggccacgtggaccacggcaagaccaccctgacagctgccatcaccaagatcctggccgagggcggcggggccaagttcaagaagtatgaggagattgacaatgcccctgaggagcgggcccggggcatcaccatcaatgctgcccacgtggagtacagcacagctgcccggcactacgcccacacagactgccccggccacgccgactatgtgaagaacatgatcaccggcacagcccccctggatggctgcatcctggtggtggccgccaatgatggccccatgccccagacccgggagcacctgctgctggcccggcagatcggcgtggagcacgtggtggtgtatgtgaacaaggcagatgctgtgcaggacagcgagatggtggagctggtggagctggagatccgggagctgctgacagaatttggctacaagggggaggagacccctgtgattgtgggcagcgccctgtgtgccctggagggccgggaccctgagctgggcctgaagtctgtgcagaagctgctggatgctgtggacacctacatccctgtgcctgcccgggacctggagaagcccttcctgctgcctgtggaggccgtgtacagcgtgcccggccggggcaccgtggtgacaggcaccctggagcggggcatcctgaagaagggagatgaatgtgagctgctgggccacagcaagaacatcagaacagtggtgactggaattgagatgttccacaagagcctggagagagctgaggccggggacaacctgggcgccctggtgcggggcctgaagcgggaggacctgcggcggggcctggtgatggtgaagccaggcagcatcaagccccaccagaaggtggaggcccaggtgtacatcctgagcaaggaggagggcggccgccacaagccctttgtgagccacttcatgcctgtgatgttcagcctgacctgggacatggcctgccgcatcatcctgcccccagagaaggagctggccatgcctggagaggacctgaagttcaacctgatcctgcggcagcccatgatcctggagaagggccagcgcttcaccctgagagatggcaacagaaccatcggcaccggcctggtgaccaacaccctggccatgacagaggaggagaagaacatcaagtggggctag

SEQ ID NO: 174680 - DNA, 1611 bp, synthetic construct
  misc_feature 1..1611: note = Description of Artificial Sequence: Synthetic coding sequence
  source 1..1611: mol_type = other DNA
atggccaccccagatgctggcctgcctggagctgagggcgtggagcccgccccctgggcccagctggaggccccagcccggctgctgctgcaggccctgcaggccggccctgagggcgcccggcggggcctgggcgtgctgcgggccctgggcagccggggctgggagccctttgactggggccgcctgctggaggccctgtgccgggaggagcctgtggtgcagggcccagatggccgcctggagctgaagcccctgctgctgcggctgccccgcatctgccagaggaacctgatgagcctgctgatggctgtgcggcccagcctgcctgagagcggcctgctgtctgtgctgcagatcgcccagcaggacctggccccagaccctgatgcctggctgcgggccctgggggagctgctgcggcgggacctgggcgtgggcacctccatggagggcgccagccccctgtctgagcgctgccagaggcagctgcagagcctgtgccggggcctgggcctgggcggccggcggctgaagagcccccaggccccagaccctgaggaggaggagaacagagacagccagcagcccgggaagaggaggaaggacagcgaggaggaggccgccagccctgagggcaagagggtgcccaagaggctgcgctgctgggaggaggaggaggaccacgagaaggagaggcctgagcacaagagcctggagagcctggctgatggcggcagcgccagccccatcaaggaccagcctgtgatggctgtgaagacaggagaagatggcagcaacctggatgatgccaagggcctggccgagagcctggagctgcccaaggccatccaggaccagctgccccggctgcagcagctgctgaagaccctggaggagggcctggagggcctggaggatgcccctcctgtggagctgcagctgctgcacgagtgcagccccagccagatggacctgctgtgtgcccagctgcagctgccccagctgagtgacctgggcctgctgcggctgtgcacctggctgctggccctgagcccagacctgagcctgagcaatgccaccgtgctgaccaggagcctcttcctgggccgcatcctgagcctgaccagcagcgccagccggctgctgaccacagccctgaccagcttctgtgccaagtacacctaccctgtgtgcagcgccctgctggaccctgtgctgcaggcccctggcaccggccctgcccagacagagctgctgtgctgcctggtgaagatggagagcctggagccagatgcccaggtgctgatgctgggccagatcctggagctgccctggaaggaggagaccttcctggtgctgcagagcctgctggagcggcaggtggagatgaccccagagaagttctctgtgctgatggagaagctgtgcaagaagggcctggccgccaccacctccatggcctatgccaagctgatgctgactgtgatgaccaagtaccaggccaacatcacagagacccagaggctgggcctggccatggccctggagcccaacaccaccttcctgaggaagagcctgaaggccgccctgaagcacctgggcccctag

SEQ ID NO: 174681 - DNA, 1470 bp, synthetic construct
  misc_feature 1..1470: note = Description of Artificial Sequence: Synthetic coding sequence
  source 1..1470: mol_type = other DNA
atgcccctgagagatgagaccctgcgggaggtgtgggccagtgacagcggccacgaggaggagagcctgagccctgaggccccccggcggcccaagcagaggcctgccccagcccagaggctgaggaagaagaggacagaggcccctgagagcccctgccccaccggcagcaagcccaggaagccaggagaggaggaggaggaggaggaggatgaagaagatgaggaggaggaggccgaggagaagaaggagaagatcctgctgccccccaagaagcccctgcgggagaagagcagcgctgacctgaaggagcggcgggccaaggcccagggccccaggggggacctgggcagcccagaccccccacccaagcccctgcgggtgaggaacaaggaggccccagctggggagggcaccaagatgaggaagaccaagaagaagggcagcggggaggccgacaaggaccccagcggcagccctgccagcgccaggaagagccctgctgccatgttcctggtgggggagggcagcccagacaagaaggccctgaagaagaagggcacccccaagggggccaggaaggaggaggaggaggaggaggaggccgccaccgtcatcaagaagagcaaccagaagggcaaggccaagggcaagggcaagaagaaggccaaggaggagcgggcccccagcccccctgtggaggtggatgagccccgggagtttgtgctgcggcctgccccccagggccgcacagtgcgctgccgcctgacccgggacaagaagggcatggaccggggcatgtaccccagctacttcctgcacctggacacagagaagaaggtgttcctgctggccggcaggaagaggaagaggagcaagacagccaactacctgatcagcattgaccccaccaacctgagcagaggaggagagaacttcatcggcaagctgcggagcaacctgctgggcaaccgcttcaccgtgtttgacaatggccagaacccccagaggggctacagcaccaacgtggccagcctgcggcaggagctggccgccgtcatctatgagaccaacgtgctgggcttccggggccccaggaggatgaccgtcatcatccctggcatgtctgcagaaaatgaaagagtgcccatccggcccagaaatgccagtgatggcctgctggtgcgctggcagaacaagaccctggagagcctcatcgagctgcacaacaagccccctgtgtggaatgatgattctggcagctacaccctgaacttccagggccgggtgacccaggcctctgtgaagaacttccagatcgtgcatgctgatgatcctgactacatcgtgctgcagtttggccgggtggccgaggatgccttcaccctggactaccgctaccccctgtgtgccctgcaggcctttgccatcgccctgagcagctttgatggcaagctggcctgtgagtag

SEQ ID NO: 174682 - DNA, 561 bp, synthetic construct
  misc_feature 1..561: note = Description of Artificial Sequence: Synthetic coding sequence
  source 1..561: mol_type = other DNA
atgcccctgagagatgagaccctgcgggaggtgtgggccagtgacagcggccacgaggaggagagcctgagccctgaggccccccggcggcccaagcagaggcctgccccagcccagaggctgaggaagaagaggacagaggcccctgagagcccctgccccaccggcagcaagcccaggaagccaggagaggaggaggaggaggaggaggatgaagaagatgaggaggaggaggccgaggagaagaaggagaagatcctgctgccccccaagaagcccctgcgggagaagagcagcgctgacctgaaggagcggcgggccaaggcccagggccccaggggggacctgggcagcccagaccccccacccaagcccctgcgggtgaggaacaaggaggccccagctggggagggcaccaagatgaggaagaccaagaagaagggcagcggggaggccgacaaggaccccagcggcagccctgccagcgccaggaagagccctgctgccatgttcctggtgggggagggcagcccagacaagaaggccctgaagaagaagtag

SEQ ID NO: 174683 - DNA, 3033 bp, synthetic construct
  misc_feature 1..3033: note = Description of Artificial Sequence: Synthetic coding sequence
  source 1..3033: mol_type = other DNA
atgggcgcctatgcccgggccagcggcgtgtgtgcccggggctgcctggacagcgctggcccctggaccatgagccgggccctgcggccccccctgccccccctgtgcttcttcctgctgctgctggccgctgctggggcccgggccggcggctatgagacctgccccaccgtgcagcccaacatgctgaatgtgcacctgctgccccacacccatgatgatgtgggctggctgaagacagtggaccagtacttctacggcatcaagaatgacatccagcacgccggcgtgcagtacatcctggacagcgtcatcagcgccctgctggccgaccccacccggcgcttcatctacgtggagatcgccttcttcagccgctggtggcaccagcagaccaatgccacccaggaggtggtgcgggacctggtgcggcagggccgcctggagtttgccaacggcggctgggtgatgaatgatgaagctgccacccactatggagccatcgtggaccagatgaccctgggcctgcgcttcctggaggacacctttggaaatgatggccggccccgggtggcctggcacatcgaccccttcggccacagccgggagcaggccagcctgtttgcccagatgggctttgatggcttcttcttcggccgcctggactaccaggacaagtgggtgaggatgcagaagctggagatggagcaggtgtggagggccagcaccagcctgaagcccccaacagctgacctcttcaccggggtgctgcccaacggctacaaccccccaagaaacctgtgctgggatgtgctgtgtgtggaccagcccctggtggaggaccccaggagccctgagtacaatgccaaggagctggtggactacttcctgaatgtggccacagcccagggccgctactaccgcaccaaccacacagtgatgaccatgggcagtgacttccagtatgaaaatgccaacatgtggttcaagaacctggacaagctgatccggctggtgaatgcccaggccaagggcagctctgtgcacgtgctgtacagcaccccagcctgctacctgtgggagctgaacaaggccaacctgacctggagcgtgaagcatgatgacttcttcccctatgcagatggcccccaccagttctggacaggctacttcagcagcaggcctgccctgaagagatatgaaaggctgagctacaacttcctgcaggtgtgcaaccagctggaggccctggtgggcctggccgccaacgtgggcccctacggcagcggggacagcgcccccctgaatgaggccatggctgtgctgcagcaccatgatgctgtgtctggcaccagccggcagcacgtggccaatgactatgcccggcagctggccgccggctggggcccctgtgaggtgctgctgagcaatgccctggcccggctgcggggcttcaaggaccacttcaccttctgccagcagctgaacatcagcatctgccccctgagccagacagctgcccgcttccaggtgattgtgtacaaccccctgggcaggaaggtgaactggatggtgcggctgcctgtgtctgagggcgtgtttgtggtgaaggaccccaacggccgcacagtgcccagtgatgtggtgatcttccccagcagtgacagccaggcccaccccccagagctgctcttcagcgccagcctgcctgccctgggcttcagcacctacagcgtggcccaggtgccccgctggaagccccaggcccgggccccccagcccatccccaggaggtcctggagccctgccctgaccattgaaaatgagcacatccgggccacctttgatcctgacaccggcctgctgatggagatcatgaacatgaaccagcagctgctgctgcctgtgcggcagaccttcttctggtacaatgccagcattggagacaatgaaagtgaccaggccagcggggcctacatcttccggcccaaccagcagaagcccctgcctgtgagccgctgggcccagatccacctggtgaagacccccctggtgcaggaggtgcaccagaacttcagcgcctggtgcagccaggtggtgcggctgtacccaggccagaggcacctggagctggagtggagcgtgggccccatccctgtgggggacacctggggcaaggaggtgatcagcagatttgacacccccctggagaccaagggccgcttctacacagacagcaatggccgggagatcctggagaggagaagagactaccggcccacctggaagctgaaccagacagagcctgtggccggcaactactaccctgtgaacacccgcatctacatcacagatggcaacatgcagctgactgtgctgacagacaggagccagggcggcagcagcctgagagatggcagcctggagctgatggtgcaccggcggctgctgaaggatgatggccggggcgtgtctgagcccctgatggagaatggaagtggggcctgggtgcggggccgccacctggtgctgctggacacagcccaggccgctgctgctggccaccggctgctggccgagcaggaggtgctggccccccaggtggtgctggcccctgggggcggggccgcctacaacctgggcgccccacccaggacccagttcagcggcctgcggcgggacctgccccccagcgtgcacctgctgaccctggcctcctggggccctgagatggtgctgctgcggctggagcaccagtttgctgtgggggaggacagcggcaggaacctgagcgcccctgtgaccctgaacctgcgggacctcttcagcaccttcaccatcacccggctgcaggagaccaccctggtggccaaccagctgcgggaggccgccagccggctgaagtggaccaccaacacaggccccaccccccaccagaccccctaccagctggaccctgccaacatcaccctggagcccatggagatccgcaccttcctggcctctgtgcagtggaaggaggtggatggatag

SEQ ID NO: 174684 - DNA, 1158 bp, synthetic construct
  misc_feature 1..1158: note = Description of Artificial Sequence: Synthetic coding sequence
  source 1..1158: mol_type = other DNA
atgcacgtgtgtgtgtgtgtgtgtgtgtgtgtgtacatgcctgtgtgtgtggatgcctgcatgtgctgtgaggccggccggcctgccttccgctccttcctgttcagcctgtgcagcgacctgggcgctgtgatcagcctgctgctgtggggccggcagctgtttgccctgtacagcggaaatgatgtgacagacatcagtgatgaccgcttccccaagcccccagaaattgccaacggctacgtggagcacctgttccgctaccagtgcaagaactactaccgcctgaggacagaaggagatggagtgtacaccctgaatgacaagaagcagtggatcaacaaggctgtgggggacaagctgcctgaatgtgaggccgtgtgtgggaagcccaagaacccagccaaccctgtgcagaggatcctgggcggccacctggatgccaagggcagcttcccctggcaggccaagatggtgagccaccacaacctgaccaccggggccaccctcatcaatgagcagtggctgctgaccacagccaagaacctcttcctgaaccacagtgaaaatgccacagccaaggacatcgcccccaccctgaccctgtatgtgggcaagaagcagctggtggagattgagaaggtggtgctgcaccccaactaccaccaggtggacatcggcctcatcaagctgaagcagaaggtgctggtgaatgaaagagtgatgcccatctgcctgcccagcaagaactatgcagaggtgggccgggtgggctacgtgtctggctggggccagagcgacaacttcaagctgacagaccacctgaagtatgtgatgctgcctgtggccgaccagtatgactgcatcacccactatgagggcagcacctgccccaagtggaaggcccccaagagccctgtgggcgtgcagcccatcctgaatgagcacaccttctgtgtgggcatgagcaagtaccaggaggacacctgctatggagatgctggcagcgcctttgctgtgcatgacctggaggaggacacctggtacgccgccggcatcctgagctttgacaagagctgtgctgtggccgagtatggagtgtatgtgaaggtgaccagcatccagcactgggtgcagaagaccatcgccgagaactag

SEQ ID NO: 174685 - DNA, 1329 bp, synthetic construct; identical to SEQ ID NO: 148061
  misc_feature 1..1329: note = Description of Artificial Sequence: Synthetic coding sequence
  source 1..1329: mol_type = other DNA

SEQ ID NO: 174686 - DNA, 513 bp, synthetic construct
  misc_feature 1..513: note = Description of Artificial Sequence: Synthetic coding sequence
  source 1..513: mol_type = other DNA
atgatgaagatgaggcaggccaagctggactaccagaggctgctgctggagaagaggcagaggaagaagaggctggagcccttcatggtgcagcccaaccctgaggcccggctgcggcgggccaagccccgggccagtgatgagcagacccccctggtgaactgccacaccccccacagcaatgtcatcctgcatggaattgatggccctgctgctgtgctgaagccagatgaggtgcacgcccccagcgtgagcagctctgtggtggaggaggatgctgagaacacagtggacacagccagcaagccaggcctgcaggagcggctgcagaagcatgacatcagcgagagcgtgaactttgatgaggagacagatggcatcagccagagcgcctgcctggagcggcccaacagcgccagcagccagaacagcaccttcagcagcttctgccagaagacagaggacaccggctaccgccacttccgcttctgctactgccggcccaccagctag

SEQ ID NO: 174687 - DNA, 801 bp, synthetic construct
  misc_feature 1..801: note = Description of Artificial Sequence: Synthetic coding sequence
  source 1..801: mol_type = other DNA
atgctgaagaccccctggatcctgctgcccagccaggacttccgctctgtgtccaagtccatggacaccggcaccagcggcagcgccacagctgcccagcctgctgacaacctgctgggggacattgatgacctggaggactttgtgtacagccctgccccccagggcgtgacagtgcgctgccgcatcatccgggacaagaggggcatggaccggggcctcttccccacctactacatgtacctggagaaggaggagaaccagaagatcttcctgctggccgccaggaagaggaagaagagcaagacagccaactacctgatcagcattgatcctgtggacctgagccgggagggggagagctatgtgggcaagctgcggagcaacctgatgggcaccaagttcaccgtgtatgaccggggcatctgccccatgaagggccggggcctggtgggcgccgcccacacccggcaggagctggccgccatctcctacaaccacgacagcctgctgagccgctggcagaacagaaccatggagaacctggtggagctgcacaacaaggcccctgtgtggaacagcgacacccagagctatgtgctgaacttccggggccgggtgacccaggcctctgtgaagaacttccagatcgtgcacaagaatgaccctgactacatcgtgatgcagtttggccgggtggctgatgatgtgttcaccctggactacaactaccccctgtgtgctgtgcaggccttcggcatcggcctgagcagctttgacagcaagctggcctgtgagtag

SEQ ID NO: 174688 - DNA, 1506 bp, synthetic construct
  misc_feature 1..1506: note = Description of Artificial Sequence: Synthetic coding sequence
  source 1..1506: mol_type = other DNA
atggaggccagccgctgccgcctgagccccagcggggacagcgtcttccacgaggagatgatgaagatgaggcaggccaagctggactaccagaggctgctgctggagaagaggcagaggaagaagaggctggagcccttcatggtgcagcccaaccctgaggcccggctgcggcgggccaagccccgggccagtgatgagcagacccccctggtgaactgccacaccccccacagcaatgtcatcctgcacggcattgatggccctgctgctgtgctgaagccagatgaggtgcacgcccccagcgtgagcagctctgtggtggaggaggatgctgaaaatacagtggacacagccagcaagccaggcctgcaggagcggctgcagaagcatgacatcagcgagagcgtgaactttgatgaggagacagatggcatcagccagagcgcctgcctggagcggcccaacagcgccagcagccagaacagcacagacaccggcaccagcggcagcgccacagctgcccagcctgctgacaacctgctgggggacattgatgacctggaggactttgtgtacagccctgccccccagggcgtgacagtgcgctgccgcatcatccgggacaagaggggcatggaccggggcctcttccccacctactacatgtacctggagaaggaggagaaccagaagatcttcctgctggccgccaggaagaggaagaagagcaagacagccaactacctgatcagcattgatcctgtggacctgagccgggagggggagagctatgtgggcaagctgcggagcaacctgatgggcaccaagttcaccgtgtatgaccggggcatctgccccatgaagggccggggcctggtgggcgccgcccacacccggcaggagctggccgccatctcctatgagaccaacgtgctgggcttcaagggccccaggaagatgtctgtcatcatccctggcatgaccctgaaccacaagcagatcccctaccagccccagaacaaccacgacagcctgctgagccgctggcagaacagaaccatggagaacctggtggagctgcacaacaaggcccctgtgtggaacagcgacacccagagctatgtgctgaacttccggggccgggtgacccaggcctctgtgaagaacttccagatcgtgcacaagaatgaccctgactacatcgtgatgcagtttggccgggtggctgatgatgtgttcaccctggactacaactaccccctgtgtgctgtgcaggccttcggcatcggcctgagcagctttgacaagtgcatccagaccctgaggatgcaggagctgtgtgagctgcaccggcagcaccacagcgctgccagcctggtgcacaggacagtgtgccagcgctgggtgggccacccctggaggctgctgccccagaccagcctgctgtggacagacctgagccccccacctgtggtgcctgccccccaccagatctccatgtag

SEQ ID NO: 174689 - DNA, 1269 bp, synthetic construct
  misc_feature 1..1269: note = Description of Artificial Sequence: Synthetic coding sequence
  source 1..1269: mol_type = other DNA
atggccctgagtgatgagcctgctgctgggggccctgaggaggaggctgaagatgagaccctggcctttggagctgccctggaggccttcggggagagcgctgagacccgggccctgctgggccgcctgcgggaggtgcatggaggcggcgctgagcgggaggtggccctggagcgcttccgggagtggatgatgaacctgctgctggacatcgtgcaggaccagaccagccctgccagcctggtgcacctggccttcaagttcctgtacatcatcaccaaggtgcggggctacaagaccttcctgcggctcttcccccatgaggtggctgatgtggagcctgtgctggacctggtgaccatccagaaccccaaggaccacgaggcctgggagacccgctacatgctgctgctgtggctgtctgtgacctgcctgatcccctttgacttcagccggctggatggcaacctgctgacccagcccggccaggccaggatgagcatcatggaccgcatcctgcagattgctgagagctacctgattgtgtctgacaaggccagagatgctgctgctgtgctggtgagccgcttcatcaccaggccagatgtgaagcagagcaagatggccgagttcctggactggagcctgtgcaacctggcccggagcagcttccagaccatgcagggcgtcatcaccatggatggcaccctgcaggccctggcccagatcttcaagcacggcaagcgggaggactgcctgccctatgctgccaccgtgctgcgctgcctggatggctgccgcctgcctgagagcaaccagaccctgctgaggaagctgggcgtgaagctggtgcagaggctgggcctgaccttcctgaagcccaaggtggccgcctggagataccagaggggctgccgcagcctggccgccaacctgcagctgctgacccagggccagagcgagcagaagcccctcatcctgacagaagatgatgatgaagatgatgatgtgcctgagggcgtggagcgggtgattgagcagctgctggtgggcctgaaggacaaggacacagtggtgcgctggagcgctgccaagggcattggaaggatggccggccgcctgccccgggccctggctgatgatgtggtgggctctgtgctggactgcttctccttccaggagacagacaaggcctggcacggcggctgcctggccctggccgagctgggcagaagaggcctgctgctgcccagccggctggtggactag

SEQ ID NO: 174690 - DNA, 2997 bp, synthetic construct
  misc_feature 1..2997: note = Description of Artificial Sequence: Synthetic coding sequence
  source 1..2997: mol_type = other DNA
atggatggcaccctgcaggccctggcccagatcttcaagcacggcaagcgggaggactgcctgccctatgctgccaccgtgctgcgctgcctggatggctgccgcctgcctgagagcaaccagaccctgctgaggaagctgggcgtgaagctggtgcagaggctgggcctgaccttcctgaagcccaaggtggccgcctggagataccagaggggctgccgcagcctggccgccaacctgcagctgctgacccagggccagagcgagcagaagcccctcatcctgacagaagatgatgatgaagatgatgatgtgcctgagggcgtggagcgggtgattgagcagctgctggtgggcctgaaggacaaggacacagtggtgcgctggagcgctgccaagggcattggaaggatggccggccgcctgccccgggccctggctgatgatgtggtgggctctgtgctggactgcttctccttccaggagacagacaaggcctggcacggcggctgcctggccctggccgagctgggcagaagaggcctgctgctgcccagccggctggtggatgtggtggccgtcatcctgaaggccctgacctatgatgagaagagaggagcctgcagcgtgggcaccaacgtgagagatgctgcctgctacgtgtgctgggcctttgcccgggcctatgagccccaggagctgaagccctttgtgacagccatcagcagcgccctggtgattgctgctgtgtttgaccgggacatcaactgccggcgggccgccagcgctgccttccaggagaatgtgggccggcagggcaccttcccccatggaattgacatcctgaccacagctgactactttgctgtgggcaacagaagcaactgcttcctggtgatctctgtgttcatcgccggcttccctgagtacacccagcccatgattgaccacctggtgaccatgaagatcagccactgggatggagtcatccgggagctggccgcccgggccctgcacaacctggcccagcaggcccctgagttcagcgccacccaggtgttcccccggctgctgtccatgaccctgagcccagacctgcacatgagacatggcagcatcctggcctgtgccgaggtggcctatgccctgtacaagctggccgcccaggagaacagacctgtgacagaccacctggatgagcaggccgtgcagggcctgaagcagatccaccagcagctgtatgaccggcagctgtaccggggcctgggcggccagctgatgaggcaggccgtgtgtgtgctgattgagaagctgagcctgagcaagatgcccttccggggggacacagtgattgatggctggcagtggctgatcaatgacaccctgcggcacctgcacctgatcagcagccacagccggcagcagatgaaggatgctgctgtgtctgccctggccgccctgtgcagcgagtactacatgaaggagcccggggaggccgaccctgccatccaggaggagctgatcacccagtacctggccgagctgaggaaccctgaggagatgacccgctgtggcttcagcctggccctgggcgccctgcccggcttcctgctgaagggccgcctgcagcaggtgctgaccggcctgcgggctgtgacccacaccagcccagaagatgtgtcctttgctgagagcagaagagatggcctgaaggccatcgcccgcatctgccagacagtgggcgtgaaggccggggccccagatgaggccgtgtgtggggagaatgtgtcccagatctactgtgccctgctgggctgcatggatgactacaccacagacagcagaggagatgtgggcacctgggtgaggaaggccgccatgaccagcctgatggacctgaccctgctgctggcccggagccagcctgagctgattgaggcccacacctgtgagcgcatcatgtgctgcgtggcccagcaggccagcgagaagattgaccgcttccgggcccacgccgccagcgtcttcctgaccctgctgcactttgacagcccccccatcccccacgtgccccacagaggagagctggagaagctgttccccaggagtgatgtggcctctgtgaactggagcgcccccagccaggccttcccccgcatcacccagctgctgggcctgcccacctaccgctaccacgtgctgctgggcctggtggtgtccctgggcggcctgacagagagcaccatccgccacagcacccagagcctgtttgagtacatgaagggcatccagagcgacccccaggccctgggcagcttcagcggcaccctgctgcagatctttgaggacaacctgctgaatgaaagagtgtctgtgcccctgctgaagaccctggaccacgtgctgacccacggctgctttgacatcttcaccacagaggaggaccacccctttgctgtgaagctgctggccctgtgcaagaaggagatcaagaacagcaaggacatccagaagctgctgtctggaattgctgtggacttccccagcgccaccctggtgtgtgtgggcaccgtgcagatgtatgcccacacccacctgcggctgggcgcccctggcccccactgtgcccacggcagcgccctgccccgcttctgtgagatggtgcagtttcctggagatgtgcggcggcaggccctgctgcagctgtgcctgctgctgtgccaccgcttccccctcatcaggaagaccacagccagccaggtgtatgagaccctgctgacctacagtgatgtggtgggcgcagatgtgctggatgaggtggtgacagtgctgagtgacacagcctgggatgctgagctggccgtggtgcgggagcagaggaaccggctgtgtgacctgctgggcgtgccccccagctggtgccccacctggtgcctgctgaagcctgtgctggagcccatcccccacccctgcctggtgaggatgagctgcagctag

SEQ ID NO: 174691 - DNA, 3579 bp, synthetic construct
  misc_feature 1..3579: note = Description of Artificial Sequence: Synthetic coding sequence
  source 1..3579: mol_type = other DNA
atggccctgagtgatgagcctgctgctgggggccctgaggaggaggctgaagatgagaccctggcctttggagctgccctggaggccttcggggagagcgctgagacccgggccctgctgggccgcctgcgggaggtgcatggaggcggcgctgagcgggaggtggccctggagcgcttccgggtcatcatggacaagtaccaggagcagccccacctgctggacccccacctggagtggatgatgaacctgctgctggacatcgtgcaggaccagaccagccctgccagcctggtgcacctggccttcaagttcctgtacatcatcaccaaggtgcggggctacaagaccttcctgcggctcttcccccatgaggtggctgatgtggagcctgtgctggacctggtgaccatccagaaccccaaggaccacgaggcctgggagacccgctacatgctgctgctgtggctgtctgtgacctgcctgatcccctttgacttcagccggctggatggcaacctgctgacccagcccggccaggccaggatgagcatcatggaccgcatcctgcagattgctgagagctacctgattgtgtctgacaaggccagagatgctgctgctgtgctggtgagccgcttcatcaccaggccagatgtgaagcagagcaagatggccgagttcctggactggagcctgtgcaacctggcccggagcagcttccagaccatgcagggcgtcatcaccatggatggcaccctgcaggccctggcccagatcttcaagcacggcaagcgggaggactgcctgccctatgctgccaccgtgctgcgctgcctggatggctgccgcctgcctgagagcaaccagaccctgctgaggaagctgggcgtgaagctggtgcagaggctgggcctgaccttcctgaagcccaaggtggccgcctggagataccagaggggctgccgcagcctggccgccaacctgcagctgctgacccagggccagagcgagcagaagcccctcatcctgacagaagatgatgatgaagatgatgatgtgcctgagggcgtggagagggtcatcgagcagctgctggtgggcctgaaggacaaggacacagtggtgcgctggagcgctgccaagggcatcggccgcatggccggccgcctgccccgggccctggctgatgatgtggtgggctctgtgctggactgcttctccttccaggagacagacaaggcctggcatggaggctgcctggccctggccgagctgggccggcggggcctgctgctgcccagccggctggtggatgtggtggccgtcatcctgaaggccctgacctatgatgagaagagaggagcctgcagcgtgggcaccaacgtgagagatgctgcctgctacgtgtgctgggcctttgcccgggcctatgagccccaggagctgaagccctttgtgacagccatcagcagcgccctggtgattgctgctgtgtttgaccgggacatcaactgcagaagagctgccagcgctgccttccaggagaatgtgggccggcagggcaccttcccccacggcatcgacatcctgaccacagctgactactttgctgtgggcaacagaagcaactgcttcctggtgatcagcgtcttcatcgccggcttccctgagtacacccagcccatgattgaccacctggtgaccatgaagatcagccactgggatggagtcatccgggagctggccgcccgggccctgcacaacctggcccagcaggcccctgagttcagcgccacccaggtgttcccccggctgctgtccatgaccctgagcccagacctgcacatgagacatggcagcatcctggcctgtgccgaggtggcctatgccctgtacaagctggccgcccaggagaacagacctgtgacagaccacctggatgagcaggccgtgcagggcctgaagcagatccaccagcagctgtatgaccggcagctgtaccggggcctgggcggccagctgatgaggcaggccgtgtgtgtgctgattgagaagctgagcctgagcaagatgcccttccggggggacacagtgattgatggctggcagtggctgatcaatgacaccctgcggcacctgcacctgatcagcagccacagccggcagcagatgaaggatgctgctgtgtctgccctggccgccctgtgcagcgagtactacatgaaggagcctggagaggccgaccctgccatccaggaggagctgatcacccagtacctggccgagctgagaaatcctgaggagatgacccgctgtggcttcagcctggccctgggcgccctgcccggcttcctgctgaagggccgcctgcagcaggtgctgaccggcctgcgggctgtgacccacaccagcccagaagatgtgtcctttgctgagagcagaagagatggcctgaaggccatcgcccgcatctgccagacagtgggcgtgaaggccggggccccagatgaagctgtgtgtggagaaaatgtgtcccagatctactgtgccctgctgggctgcatggatgactacaccacagacagcagaggagatgtgggcacctgggtgaggaaggccgccatgaccagcctgatggacctgaccctgctgctggcccggagccagcctgagctgattgaggcccacacctgtgagcgcatcatgtgctgcgtggcccagcaggccagcgagaagattgaccgcttccgggcccatgctgcctctgtgttcctgaccctgctgcactttgacagcccccccatcccccacgtgccccacagaggagagctggagaagctgttccccaggagtgatgtggcctctgtgaactggagcgcccccagccaggccttcccccgcatcacccagctgctgggcctgcccacctaccgctaccacgtgctgctgggcctggtggtgtccctgggcggcctgacagagagcaccatccgccacagcacccagagcctgtttgagtacatgaagggcatccagagcgacccccaggccctgggcagcttcagcggcaccctgctgcagatctttgaggacaacctgctgaatgaaagagtgtctgtgcccctgctgaagaccctggaccacgtgctgacccacggctgctttgacatcttcaccacagaggaggaccacccctttgctgtgaagctgctggccctgtgcaagaaggagatcaagaacagcaaggacatccagaagctgctgagcggcattgctgtgttctgtgagatggtgcagtttcctggagatgtgcggcggcaggccctgctgcagctgtgcctgctgctgtgccaccgcttccccctcatcaggaagaccacagccagccaggtgtatgagaccctgctgacctacagtgatgtggtgggcgcagatgtgctggatgaggtggtgacagtgctgagtgacacagcctgggatgctgagctggccgtggtgcgggagcagaggaaccggctgtgtgacctgctgggcgtgccccggccccagctggtgccccagcccggggcctgctag

SEQ ID NO: 174692 - DNA, 936 bp, synthetic construct
  misc_feature 1..936: note = Description of Artificial Sequence: Synthetic coding sequence
  source 1..936: mol_type = other DNA
atggccggccgcctgccccgggccctggctgatgatgtggtgggctctgtgctggactgcttctccttccaggagacagacaaggcctggcatggaggctgcctggccctggccgagctgggccggcggggcctgctgctgcccagccggctggtggatgtggtggccgtcatcctgaaggccctgacctatgatgagaagagaggagcctgcagcgtgggcaccaacgtgagagatgctgcctgctacgtgtgctgggcctttgcccgggcctatgagccccaggagctgaagccctttgtgacagccatcagcagcgccctggtgattgctgctgtgtttgaccgggacatcaactgcagaagagctgccagcgctgccttccaggagaatgtgggccggcagggcaccttcccccacggcatcgacatcctgaccacagctgactactttgctgtgggcaacagaagcaactgcttcctggtgatcagcgtcttcatcgccggcttccctgagtacacccagcccatgattgaccacctggtgaccatgaagatcagccactgggatggagtcatccgggagctggccgcccgggccctgcacaacctggcccagcaggcccctgagttcagcgccacccaggtgttcccccggctgctgtccatgaccctgagcccagacctgcacatgagacatggcagcatcctggcctgtgccgaggtggcctatgccctgtacaagctggccgcccaggagaacagacctgtgacagaccacctggatgagcaggccgtgcagggcctgaagcagatccaccagcagccctgcatctgctcctggggcctgatgagccctgagagcaaggccgagttctgtgtgtgtgtgtgccgcatcagcctgggccggcagtgtgtgcacctgagcggcctgtag

SEQ ID NO: 174693 - DNA, 2253 bp, synthetic construct
  misc_feature 1..2253: note = Description of Artificial Sequence: Synthetic coding sequence
  source 1..2253: mol_type = other DNA
atggccctgagtgatgagcctgctgctgggggccctgaggaggaggctgaagatgagaccctggcctttggagctgccctggaggccttcggggagagcgctgagacccgggccctgctgggccgcctgcgggaggtgcatggaggcggcgctgagcgggaggtggccctggagcgcttccgggtcatcatggacaagtaccaggagcagccccacctgctggacccccacctggagtggatgatgaacctgctgctggacatcgtgcaggaccagaccagccctgccagcctggtgcacctggccttcaagttcctgtacatcatcaccaaggtgcggggctacaagaccttcctgcggctcttcccccatgaggtggctgatgtggagcctgtgctggacctggtgaccatccagaaccccaaggaccacgaggcctgggagacccgctacatgctgctgctgtggctgtctgtgacctgcctgatcccctttgacttcagccggctggatggcaacctgctgacccagcccggccaggccaggatgagcatcatggaccgcatcctgcagattgctgagagctacctgattgtgtctgacaaggccagagatgctgctgctgtgctggtgagccgcttcatcaccaggccagatgtgaagcagagcaagatggccgagttcctggactggagcctgtgcaacctggcccggagcagcttccagaccatgcagggcgtcatcaccatggatggcaccctgcaggccctggcccagatcttcaagcacggcaagcgggaggactgcctgccctatgctgccaccgtgctgcgctgcctggatggctgccgcctgcctgagagcaaccagaccctgctgaggaagctgggcgtgaagctggtgcagaggctgggcctgaccttcctgaagcccaaggtggccgcctggagataccagaggggctgccgcagcctggccgccaacctgcagctgctgacccagggccagagcgagcagaagcccctcatcctgacagaagatgatgatgaagatgatgatgtgcctgagggcgtggagagggtcatcgagcagctgctggtgggcctgaaggacaaggacacagtggtgcgctggagcgctgccaagggcatcggccgcatggccggccgcctgccccgggccctggctgatgatgtggtgggctctgtgctggactgcttctccttccaggagacagacaaggcctggcatggaggctgcctggccctggccgagctgggccggcggggcctgctgctgcccagccggctggtggatgtggtggccgtcatcctgaaggccctgacctatgatgagaagagaggagcctgcagcgtgggcaccaacgtgagagatgctgcctgctacgtgtgctgggcctttgcccgggcctatgagccccaggagctgaagccctttgtgacagccatcagcagcgccctggtgattgctgctgtgtttgaccgggacatcaactgcagaagagctgccagcgctgccttccaggagaatgtgggccggcagggcaccttcccccacggcatcgacatcctgaccacagctgactactttgctgtgggcaacagaagcaactgcttcctggtgatcagcgtcttcatcgccggcttccctgagtacacccagcccatgattgaccacctggtgaccatgaagatcagccactgggatggagtcatccgggagctggccgcccgggccctgcacaacctggcccagcaggcccctgagttcagcgccacccaggtgttcccccggctgctgtccatgaccctgagcccagacctgcacatgagacatggcagcatcctggcctgtgccgaggtggcctatgccctgtacaagctggccgcccaggagaacagacctgtgacagaccacctggatgagcaggccgtgcagggcctgaagcagatccaccagcagctgtatgaccggcagctgtaccggggcctgggcggccagctgatgaggcaggccgtgtgtgtgctgattgagaagctgagcctgagcaagatgcccttccggggggacacagtgattgatggctggcagtggctgatcaatgacagcctgtggctgctggtgggcctgggccggcccagccggctgcccagcgagaggcctgccccagctggcagccaccgcttcaagagcagctacccccacttcccccggggcaggaagttctgctag

SEQ ID NO: 174694 - DNA, 555 bp, synthetic construct
  misc_feature 1..555: note = Description of Artificial Sequence: Synthetic coding sequence
  source 1..555: mol_type = other DNA
atgaagggcatccagagcgacccccaggccctgggcagcttcagcggcaccctgctgcagatctttgaggacaacctgctgaatgaaagagtgtctgtgcccctgctgaagaccctggaccacgtgctgacccacggctgctttgacatcttcaccacagaggaggaccacccctttgctgtgaagctgctggccctgtgcaagaaggagatcaagaacagcaaggacatccagaagctgctgagcggcattgctgtgttctgtgagatggtgcagtttcctggagatgtgcggcggcaggccctgctgcagctgtgcctgctgctgtgccaccgcttccccctcatcaggaagaccacagccagccaggtgtatgagaccctgctgacctacagtgatgtggtgggcgcagatgtgctggatgaggtggtgacagtgctgagtgacacagcctgggatgctgagctggccgtggtgcgggagcagaggaaccggctgtgtgacctgctgggcgtgccccggccccagctggtgccccagcccggggcctgctag

SEQ ID NO: 174695 - DNA, 1584 bp, synthetic construct
  misc_feature 1..1584: note = Description of Artificial Sequence: Synthetic coding sequence
  source 1..1584: mol_type = other DNA
atgtctgacaccctgacagcagatgtgattggccggcgggtggaggtgaatggagagcacgccaccgtgcgctttgctggggtggtgccccctgtggccggcccctggctgggcgtggagtgggacaaccctgagcggggcaagcatgatggcagccatgagggcaccgtgtacttcaagtgccgccaccccactggaggcagcttcatccggcccaacaaggtgaactttggaacagacttcctgacagccatcaagaacagatatgtgctggaggatggccctgaggaggacaggaaggagcagatcgtgaccatcggcaacaagcctgtggagaccatcggctttgacagcatcatgaagcagcagagccagctgagcaagctgcaggaggtgtccctgaggaactgtgctgtgtcctgtgccggggagaagggcggcgtggccgaggcctgccccaacatcaggaaggtggacctgagcaagaacctgctgagctcctgggatgaagtcatccacatcgctgaccagctgcggcacctggaggtgctgaatgtgtctgagaacaagctgaagttccccagcggctctgtgctgaccggcaccctgtctgtgctgaaggtgctggtgctgaaccagacaggcatcacctgggccgaggtgctgcgctgtgtggccggctgccccggcctggaggagctgtacctggagagcaacaacatcttcatcagcgagcggcccacagatgtgctgcagacagtgaagctgctggacctgagcagcaaccagctgattgatgagaaccagctgtacctgattgcccacctgccccggctggagcagctgatcctgagtgacaccggcatcagcagcctgcacttcccagatgctggcatcggctgcaagacctccatgttccccagcctgaagtacctggtggtgaatgacaaccagatcagccagtggagcttcttcaatgagctggagaagctgcccagcctgcgggccctgagctgcctgaggaaccccctgaccaaggaggacaaggaggccgagacagcccggctgctgatcatcgccagcatcggccagctgaagaccctgaacaagtgtgagatcctgcctgaggagaggagaagagctgagctggactacaggaaggcctttggaaatgagtggaagcaggccggcggccacaaggaccctgagaagaaccggctgtctgaggagttcctgacagcccacccccgctaccagttcctgtgcctgaagtatggagcccctgaggactgggagctgaagacccagcagcccctgatgctgaagaaccagctgctgaccctgaagatcaagtacccccaccagctggaccagaaggtgctggagaagcagctgcccggctccatgaccatccagaaggtgaagggcctgctgagccggctgctgaaggtgcctgtgtctgacctgctgctgtcctatgagagccccaagaagccaggccgggagattgagctggagaatgacctgaagagcctgcagttctacagcgtggagaatggagactgcctgctggtgcgctggtag

SEQ ID NO: 174696 - DNA, 1584 bp, synthetic construct; identical to SEQ ID NO: 174695
  misc_feature 1..1584: note = Description of Artificial Sequence: Synthetic coding sequence
  source 1..1584: mol_type = other DNA

SEQ ID NO: 174697 - DNA, 1737 bp, synthetic construct
  misc_feature 1..1737: note = Description of Artificial Sequence: Synthetic coding sequence
  source 1..1737: mol_type = other DNA
atgtctgacaccctgacagcagatgtgattggccggcgggtggaggtgaatggagagcacgccaccgtgcgctttgctggggtggtgccccctgtggccggcccctggctgggcgtggagtgggacaaccctgagcggggcaagcatgatggcagccatgagggcaccgtgtacttcaagtgccgccaccccactggaggcagcttcatccggcccaacaaggtgaactttggaacagacttcctgacagccatcaagaacagatatgtgctggaggatggccctgaggaggacaggaaggagcagatcgtgaccatcggcaacaagcctgtggagaccatcggctttgacagcatcatgaagcagcagagccagctgagcaagctgcaggaggtgtccctgaggaactgtgctgtgtcctgtgccggggagaagggcggcgtggccgaggcctgccccaacatcaggaaggtggacctgagcaagaacctgctgagctcctgggatgaagtcatccacatcgctgaccagctgcggcacctggaggtgctgaatgtgtctgagaacaagctgaagttccccagcggctctgtgctgaccggcaccctgtctgtgctgaaggtgctggtgctgaaccagacaggcatcacctgggccgaggcccacgcccagtgtggcggcagccgccacggcctggacatgcagaaggatgccagcaagtttgtggacctgtgtgtgctgcagaagtgcagcaccagcaactgcatcatcagcgccaaggaccacacctccatgaggatgaatgtggccaaggtgctgcgctgtgtggccggctgccccggcctggaggagctgtacctggagagcaacaacatcttcatcagcgagcggcccacagatgtgctgcagacagtgaagctgctggacctgagcagcaaccagctgattgatgagaaccagctgtacctgattgcccacctgccccggctggagcagctgatcctgagtgacaccggcatcagcagcctgcacttcccagatgctggcatcggctgcaagacctccatgttccccagcctgaagtacctggtggtgaatgacaaccagatcagccagtggagcttcttcaatgagctggagaagctgcccagcctgcgggccctgagctgcctgaggaaccccctgaccaaggaggacaaggaggccgagacagcccggctgctgatcatcgccagcatcggccagctgaagaccctgaacaagtgtgagatcctgcctgaggagcggcggcgggcagagctggactacaggaaggcctttggaaatgagtggaagcaggccggcggccacaaggaccctgagaagaaccggctgtctgaggagttcctgacagcccacccccgctaccagttcctgtgcctgaagtacggggcccctgaggactgggagctgaagacccagcagcccctgatgctgaagaaccagctgctgaccctgaagatcaagtacccccaccagctggaccagaaggtgctggagaagcagctgcccggctccatgaccatccagaaggtgaagggcctgctgagccggctgctgaaggtgcctgtgtctgacctgctgctgtcctatgagagccccaagaagccaggccgggagattgagctggagaatgacctgaagagcctgcagttctacagcgtggagaatggagactgcctgctggtgcgctggtag

SEQ ID NO: 174698 - DNA, 2001 bp, synthetic construct
  misc_feature 1..2001: note = Description of Artificial Sequence: Synthetic coding sequence
  source 1..2001: mol_type = other DNA
atgattcatgagctgctgctggccctgagcggctacccaggcagcatcttcacctggaacaagaggagcggcctgcaggtgtcccaggacttccccttcctgcaccccagcgagacctctgtgctgaaccggctgtgccgcctgggcacagactacatccgcttcacagagttcatcgagcagtacacaggccacgtgcagcagcaggaccaccaccccagccagcagggccagggcggcctgcacggcatctacctgcgggccttctgcaccggcctggacagcgtgctgcagccctaccggcaggccctgctggacctggagcaggagttcctgggggacccccacctgagcatcagccacgtgaactacttcctggaccagttccagctgctcttccccagcgtgatggtggtggtggagcagatcaagagccagaagatccacggctgccagatcctggagaccgtgtacaagcacagctgtggcggcctgccccctgtgcgcagcgccctggagaagatcctggccgtgtgccacggcgtgatgtacaagcagctgagcgcctggatgctgcacggcctgctgctggaccagcacgaggagttcttcatcaagcagggccccagcagtggaaatgtgtctgcccagcctgaggaggatgaggaggacctgggcattggaggcctgaccgggaagcagctgcgggagctgcaggacctgcggctcatcgaggaggagaacatgctggcccccagcctgaagcagttcagcctgcgggtggagatcctgcccagctacatccctgtgcgggtggccgagaagatcctgtttgtgggggagagcgtgcagatgtttgagaaccagaatgtgaacctgaccaggaagggcagcatcctgaagaaccaggaggacacctttgctgctgagctgcaccggctgaagcagcagcccctcttcagcctggtggactttgagcaggtggtggaccgcatccgcagcacagtggccgagcacctgtggaagctgatggtggaggagagtgacctgctgggccagctgaagatcatcaaggacttctacctgctgggccgcggggagctgttccaggccttcatcgacacagcccagcacatgctgaagaccccacccacagctgtgacagaacatgatgtgaatgtggccttccagcagagcgcccacaaggtgctgctggatgatgacaacctgctgcccctgctgcacctgaccatcgagtaccacggcaaggagcacaaggatgccacccaggcccgggagggccccagccgggagaccagcccccgggaggccccagccagcggctgggccgccctgggcctgagctacaaggtgcagtggcccctgcacatcctcttcaccccagctgtgctggagaagtacaacgtggtgttcaagtacctgctgtctgtgagaagagtgcaggccgagctgcagcactgctgggccctgcagatgcagaggaagcacctgaagagcaaccagacagatgccatcaagtggaggctgaggaaccacatggccttcctggtggacaacctgcagtactacctgcaggtggatgtgctggagagccagttcagccagctgctgcaccagatcaacagcacccgggactttgagagcatccggctggcccatgaccacttcctgagcaacctgctggcccagagcttcatcctgctgaagcctgtgttccactgcctgaatgagatcctggacctgtgccacagcttctgcagcctggtgtcccagaacctgggccccctggatgagcggggggccgcccagctgagcatcctggtgaagggcttcagccggcagagcagcctgctcttcaagatcctgagctctgtgaggaaccaccagatcaacagcgacctggcccagctgctgctgcggctggactacaacaagtactacacccaggccggcggcaccctgggcagctttggcatgtag

SEQ ID NO: 174699 - DNA, 660 bp, synthetic construct
  misc_feature 1..660: note = Description of Artificial Sequence: Synthetic coding sequence
  source 1..660: mol_type = other DNA
atggctgacaaggccaagccagccaaggccgccaacagaacaccacccaagagccctggggaccccagcaaggacagagctgccaagaggctgagcctggagagcgagggcgctggggagggcgctgctgccagccctgagctgagcgccctggaggaggccttccgccgctttgctgtgcatggagatgcccgggccaccggccgggagatgcacggcaagaactggagcaagctgtgcaaggactgccaggtgattgatggaagaaatgtgacagtgacagatgtggacatcgtgttcagcaagatcaagggcaagagctgcaggaccatcacctttgagcagttccaggaggccctggaggagctggccaagaagcgcttcaaggacaagagcagcgaggaggccgtgcgggaggtgcacaggctcatcgagggcaaggcccccatcatcagcggcgtgaccaaggccatcagcagccccaccgtgtcccggctgacagacaccaccaagttcaccggcagccacaaggagagatttgaccccagcggcaagggcaagggcaaggccggccgggtggacctggtggatgaaagtggctacgtgtctggctacaagcacgccggcacctatgaccagaaggtgcagggcggcaagtag

SEQ ID NO: 174700 - DNA, 1071 bp, synthetic construct
  misc_feature 1..1071: note = Description of Artificial Sequence: Synthetic coding sequence
  source 1..1071: mol_type = other DNA
atgagcaagctgtggaggcggggcagcaccagcggggccatggaggcccctgagcctggagaggccctggagctgagcctggccggggcccacggccatggagtgcacaagaagaagcacaagaagcacaagaagaagcacaagaagaagcaccaccaggaggaggatgctggccccacccagcccagccctgccaagccccagctgaagctgaagatcaagctgggcggccaggtgctgggcaccaagtctgtgcccaccttcaccgtcatccctgagggccccaggagccccagccccctgatggtggtggacaatgaggaggagcccatggagggcgtgcccctggagcagtaccgggcctggctggatgaggacagcaacctgagccccagccccctgcgggacctgagcggcggcctgggcggccaggaggaggaggaggagcagcgctggctggatgccctggagaagggggagctggatgacaacggggacctgaagaaggagatcaatgaaaggctgctgacagcccggcagagggccctgctgcagaaggcccggagccagcccagccccatgctgcccctgcctgtggccgagggctgccccccaccagccctgacagaggagatgctgctgaagcgggaggagcgggccaggaagaggcggctgcaggccgccaggagagctgaggagcacaagaaccagaccatcgagcggctgaccaagacagctgccaccagcggccggggcggccggggcggggcccggggggagaggagaggaggccgggctgctgccccagcccccatggtgcgctactgcagcggggcccagggcagcaccctgtccttccccccaggagtgcctgcccccacagctgtgtcccagaggcccagccccagcggccccccaccccgctgcagcgtgcccggctgcccccacccccggcgctatgcctgcagcaggacaggccaggccctgtgcagcctgcagtgctaccgcatcaacctgcagatgaggctgggcggccctgagggccctggcagccccctgctggccacctag

SEQ ID NO: 174701 - DNA, 1272 bp, synthetic construct
  misc_feature 1..1272: note = Description of Artificial Sequence: Synthetic coding sequence
  source 1..1272: mol_type = other DNA
atggccggcaaggtgaagtgggtgacagacatcgagaagtctgtgctgatcaacaactttgagaagaggggctgggtgcaggtgacagaaaatgaagactggaacttctactggatgtctgtgcagaccatcagaaatgtgttttctgtggaggccggctaccgcctgagtgatgaccagatcgtgaaccacttccccaaccactatgagctgaccaggaaggacctgatggtgaagaacatcaagcgctacaggaaggagctggagaaggagggcagccccctggccgagaaggatgaaaatggcaagtacctgtacctggactttgtgcctgtgacctacatgctgcctgctgactacaacctgtttgtggaggagttcaggaagagccccagcagcacctggatcatgaagccctgtgggaaggcccagggcaagggcatcttcctgatcaacaagctgagccagatcaagaagtggagccgggacagcaagaccagcagctttgtgtcccagagcaacaaggaggcctacgtgatcagcctgtacatcaacaaccccctgctgattggaggcaggaagtttgacctgcggctgtatgtgctggtgtccacctaccggcccctgcgctgctacatgtacaagctgggcttctgccgcttctgcaccgtgaagtacacccccagcaccagcgagctggacaacatgtttgtgcacctgaccaacgtggccatccagaagcacggggaggactacaaccacatccacggcggcaagtggacagtgagcaacctgcggctgtacctggagagcacccggggcaaggaggtgaccagcaagctgtttgatgagatccactggatcatcgtgcagagcctgaaggctgtggcccctgtgatgaacaatgacaagcactgctttgagtgctacggctatgacatcatcattgatgacaagctgaagccctggctgattgaggtgaatgccagccccagcctgaccagcagcacagccaatgaccgcatcctgaagtacaacctgatcaatgacaccctgaacattgctgtgcccaacggggagatcccagactgcaagtggaacaagagcccccccaaggaggtgctgggcaactatgagatcctgtatgatgaggagctggcccagggagatggagctgaccgggagctgcggagccggcagggccagagcctgggcccccgggccggccgcagccgggacagcggccgggctgtgctgaccacctggaagtag

SEQ ID NO: 174702 - DNA, 1185 bp, synthetic construct
  misc_feature 1..1185: note = Description of Artificial Sequence: Synthetic coding sequence
  source 1..1185: mol_type = other DNA
atggccggcaaggtgaagtgggtgacagacatcgagaagtctgtgctgatcaacaactttgagaagaggggctgggtgcaggtgacagaaaatgaagactggaacttctactggatgtctgtgcagaccatcagaaatgtgttttctgtggaggccggctaccgcctgagtgatgaccagatcgtgaaccacttccccaaccactatgagctgaccaggaaggacctgatggtgaagaacatcaagcgctacaggaaggagctggagaaggagggcagccccctggccgagaaggatgaaaatggcaagtacctgtacctggactttgtgcctgtgacctacatgctgcctgctgactacaacctgtttgtggaggagttcaggaagagccccagcagcacctggatcatgaagccctgtgggaaggcccagggcaagggcatcttcctgatcaacaagctgagccagatcaagaagtggagccgggacagcaagaccagcagctttgtgtcccagagcaacaaggaggcctacgtgatcagcctgtacatcaacaaccccctgctgattggaggcaggaagtttgacctgcggctgtatgtgctggtgtccacctaccggcccctgcgctgctacatgtacaagctgggcttctgccgcttctgcaccgtgaagtacacccccagcaccagcgagctggacaacatgtttgtgcacctgaccaacgtggccatccagaagcacggggaggactacaaccacatccacggcggcaagtggacagtgagcaacctgcggctgtacctggagagcacccggggcaaggaggtgaccagcaagctgtttgatgagatccactggatcatcgtgcagagcctgaaggctgtggccgtgaatgccagccccagcctgaccagcagcacagccaatgaccgcatcctgaagtacaacctgatcaatgacaccctgaacattgctgtgcccaatggagagatcccagactgcaagtggaacaagagcccccccaaggaggtgctgggcaactatgagatcctgtatgatgaggagctggcccagggagatggagctgaccgggagctgcggagccggcagggccagagcctgggccccagggctggccgcagccgggacagcggccgggctgtgctgaccacctggaagtag

SEQ ID NO: 174703 - DNA, 180 bp, synthetic construct
  misc_feature 1..180: note = Description of Artificial Sequence: Synthetic coding sequence
  source 1..180: mol_type = other DNA
atggccggcaaggtgaagtgggtgacagacatcgagaagtctgtgctgatcaacaactttgagaagaggggctgggtgcaggtgacagaaaatgaagactggaacttctactggctgctggacctgcctgagttccgctaccgcagctgcctgaatgagttcccagacttccgggtgtag

SEQ ID NO: 174704 - DNA, 1068 bp, synthetic construct
  misc_feature 1..1068: note = Description of Artificial Sequence: Synthetic coding sequence
  source 1..1068: mol_type = other DNA
atgccccaccagcccaccatcctgctgaacacagtgtctgccagcgccagcccctgcctgcaccctggggcccagaacatccccagccccaccggcctgccccgctgccgcagcggcagccacaccatcggccccttcagcagcttccagagcgctgcccacatctacagccagaagctgagccggcccagcagcgccaaggctgctggcagctgctacctgaacaagcaccacagcggcatcgccaagacccagaaggagggagaagatgccagcctgtacagcaagcgctacaaccagagcatggtgacagctgagctgcagaggctggccgagaagcaggccgcccggcagtacagccccagcagccacatcaacctgctgacccagcaggtgaccaacctgaacctggccaccggcatcatcaacagaagcagcgccagcgccccacccaccctgcggcccatcatcagccccagcggccccacctggagcacccagagcgacccccaggcccctgagaaccacagcagcagccctggcagccgcagcctgcagacaggaggctttgcctgggagggggaggtggagaacaacgtgtacagccaggccactggagtggtgccccagcacaagtaccaccccacagctggcagctaccagctgcagtttgccctgcagcagctggagcagcagaagctgcagagccggcagctgctggaccagagccgggcccggcaccaggccatcttcggcagccagaccctgcccaacagcaacctgtggaccatgaacaacggggccggctgccgcatcagcagcgccacagccagcggccagaagcccaccaccctgccccagaaggtggtgcccccacccagcagctgtgccagcctggtgcccaagcccccacccaaccacgagcaggtgctgcggcgggccaccagccagaaggccagcaagggcagcagcgctgagggccagctgaatggcctgcagagcagcctgaacccagctgcctttgtgcccatcaccagcagcacagtgaacagccacacagccctgtag

SEQ ID NO: 174705 - DNA, 3846 bp, synthetic construct
  misc_feature 1..3846: note = Description of Artificial Sequence: Synthetic coding sequence
  source 1..3846: mol_type = other DNA
atgcccatcgtgatggcccgggacctggaggagacagccagcagcagtgaagatgaggaggtgatcagccaggaggaccacccctgcatcatgtggacaggaggctgccgccgcatccctgtgctggtgttccacgcagatgccatcctgaccaaggacaacaacatccgggtgattggagagcgctaccacctgagctacaagatcgtgaggacagacagccggctggtgcgcagcatcctgacagcccacggcttccacgaggtgcaccccagcagcacagactacaacctgatgtggacaggcagccacctgaagcccttcctgctgcggaccctgtctgaggcccagaaggtgaaccacttccccaggagctatgagctgaccaggaaggaccggctgtacaagaacatcatccgcatgcagcacacccacggcttcaaggccttccacatcctgccccagaccttcctgctgcctgcagaatatgcagagttctgcaacagctacagcaaggaccggggcccctggatcgtgaagcctgtggccagcagccggggccggggcgtgtacctgatcaacaaccccaaccagatcagcctggaggagaacatcctggtgagccgctacatcaacaaccccctgctgattgatgacttcaagtttgatgtgcggctgtatgtgctggtgaccagctatgaccccctggtgatctacctgtatgaggagggcctggccaggtttgccaccgtgcgctatgaccagggcgccaagaacatccggaaccagttcatgcacctgaccaactacagcgtgaacaagaagagcggggactatgtgtcctgtgatgatcctgaggtggaggactatggcaacaagtggagcatgtctgccatgctgcgctacctgaagcaggagggccgggacaccacagccctgatggcccacgtggaggacctgatcatcaagaccatcatctctgctgagctggccatcgccacagcctgcaagacctttgtgccccacaggagcagctgctttgagctgtatggctttgatgtgctgattgacagcaccctgaagccctggctgctggaggtgaacctgagccccagcctggcctgtgatgcccccctggacctgaagatcaaggcctccatgatcagtgacatgttcaccgtggtgggctttgtgtgccaggaccctgcccagagggccagcacccggcccatctaccccacctttgagagcagcagaagaaaccccttccagaagccccagcgctgccggcccctgagcgccagtgatgctgagatgaagaacctggtgggcagcgcccgggagaagggccctgggaagctgggcggctctgtgctgggcctgtccatggaggagatcaaggtgctgcggcgggtgaaggaggagaatgaccggcggggcggcttcatccgcatcttccccaccagcgagacctgggagatctacggcagctacctggagcacaagacctccatgaactacatgctggccaccaggctcttccaggacaggatgacagcagatggagcccctgagctgaagattgagagcctgaacagcaaggccaagctgcatgctgccctgtatgaaaggaagctgctgagcctggaggtgaggaagagaagaagaagaagcagccggctgcgggccatgaggcccaagtaccctgtgatcacccagcctgctgagatgaatgtgaagacagaaacagaaagtgaggaggaggaggaggtggccctggacaatgaagatgaggagcaggaggccagccaggaggagagcgctggcttcctgcgggagaaccaggccaagtacacccccagcctgacagccctggtggagaacacccccaaggagaacagcatgaaggtgcgggagtggaacaacaagggcggccactgctgcaagctggagacccaggagctggagcccaagttcaacctgatgcagatcctgcaggacaatggaaacctgagcaagatgcaggcccgcatcgccttcagcgcctacctgcagcacgtgcagatccggctgatgaaggacagcggcggccagaccttcagcgcctcctgggccgccaaggaggatgagcagatggagctggtggtgcgcttcctgaagagggccagcaacaacctgcagcacagcctgaggatggtgctgcccagccggcggctggccctgctggagcggcggcgcatcctggcccaccagctgggggacttcatcatcgtgtacaacaaggagacagagcagatggccgagaagaagagcaagaagaaggtggaggaggaggaggaggatggagtgaacatggagaacttccaggagttcatccggcaggccagcgaggccgagctggaggaggtgctgaccttctacacccagaagaacaagagcgcctctgtgttcctgggcacccacagcaagatcagcaagaacaacaacaactacagcgacagcggggccaagggggaccaccctgagaccatcatggaggaggtgaagatcaagccacccaagcagcagcagaccacagagatccacagcgacaagctgagccgcttcaccaccagcgctgagaaggaggccaagctggtgtacagcaacagcagcagcggccccacagccaccctgcagaagatccccaacacccacctgagctctgtgaccaccagtgacctgagccctggcccctgccaccacagcagcctgagccagatccccagcgccatccccagcatgccccaccagcccaccatcctgctgaacacagtgtctgccagcgccagcccctgcctgcaccctggggcccagaacatccccagccccaccggcctgccccgctgccgcagcggcagccacaccatcggccccttcagcagcttccagagcgctgcccacatctacagccagaagctgagccggcccagcagcgccaaggccggcagctgctacctgaacaagcaccacagcggcatcgccaagacccagaaggagggagaagatgccagcctgtacagcaagcgctacaaccagagcatggtgacagctgagctgcagaggctggccgagaagcaggccgcccggcagtacagccccagcagccacatcaacctgctgacccagcaggtgaccaacctgaacctggccaccggcatcatcaacagaagcagcgccagcgccccacccaccctgcggcccatcatcagccccagcggccccacctggagcacccagagcgacccccaggcccctgagaaccacagcagcagccctggcagccgcagcctgcagacaggaggctttgcctgggagggggaggtggagaacaacgtgtacagccaggccactggagtggtgccccagcacaagtaccaccccacagctggcagctaccagctgcagtttgccctgcagcagctggagcagcagaagctgcagagccggcagctgctggaccagagccgggcccggcaccaggccatcttcggcagccagaccctgcccaacagcaacctgtggaccatgaacaacggggccggctgccgcatcagcagcgccacagccagcggccagaagcccaccaccctgccccagaaggtggtgcccccacccagcagctgtgccagcctggtgcccaagcccccacccaaccacgagcaggtgctgcggcgggccaccagccagaaggccagcaagggcagcagcgctgagggccagctgaatggcctgcagagcagcctgaacccagctgcctttgtgcccatcaccagcagcacagatcctgcccacaccaagatctag

SEQ ID NO: 174706 - DNA, 2454 bp, synthetic construct
  misc_feature 1..2454: note = Description of Artificial Sequence: Synthetic coding sequence
  source 1..2454: mol_type = other DNA
atgaaggagatcaaggtgctgcggcgggtgaaggaggagaatgaccggcggggcggcttcatccgcatcttccccaccagcgagacctgggagatctacggcagctacctggagcacaagacctccatgaactacatgctggccaccaggctcttccaggaccggggcaaccccaggaggagcctgctgaccggccgcaccaggatgacagcagatggagcccctgagctgaagattgagagcctgaacagcaaggccaagctgcacgccgccctgtatgaaaggaagctgctgagcctggaggtgaggaagagaagaagaagaagcagccggctgcgggccatgaggcccaagtaccctgtgatcacccagcctgctgagatgaatgtgaagacagaaacagagagcgaggaggaggaggaggtggccctggacaatgaagatgaggagcaggaggccagccaggaggagagcgctggcttcctgcgggagaaccaggccaagtacacccccagcctgacagccctggtggagaacacccccaaggaaaattccatgaaggtgcgggagtggaacaacaagggcggccactgctgcaagctggagacccaggagctggagcccaagttcaacctgatgcagatcctgcaggacaatggaaacctgagcaagatgcaggccagaattgccttcagcgcctacctgcagcacgtgcagatccggctgatgaaggacagcggcggccagaccttcagcgcctcctgggccgccaaggaggatgagcagatggagctggtggtgcgcttcctgaagagggccagcaacaacctgcagcacagcctgaggatggtgctgcccagccggcggctggccctgctggagcggcggcgcatcctggcccaccagctgggggacttcatcatcgtgtacaacaaggagacagagcagatggccgagaagaagagcaagaagaaggtggaggaggaggaggaggatggagtgaacatggagaacttccaggagttcatccggcaggccagcgaggccgagctggaggaggtgctgaccttctacacccagaagaacaagagcgccagcgtcttcctgggcacccacagcaagatcagcaagaacaacaacaactacagcgacagcggggccaagggggaccaccctgagaccatcatggaggaggtgaagatcaagccacccaagcagcagcagaccacagagatccacagcgacaagctgagccgcttcaccaccagcgctgagaaggaggccaagctggtgtacagcaacagcagcagcggccccacagccaccctgcagaagatccccaacacccacctgagctctgtgaccaccagtgacctgagccctggcccctgccaccacagcagcctgagccagatccccagcgccatccccagcatgccccaccagcccaccatcctgctgaacacagtgtctgccagcgccagcccctgcctgcaccctggggcccagaacatccccagccccaccggcctgccccgctgccgcagcggcagccacaccatcggccccttcagcagcttccagagcgctgcccacatctacagccagaagctgagccggcccagcagcgccaaggccggcagctgctacctgaacaagcaccacagcggcatcgccaagacccagaaggagggggaggatgccagcctgtacagcaagcgctacaaccagagcatggtgacagctgagctgcagaggctggccgagaagcaggccgcccggcagtacagccccagcagccacatcaacctgctgacccagcaggtgaccaacctgaacctggccaccggcatcatcaacagaagcagcgccagcgccccacccaccctgcggcccatcatcagccccagcggccccacctggagcacccagagcgacccccaggcccctgagaaccacagcagcagccctggcagccgcagcctgcagacaggaggctttgcctgggagggggaggtggagaacaacgtgtacagccaggccaccggggtggtgccccagcacaagtaccaccccacagctggcagctaccagctgcagtttgccctgcagcagctggagcagcagaagctgcagagccggcagctgctggaccagagccgggcccggcaccaggccatcttcggcagccagaccctgcccaacagcaacctgtggaccatgaacaatggagctggctgccgcatcagcagcgccacagccagcggccagaagcccaccaccctgccccagaaggtggtgcccccacccagcagctgtgccagcctggtgcccaagcccccacccaaccacgagcaggtgctgcggcgggccaccagccagaaggccagcaacacccgcttccgcagcagcttccagaactacctgtggtacttcttccaggccgtgtcctag

SEQ ID NO: 174707 - DNA, 2337 bp, synthetic construct
  misc_feature 1..2337: note = Description of Artificial Sequence: Synthetic coding sequence
  source 1..2337: mol_type = other DNA
atggcccacgtggaggacctgatcatcaagaccatcatctctgctgagctggccatcgccacagcctgcaagacctttgtgccccacaggagcagctgctttgagctgtatggctttgatgtgctgattgacagcaccctgaagccctggctgctggaggtgaacctgagccccagcctggcctgtgatgcccccctggacctgaagatcaaggcctccatgatcagtgacatgttcaccgtggtgggctttgtgtgccaggaccctgcccagagggccagcacccggcccatctaccccacctttgagagcagcagaagaaaccccttccagaagccccagcgctgccggcccctgagcgccagtgatgctgagatgaagaacctggtgggcagcgcccgggagaagggccctgggaagctgggcggctctgtgctgggcctgtccatggaggagatcaaggtgctgcggcgggtgaaggaggagaatgacagaagaggaggcttcatccgcatcttccccaccagcgagacctgggagatctacggcagctacctggagcacaagacctccatgaactacatgctggccaccaggctcttccaggacaggatgacagcagatggagcccctgagctgaagattgagagcctgaacagcaaggccaagctgcacgccgccctgtatgaaaggaagctgctgagcctggaggtgaggaagagaagaagaagaagcagccggctgcgggccatgaggcccaagtaccctgtgatcacccagcctgctgagatgaatgtgaagacagaaacagagagcgaggaggaggaggaggtggccctggacaatgaagatgaggagcaggaggccagccaggaggagagcgctggcttcctgcgggagaaccaggccaagtacacccccagcctgacagccctggtggagaacacccccaaggaaaattccatgaaggtgcgggagtggaacaacaagggcggccactgctgcaagctggagacccaggagctggagcccaagttcaacctgatgcagatcctgcaggacaatggaaacctgagcaagatgcaggccagaattgccttcagcgcctacctgcagcacgtgcagatccggctgatgaaggacagcggcggccagaccttcagcgcctcctgggccgccaaggaggatgagcagatggagctggtggtgcgcttcctgaagagggccagcaacaacctgcagcacagcctgaggatggtgctgcccagccggcggctggccctgctggagcggcggcgcatcctggcccaccagctgggggacttcatcatcgtgtacaacaaggagacagagcagatggccgagaagaagagcaagaagaaggtggaggaggaggaggaggatggagtgaacatggagaacttccaggagttcatccggcaggccagcgaggccgagctggaggaggtgctgaccttctacacccagaagaacaagagcgccagcgtcttcctgggcacccacagcaagatcagcaagaacaacaacaactacagcgacagcggggccaagggggaccaccctgagaccatcatggaggaggtgaagatcaagccacccaagcagcagcagaccacagagatccacagcgacaagctgagccgcttcaccaccagcgctgagaaggaggccaagctggtgtacagcaacagcagcagcggccccacagccaccctgcagaagatccccaacacccacctgagctctgtgaccaccagtgacctgagccctggcccctgccaccacagcagcctgagccagatccccagcgccatccccagcatgccccaccagcccaccatcctgctgaacacagtgtctgccagcgccagcccctgcctgcaccctggggcccagaacatccccagccccaccggcctgccccgctgccgcagcggcagccacaccatcggccccttcagcagcttccagagcgctgcccacatctacagccagaagctgagccggcccagcagcgccaaggccggcagctgctacctgaacaagcaccacagcggcatcgccaagacccagaaggagggggaggatgccagcctgtacagcaagcgctacaaccagagcatggtgacagctgagctgcagaggctggccgagaagcaggccgcccggcagtacagccccagcagccacacagacccctggaagtatgacaggagcatccgcatgtgcagccccctgaacatcctggagcctgagttcaagaagtacctgatgggcatctacagcccccacagcagcaagaagaagaagaagtag

SEQ ID NO: 174708 - DNA, 1755 bp, synthetic construct
  misc_feature 1..1755: note = Description of Artificial Sequence: Synthetic coding sequence
  source 1..1755: mol_type = other DNA
atgagaattggcacccccacagctggccctggccccagcgctgtgatggagggctgcctgggcgtggccgagctgaggaagctgagcaccttcagcgcctacctggaggaccacagctacaacgtggagcagatctggagggacattgaagatgtgatcatcaagaccctcatcagcgcccaccccatcatccgccacaactaccacacctgcttccccaaccacaccctgaacagcgcctgctttgagatcctgggctttgacatcctgctggaccacaagctgaagccctggctgctggaggtgaaccacagccccagcttcagcacagacagccggctggacaaggaggtgaaggatggcctgctgtatgacaccctggtgctgatcaacctggagagctgtgacaagaagaaggtgctggaggaggagcggcagaggggccagttcctgcagcagtgctgcagccgggagatgagaattgaggaggccaagggcttccgggctgtgcagctgaagaagacagagacctatgagaaggagaactgtggcggcttccgcctcatctaccccagcctgaacagcgagaagtatgagaagttcttccaggacaacaacagcctcttccagaacacagtggccagccgggcccgggaggagtatgcccggcagctgatccaggagctgcggctgaagcgggagaagaagcccttccagatgaagaagaaggtggagatgcagggcgagagcgctggggagcaggtgaggaagaagggcatgaggggctggcagcagaagcagcagcagaaggacaaggccgccacccaggccagcaagcagtacatccagcccctgaccctggtgtcctacaccccagacctgctgctgtctgtgcggggggagaggaagaatgaaacagacagcagcctgaaccaggaggcccccacagaggaggccagctctgtgttccccaagctgaccagcgccaagcccttcagcagcctgcctgacctgaggaacatcaacctgagcagcagcaagctggagcccagcaagcccaacttcagcatcaaggaggccaagagcgccagcgctgtgaatgtgttcaccggcaccgtgcacctgacctctgtggagaccaccccagagagcaccacccagctgagcatcagccccaagagcccccccaccctggccgtgacagccagcagcgagtacagcggccctgagacagacagagtggtgtccttcaagtgcaagaagcagcagaccccaccccacctgacccagaagaagatgctgaagagcttcctgcccaccaagagcaagagcttctgggagagccccaacaccaactggaccctgctgaagagtgacatgaacaagccccacctgatcagcgagctgctgaccaagctgcagctgagcggcaagctgtccttcttccctgcccactacaaccccaagctgggcatgaacaacctgagccagaaccccagcctgcccggggagtgccacagcagaagtgacagcagcggggagaagaggcagctggatgtgagcagcctgctgctgcagagcccccagagctacaacgtgaccctgcgggacctgctggtgattgccaccccagcccagctggacccccggccctgccgcagccacgccagcgccatgagggacccctgcatgcaggaccaggaggcctacagccactgcctgatcagcggccagaagggctgtgagaggagctag

SEQ ID NO: 174709 - DNA, 2532 bp, synthetic construct
  misc_feature 1..2532: note = Description of Artificial Sequence: Synthetic coding sequence
  source 1..2532: mol_type = other DNA
atgccccagtgccccaccctggagagccaggagggagaaaattctgaggagaagggggacagcagcaaggaggaccccaaggagaccgtggccctggcctttgtgagagaaaatcctggggcccagaatggcctgcagaatgcccagcagcagggcaagaagaagaggaagaagaagaggctggtgatcaacctgagcagctgccgctatgagagcgtgcggcgggccgcccagcagtatggcttccgggagggcggagaagatgatgactggaccctgtactggacagactacagcgtgtccctggagcgggtgatggagatgaagagctaccagaagatcaaccacttccctggcatgtctgagatctgcaggaaggacctgctggccaggaacatgagcaggatgctgaagatgttccccaaggacttccgcttcttccccaggacctggtgcctgcctgctgactggggagacctgcagacctacagccgcagcaggaagaacaagacctacatctgcaagccagacagcggctgccagggcaagggcatcttcatcaccaggacagtgaaggagatcaagccaggagaggacatgatctgccagctgtacatcagcaagcccttcatcattgatggcttcaagtttgacctgcgcatctacgtgctggtgaccagctgtgaccccctgcgcatctttgtgtacaatgaaggcctggccaggtttgccaccaccagctacagccggccctgcacagacaacctggatgacatctgcatgcacctgaccaactacagcatcaacaagcacagcagcaacttcagcagagatgcccacagcggcagcaagaggaagctgagcaccttcagcgcctacctggaggaccacagctacaacgtggagcagatctggagggacattgaagatgtgatcatcaagaccctcatcagcgcccaccccatcatccgccacaactaccacacctgcttccccaaccacaccctgaacagcgcctgctttgagatcctgggctttgacatcctgctggaccacaagctgaagccctggctgctggaggtgaaccacagccccagcttcagcacagacagccggctggacaaggaggtgaaggatggcctgctgtatgacaccctggtgctgatcaacctggagagctgtgacaagaagaaggtgctggaggaggagcggcagaggggccagttcctgcagcagtgctgcagccgggagatgagaattgaggaggccaagggcttccgggctgtgcagctgaagaagacagagacctatgagaaggagaactgtggcggcttccgcctcatctaccccagcctgaacagcgagaagtatgagaagttcttccaggacaacaacagcctcttccagaacacagtggccagccgggcccgggaggagtatgcccggcagctgatccaggagctgcggctgaagcgggagaagaagcccttccagatgaagaagaaggtggagatgcagggcgagagcgctggggagcaggtgaggaagaagggcatgaggggctggcagcagaagcagcagcagaaggacaaggccgccacccaggccagcaagcagtacatccagcccctgaccctggtgtcctacaccccagacctgctgctgtctgtgcggggggagaggaagaatgaaacagacagcagcctgaaccaggaggcccccacagaggaggccagcagcgtcttccccaagctgaccagcgccaagcccttcagcagcctgcctgacctgaggaacatcaacctgagcagcagcaagctggagcccagcaagcccaacttcagcatcaaggaggccaagagcgccagcgctgtgaatgtgttcaccggcaccgtgcacctgacctctgtggagaccaccccagagagcaccacccagctgagcatcagccccaagagcccccccaccctggccgtgacagccagcagcgagtacagcggccctgagacagacagagtggtgtccttcaagtgcaagaagcagcagaccccaccccacctgacccagaagaagatgctgaagagcttcctgcccaccaagagcaagagcttctgggagagccccaacaccaactggaccctgctgaagagtgacatgaacaagccccacctgatcagcgagctgctgaccaagctgcagctgagcggcaagctgtccttcttccctgcccactacaaccccaagctgggcatgaacaacctgagccagaaccccagcctgcctggagagtgccacagcagaagtgacagcagtggagagaagaggcagctggatgtgagcagcctgctgctgcagagcccccagagctacaacgtgaccctgcgggacctgctggtgattgccaccccagcccagctggacccccggccctgccgcagccacgccagcgccatgagggacccctgcatgcaggaccaggaggcctacagccactgcctgatcagcggccagaagggctgtgagaggagctag

SEQ ID NO: 174710 - DNA, 558 bp, synthetic construct
  misc_feature 1..558: note = Description of Artificial Sequence: Synthetic coding sequence
  source 1..558: mol_type = other DNA
cagcccatgggcgccctgctgctgcaccccagccggcggggccctgctggggtggtggcctcctggaccagcagccctgctggaagagatggcggcgtgggcattgctggggcctggtacttcccccgggccagcagccaggcccgggagatgccccagtgccccaccctggagagccaggagggagaaaattctgaggagaagggggacagcagcaaggaggaccccaaggagaccgtggccctggcctttgtgagagaaaatcctggggcccagaatggcctgcagaatgcccagcagcagggcaagaagaagaggaagaagaagaggatgcccctgaagaacagcaggaagaggcgcttcccctgcttcaagaaggccctgatctgccccggcaacctggtgcggctgcagtatgacagcaccatcctgacctaccaggaccccacagctgcctgtgccttccagttcctgttcaacatcagcccctgcctggcccccttccggctgattgatgagggcaagctggtgcacttcctgatccacagcttcccctag

SEQ ID NO: 174711 - DNA, 1710 bp, synthetic construct
  misc_feature 1..1710: note = Description of Artificial Sequence: Synthetic coding sequence
  source 1..1710: mol_type = other DNA
atggagggctgcctgggcgtggccgagctgaggaagctgagcaccttcagcgcctacctggaggaccacagctacaacgtggagcagatctggagggacattgaagatgtgatcatcaagaccctcatcagcgcccaccccatcatccgccacaactaccacacctgcttccccaaccacaccctgaacagcgcctgctttgagatcctgggctttgacatcctgctggaccacaagctgaagccctggctgctggaggtgaaccacagccccagcttcagcacagacagccggctggacaaggaggtgaaggatggcctgctgtatgacaccctggtgctgatcaacctggagagctgtgacaagaagaaggtgctggaggaggagcggcagaggggccagttcctgcagcagtgctgcagccgggagatgagaattgaggaggccaagggcttccgggctgtgcagctgaagaagacagagacctatgagaaggagaactgtggcggcttccgcctcatctaccccagcctgaacagcgagaagtatgagaagttcttccaggacaacaacagcctcttccagaacacagtggccagccgggcccgggaggagtatgcccggcagctgatccaggagctgcggctgaagcgggagaagaagcccttccagatgaagaagaaggtggagatgcagggcgagagcgctggggagcaggtgaggaagaagggcatgaggggctggcagcagaagcagcagcagaaggacaaggccgccacccaggccagcaagcagtacatccagcccctgaccctggtgtcctacaccccagacctgctgctgtctgtgcggggggagaggaagaatgaaacagacagcagcctgaaccaggaggcccccacagaggaggccagcagcgtcttccccaagctgaccagcgccaagcccttcagcagcctgcctgacctgaggaacatcaacctgagcagcagcaagctggagcccagcaagcccaacttcagcatcaaggaggccaagagcgccagcgctgtgaatgtgttcaccggcaccgtgcacctgacctctgtggagaccaccccagagagcaccacccagctgagcatcagccccaagagcccccccaccctggccgtgacagccagcagcgagtacagcggccctgagacagacagagtggtgtccttcaagtgcaagaagcagcagaccccaccccacctgacccagaagaagatgctgaagagcttcctgcccaccaagagcaagagcttctgggagagccccaacaccaactggaccctgctgaagagtgacatgaacaagccccacctgatcagcgagctgctgaccaagctgcagctgagcggcaagctgtccttcttccctgcccactacaaccccaagctgggcatgaacaacctgagccagaaccccagcctgcctggagagtgccacagcagaagtgacagcagtggagagaagaggcagctggatgtgagcagcctgctgctgcagagcccccagagctacaacgtgaccctgcgggacctgctggtgattgccaccccagcccagctggacccccggccctgccgcagccacgccagcgccatgagggacccctgcatgcaggaccaggaggcctacagccactgcctgatcagcggccagaagggctgtgagaggagctag

SEQ ID NO: 174712 - DNA, 2676 bp, synthetic construct
  misc_feature 1..2676: note = Description of Artificial Sequence: Synthetic coding sequence
  source 1..2676: mol_type = other DNA
atgggcgccctgctgctgcaccccagccggcggggccctgctggggtggtggcctcctggaccagcagccctgctggaagagatggcggcgtgggcattgctggggcctggtacttcccccgggccagcagccaggcccgggagatgccccagtgccccaccctggagagccaggagggagaaaattctgaggagaagggggacagcagcaaggaggaccccaaggagaccgtggccctggcctttgtgagagaaaatcctggggcccagaatggcctgcagaatgcccagcagcagggcaagaagaagaggaagaagaagaggctggtgatcaacctgagcagctgccgctatgagagcgtgcggcgggccgcccagcagtatggcttccgggagggcggagaagatgatgactggaccctgtactggacagactacagcgtgtccctggagcgggtgatggagatgaagagctaccagaagatcaaccacttccctggcatgtctgagatctgcaggaaggacctgctggccaggaacatgagcaggatgctgaagatgttccccaaggacttccgcttcttccccaggacctggtgcctgcctgctgactggggagacctgcagacctacagccgcagcaggaagaacaagacctacatctgcaagccagacagcggctgccagggcaagggcatcttcatcaccaggacagtgaaggagatcaagccaggagaggacatgatctgccagctgtacatcagcaagcccttcatcattgatggcttcaagtttgacctgcgcatctacgtgctggtgaccagctgtgaccccctgcgcatctttgtgtacaatgaaggcctggccaggtttgccaccaccagctacagccggccctgcacagacaacctggatgacatctgcatgcacctgaccaactacagcatcaacaagcacagcagcaacttcagcagagatgcccacagcggcagcaagaggaagctgagcaccttcagcgcctacctggaggaccacagctacaacgtggagcagatctggagggacattgaagatgtgatcatcaagaccctcatcagcgcccaccccatcatccgccacaactaccacacctgcttccccaaccacaccctgaacagcgcctgctttgagatcctgggctttgacatcctgctggaccacaagctgaagccctggctgctggaggtgaaccacagccccagcttcagcacagacagccggctggacaaggaggtgaaggatggcctgctgtatgacaccctggtgctgatcaacctggagagctgtgacaagaagaaggtgctggaggaggagcggcagaggggccagttcctgcagcagtgctgcagccgggagatgagaattgaggaggccaagggcttccgggctgtgcagctgaagaagacagagacctatgagaaggagaactgtggcggcttccgcctcatctaccccagcctgaacagcgagaagtatgagaagttcttccaggacaacaacagcctcttccagaacacagtggccagccgggcccgggaggagtatgcccggcagctgatccaggagctgcggctgaagcgggagaagaagcccttccagatgaagaagaaggtggagatgcagggcgagagcgctggggagcaggtgaggaagaagggcatgaggggctggcagcagaagcagcagcagaaggacaaggccgccacccaggccagcaagcagtacatccagcccctgaccctggtgtcctacaccccagacctgctgctgtctgtgcggggggagaggaagaatgaaacagacagcagcctgaaccaggaggcccccacagaggaggccagcagcgtcttccccaagctgaccagcgccaagcccttcagcagcctgcctgacctgaggaacatcaacctgagcagcagcaagctggagcccagcaagcccaacttcagcatcaaggaggccaagagcgccagcgctgtgaatgtgttcaccggcaccgtgcacctgacctctgtggagaccaccccagagagcaccacccagctgagcatcagccccaagagcccccccaccctggccgtgacagccagcagcgagtacagcggccctgagacagacagagtggtgtccttcaagtgcaagaagcagcagaccccaccccacctgacccagaagaagatgctgaagagcttcctgcccaccaagagcaagagcttctgggagagccccaacaccaactggaccctgctgaagagtgacatgaacaagccccacctgatcagcgagctgctgaccaagctgcagctgagcggcaagctgtccttcttccctgcccactacaaccccaagctgggcatgaacaacctgagccagaaccccagcctgcctggagagtgccacagcagaagtgacagcagtggagagaagaggcagctggatgtgagcagcctgctgctgcagagcccccagagctacaacgtgaccctgcgggacctgctggtgattgccaccccagcccagctggacccccggccctgccgcagccacgccagcgccatgagggacccctgcatgcaggaccaggaggcctacagccactgcctgatcagcggccagaagggctgtgagaggagctag

SEQ ID NO: 174713 - DNA, 306 bp, synthetic construct
  misc_feature 1..306: note = Description of Artificial Sequence: Synthetic coding sequence
  source 1..306: mol_type = other DNA
atgccccagtgccccaccctggagagccaggagggagaaaattctgaggagaagggggacagcagcaaggaggaccccaaggagaccgtggccctggcctttgtgagagaaaatcctggggcccagaatggcctgcagaatgcccagcagcagggcaagaagaagaggaagaagaagaggctggtgatcaacctgagcagctgccgctatgagagcgtgcggcgggccgcccagcagtatggcttccgggagggcggagaagatgatgactggaccctgtactggacagactacagcgtgtcctag

SEQ ID NO: 174714 - DNA, 1356 bp, synthetic construct
  misc_feature 1..1356: note = Description of Artificial Sequence: Synthetic coding sequence
  source 1..1356: mol_type = other DNA
atgagggagtgcatcagcatccacgtgggccaggccggcgtgcagattggaaatgcctgctgggagctgtactgcctggagcacggcatccagccagatggccagatgcccagcgacaagaccatcggcggcggagatgacagcttcaacaccttcttcagcgagaccggggccggcaagcacgtgcccagggctgtgtttgtggacctggagcccaccgtgattgatgaggtgaggacaggcacctaccggcagctgttccaccctgagcagctgatcaccgggaaggaggatgctgccaacaactatgcccggggccactacaccatcggcaaggagatcatcgacctggtgctggaccgcatcaggaagctggccgaccagtgcaccggcctgcagggcttcctggtgttccacagctttggaggcggcactggaagtggcttcaccagcctgctgatggagcggctgtctgtggactatggcaagaagagcaagctggagttcagcatctacccagccccccaggtgtccacagctgtggtggagccctacaacagcatcctgaccacccacaccaccctggagcacagcgactgtgccttcatggtggacaatgaggccatctatgacatctgcagaagaaacctggacatcgagcggcccacctacaccaacctgaaccggctgattggccagatcgtgagcagcatcacagccagcctgcgctttgatggagccctgaatgtggacctgacagagttccagaccaacctggtgccctacccccgcatccacttccccctggccacctacgcccctgtgatctctgctgagaaggcctaccacgagcagctgtctgtggccgagatcaccaatgcctgctttgagcccgccaaccagatggtgaagtgtgaccccaggcatggcaagtacatggcctgctgcctgctgtacagaggagatgtggtgcccaaggatgtgaatgctgccatcgccaccatcaagaccaagaggaccatccagtttgtggactggtgccccaccggcttcaaggtgggcatcaactaccagcccccaacagtggtgcctggaggagacctggccaaggtgcagagagctgtgtgcatgctgagcaacaccacagccatcgccgaggcctgggcccggctggaccacaagtttgacctgatgtatgccaagagggcctttgtgcactggtacgtgggggagggcatggaggagggggagttcagcgaggcccgggaggacatggccgccctggagaaggactatgaggaggtgggcgtggacagcgtggagggggagggggaggaggagggggaggagtactag

SEQ ID NO: 174715 - DNA, 1356 bp, synthetic construct; identical to SEQ ID NO: 174714
  misc_feature 1..1356: note = Description of Artificial Sequence: Synthetic coding sequence
  source 1..1356: mol_type = other DNA

SEQ ID NO: 174716 - DNA, 1152 bp, synthetic construct
  misc_feature 1..1152: note = Description of Artificial Sequence: Synthetic coding sequence
  source 1..1152: mol_type = other DNA
atgattgacctggagcccaccgtggtggatgaggtgcgggccggcacctaccggcagctgttccaccctgagcagctgatcaccgggaaggaggatgctgccaacaactatgcccggggccactacacagtgggcaaggagagcattgacctggtgctggaccgcatcaggaagctgacagatgcctgcagcggcctgcagggcttcctgatcttccacagctttggaggcggcactggaagtggcttcaccagcctgctgatggagcggctgagcctggactatggcaagaagagcaagctggagtttgccatctacccagccccccaggtgtccacagctgtggtggagccctacaacagcatcctgaccacccacaccaccctggagcacagcgactgtgccttcatggtggacaatgaggccatctatgacatctgcagaagaaacctggacatcgagcggcccacctacaccaacctgaacagactcatcagccagatcgtgagcagcatcacagccagcctgcgctttgatggagccctgaatgtggacctgacagagttccagaccaacctggtgccctacccccgcatccacttccccctggtgacctacgcccccatcatctctgctgagaaggcctaccacgagcagctgtctgtggccgagatcaccagcagctgctttgagcccaacagccagatggtgaagtgtgaccccaggcatggcaagtacatggcctgctgcatgctgtacagaggagatgtggtgcccaaggatgtgaatgtggccatcgccgccatcaagaccaagaggaccatccagtttgtggactggtgccccaccggcttcaaggtgggcatcaactaccagcccccaacagtggtgcctggaggagacctggccaaggtgcagagagctgtgtgcatgctgagcaacaccacagccatcgccgaggcctgggcccggctggaccacaagtttgacctgatgtatgccaagagggcctttgtgcactggtacgtgggggagggcatggaggagggggagttcagcgaggcccgggaggacctggccgccctggagaaggactatgaggaggtgggcacagacagctttgaggaggagaatgaaggagaggagttctag

SEQ ID NO: 174717 - DNA, 1350 bp, synthetic construct
  misc_feature 1..1350: note = Description of Artificial Sequence: Synthetic coding sequence
  source 1..1350: mol_type = other DNA
atgagggagtgcatctctgtgcacgtgggccaggccggcgtgcagattggaaatgcctgctgggagctgttctgcctggagcacggcatccaggctgatggcacctttgatgcccaggccagcaagatcaatgatgatgacagcttcaccaccttcttcagcgagactggaaatggcaagcacgtgcccagggctgtgatgattgacctggagcccaccgtggtggatgaggtgcgggccggcacctaccggcagctgttccaccctgagcagctgatcaccgggaaggaggatgctgccaacaactatgcccggggccactacacagtgggcaaggagagcattgacctggtgctggaccgcatcaggaagctgacagatgcctgcagcggcctgcagggcttcctgatcttccacagctttggaggcggcactggaagtggcttcaccagcctgctgatggagcggctgagcctggactatggcaagaagagcaagctggagtttgccatctacccagccccccaggtgtccacagctgtggtggagccctacaacagcatcctgaccacccacaccaccctggagcacagcgactgtgccttcatggtggacaatgaggccatctatgacatctgcagaagaaacctggacatcgagcggcccacctacaccaacctgaacagactcatcagccagatcgtgagcagcatcacagccagcctgcgctttgatggagccctgaatgtggacctgacagagttccagaccaacctggtgccctacccccgcatccacttccccctggtgacctacgcccccatcatctctgctgagaaggcctaccacgagcagctgtctgtggccgagatcaccagcagctgctttgagcccaacagccagatggtgaagtgtgaccccaggcatggcaagtacatggcctgctgcatgctgtacagaggagatgtggtgcccaaggatgtgaatgtggccatcgccgccatcaagaccaagaggaccatccagtttgtggactggtgccccaccggcttcaaggtgggcatcaactaccagcccccaacagtggtgcctggaggagacctggccaaggtgcagagagctgtgtgcatgctgagcaacaccacagccatcgccgaggcctgggcccggctggaccacaagtttgacctgatgtatgccaagagggcctttgtgcactggtacgtgggggagggcatggaggagggggagttcagcgaggcccgggaggacctggccgccctggagaaggactatgaggaggtgggcacagacagctttgaggaggagaatgaaggagaggagttctag

SEQ ID NO: 174718 - DNA, 912 bp, synthetic construct
  misc_feature 1..912: note = Description of Artificial Sequence: Synthetic coding sequence
  source 1..912: mol_type = other DNA
atggcccggcggggccctggctggaggcccctgctgctgctggtgctgctggccggggccgcccagggcggcctgtacttccggcggggccagacctgctaccggcccctgcggggagatggcctggcccccctgggccgcagcacctacccccggccccatgagtacctgagccctgctgacctgcccaagtcctgggactggagaaatgtggatggagtgaactatgccagcatcaccaggaaccagcacatcccccagtactgcggcagctgctgggcccacgccagcaccagcgccatggctgaccgcatcaacatcaagaggaagggggcctggcccagcaccctgctgtctgtgcagaatgtcatcgactgtggaaatgccggcagctgtgagggcggcaatgacctgtctgtgtgggactatgcccaccagcacggcatcccagatgagacctgcaacaactaccaggccaaggaccaggagtgtgacaagttcaaccagtgtggcacctgcaatgagttcaaggagtgccacgccatccggaactacaccctgtggagggtgggggactatggcagcctgagcggccgggagaagatgatggccgagatctatgccaacggccccatcagctgtggcatcatggccacagagcggctggccaactacacaggaggcatctatgcagagtaccaggacaccacctacatcaaccacgtggtgtctgtggccggctggggcatcagtgatggaacagagtactggatcgtgaggaacagctggggcgagccctggggcgagcggggctggctgagaattgtgaccagcacctacaaggatggcaagggggcccgctacaacctggccatcgaggagcactgcaccttcggggaccccatcgtgtag

SEQ ID NO: 174719 - DNA, 1338 bp, synthetic construct
  misc_feature 1..1338: note = Description of Artificial Sequence: Synthetic coding sequence
  source 1..1338: mol_type = other DNA
atgagggagatcgtgcacatccaggccggccagtgtggcaaccagatcggggccaagttctgggaggtgatcagtgatgagcacggcatcgaccccaccggcagctaccatggagacagcgacctgcagctggagcgcatcaacgtgtactacaatgaggccactggaaacaagtatgtgccccgggccatcctggtggacctggagcccggcaccatggattctgtgcgcagcggccccttcggccagatcttccggccagacaactttgtgtttggccagagcggggccggcaacaactgggccaagggccactacacagaaggagctgagctggtggacagcgtgctggatgtggtgaggaaggagagcgagagctgtgactgcctgcagggcttccagctgacccacagcctgggcggcggcactggaagtggcatgggcaccctgctgatcagcaagatccgggaggagtacccagaccgcatcatgaacaccttctctgtgatgcccagccccaaggtgtctgacacagtggtggagccctacaatgccaccctgtctgtgcaccagctggtggagaacacagatgagacctactgcatcgacaatgaggccctgtatgacatctgcttccgcaccctgaagctgaccacccccacctacggggacctgaaccacctggtgtctgccaccatgtctggagtgaccacctgcctgcgcttccctggccagctgaatgctgacctgaggaagctggccgtgaacatggtgcccttcccccggctgcacttcttcatgcctggctttgcccccctgaccagccggggcagccagcagtaccgggccctgactgtgcctgagctgacccagcagatgtttgacagcaagaacatgatggccgcctgtgaccccaggcatggccgctacctgactgtggccgccatcttccggggccgcatgtccatgaaggaggtggatgagcagatgctgaatgtgcagaacaagaacagcagctactttgtggagtggatccccaacaacgtgaagacagctgtgtgtgacatccccccccggggcctgaagatgtctgccaccttcatcggcaacagcacagccatccaggagctgttcaagaggatcagcgagcagttcaccgccatgttccggaggaaggccttcctgcactggtacacaggagagggcatggatgagatggagttcacagaagctgagagcaacatgaatgacctggtgtctgagtaccagcagtaccaggatgccacagcagatgagcagggcgagtttgaggaggaggagggggaggatgaggcctag

SEQ ID NO: 174720 - DNA, 1353 bp, synthetic construct
  misc_feature 1..1353: note = Description of Artificial Sequence: Synthetic coding sequence
  source 1..1353: mol_type = other DNA
atgagggagatcgtgcacatccaggccggccagtgtggcaaccagatcggggccaagttctgggaggtgatcagtgatgagcacggcatcgaccccagcggcaactacgtgggggacagcgacctgcagctggagcgcatctctgtgtactacaatgaggccagcagccacaagtatgtgccccgggccatcctggtggacctggagcccggcaccatggattctgtgcgcagcggggccttcggccacctgttccggccagacaacttcatcttcggccagagcggggccggcaacaactgggccaagggccactacacagaaggagctgagctggtggacagcgtgctggatgtggtgaggaaagaatgtgagaactgtgactgcctgcagggcttccagctgacccacagcctgggcggcggcactggaagtggcatgggcaccctgctgatcagcaaggtgcgggaggagtacccagaccgcatcatgaacaccttctctgtggtgcccagccccaaggtgtctgacacagtggtggagccctacaatgccaccctgagcatccaccagctggtggagaacacagatgagacctactgcatcgacaatgaggccctgtatgacatctgcttccgcaccctgaagctggccacccccacctacggggacctgaaccacctggtgtctgccaccatgtctggagtgaccaccagcctgcgcttccctggccagctgaatgctgacctgaggaagctggccgtgaacatggtgcccttcccccggctgcacttcttcatgcctggctttgcccccctgacagcccggggcagccagcagtaccgggccctgactgtgcctgagctgacccagcagatgtttgatgccaagaacatgatggccgcctgtgaccccaggcatggccgctacctgactgtggccaccgtcttccggggccgcatgtccatgaaggaggtggatgagcagatgctggccatccagagcaagaacagcagctactttgtggagtggatccccaacaacgtgaaggtggccgtgtgtgacatccccccccggggcctgaagatgagcagcaccttcatcggcaacagcacagccatccaggagctgttcaagaggatcagcgagcagttcaccgccatgttccggaggaaggccttcctgcactggtacacaggagagggcatggatgagatggagttcacagaagctgagagcaacatgaatgacctggtgtctgagtaccagcagtaccaggatgccacagctgaggaggagggggagatgtatgaagatgatgaggaggagagcgaggcccagggccccaagtag

SEQ ID NO: 174721 - DNA, 1137 bp, synthetic construct
  misc_feature 1..1137: note = Description of Artificial Sequence: Synthetic coding sequence
  source 1..1137: mol_type = other DNA
atggattctgtgcgcagcggggccttcggccacctgttccggccagacaacttcatcttcggccagagcggggccggcaacaactgggccaagggccactacacagaaggagctgagctggtggacagcgtgctggatgtggtgaggaaagaatgtgagaactgtgactgcctgcagggcttccagctgacccacagcctgggcggcggcactggaagtggcatgggcaccctgctgatcagcaaggtgcgggaggagtacccagaccgcatcatgaacaccttctctgtggtgcccagccccaaggtgtctgacacagtggtggagccctacaatgccaccctgagcatccaccagctggtggagaacacagatgagacctactgcatcgacaatgaggccctgtatgacatctgcttccgcaccctgaagctggccacccccacctacggggacctgaaccacctggtgtctgccaccatgtctggagtgaccaccagcctgcgcttccctggccagctgaatgctgacctgaggaagctggccgtgaacatggtgcccttcccccggctgcacttcttcatgcctggctttgcccccctgacagcccggggcagccagcagtaccgggccctgactgtgcctgagctgacccagcagatgtttgatgccaagaacatgatggccgcctgtgaccccaggcatggccgctacctgactgtggccaccgtcttccggggccgcatgtccatgaaggaggtggatgagcagatgctggccatccagagcaagaacagcagctactttgtggagtggatccccaacaacgtgaaggtggccgtgtgtgacatccccccccggggcctgaagatgagcagcaccttcatcggcaacagcacagccatccaggagctgttcaagaggatcagcgagcagttcaccgccatgttccggaggaaggccttcctgcactggtacacaggagagggcatggatgagatggagttcacagaagctgagagcaacatgaatgacctggtgtctgagtaccagcagtaccaggatgccacagctgaggaggagggggagatgtatgaagatgatgaggaggagagcgaggcccagggccccaagtag

SEQ ID NO: 174722 - DNA, 1335 bp, synthetic construct
  misc_feature 1..1335: note = Description of Artificial Sequence: Synthetic coding sequence
  source 1..1335: mol_type = other DNA
atgagggagatcgtgcacatccaggccggccagtgtggcaaccagatcggggccaagttctgggaggtgatcagtgatgagcacggcatcgaccccaccggcacctaccatggagacagcgacctgcagctggaccgcatctctgtgtactacaatgaggccactggaggcaagtatgtgccccgggccatcctggtggacctggagcccggcaccatggattctgtgcgcagcggccccttcggccagatcttccggccagacaactttgtgtttggccagagcggggccggcaacaactgggccaagggccactacacagaaggagctgagctggtggacagcgtgctggatgtggtgaggaaggaggccgagagctgtgactgcctgcagggcttccagctgacccacagcctgggcggcggcactggaagtggcatgggcaccctgctgatcagcaagatccgggaggagtacccagaccgcatcatgaacaccttctctgtggtgcccagccccaaggtgtctgacacagtggtggagccctacaatgccaccctgtctgtgcaccagctggtggagaacacagatgagacctactgcatcgacaatgaggccctgtatgacatctgcttccgcaccctgaagctgaccacccccacctacggggacctgaaccacctggtgtctgccaccatgtctggagtgaccacctgcctgcgcttccctggccagctgaatgctgacctgaggaagctggccgtgaacatggtgcccttcccccggctgcacttcttcatgcctggctttgcccccctgaccagccggggcagccagcagtaccgggccctgactgtgcctgagctgacccagcaggtgtttgatgccaagaacatgatggccgcctgtgaccccaggcatggccgctacctgactgtggccgctgtgttccggggccgcatgtccatgaaggaggtggatgagcagatgctgaatgtgcagaacaagaacagcagctactttgtggagtggatccccaacaacgtgaagacagctgtgtgtgacatccccccccggggcctgaagatggctgtgaccttcatcggcaacagcacagccatccaggagctgttcaagaggatcagcgagcagttcaccgccatgttccggaggaaggccttcctgcactggtacacaggagagggcatggatgagatggagttcacagaagctgagagcaacatgaatgacctggtgtctgagtaccagcagtaccaggatgccacagctgaggaggaggaggactttggagaggaggccgaggaggaggcctag

SEQ ID NO: 174723 - DNA, 1119 bp, synthetic construct
  misc_feature 1..1119: note = Description of Artificial Sequence: Synthetic coding sequence
  source 1..1119: mol_type = other DNA
atggattctgtgcgcagcggccccttcggccagatcttccggccagacaactttgtgtttggccagagcggggccggcaacaactgggccaagggccactacacagaaggagctgagctggtggacagcgtgctggatgtggtgaggaaggaggccgagagctgtgactgcctgcagggcttccagctgacccacagcctgggcggcggcactggaagtggcatgggcaccctgctgatcagcaagatccgggaggagtacccagaccgcatcatgaacaccttctctgtggtgcccagccccaaggtgtctgacacagtggtggagccctacaatgccaccctgtctgtgcaccagctggtggagaacacagatgagacctactgcatcgacaatgaggccctgtatgacatctgcttccgcaccctgaagctgaccacccccacctacggggacctgaaccacctggtgtctgccaccatgtctggagtgaccacctgcctgcgcttccctggccagctgaatgctgacctgaggaagctggccgtgaacatggtgcccttcccccggctgcacttcttcatgcctggctttgcccccctgaccagccggggcagccagcagtaccgggccctgactgtgcctgagctgacccagcaggtgtttgatgccaagaacatgatggccgcctgtgaccccaggcatggccgctacctgactgtggccgctgtgttccggggccgcatgtccatgaaggaggtggatgagcagatgctgaatgtgcagaacaagaacagcagctactttgtggagtggatccccaacaacgtgaagacagctgtgtgtgacatccccccccggggcctgaagatggctgtgaccttcatcggcaacagcacagccatccaggagctgttcaagaggatcagcgagcagttcaccgccatgttccggaggaaggccttcctgcactggtacacaggagagggcatggatgagatggagttcacagaagctgagagcaacatgaatgacctggtgtctgagtaccagcagtaccaggatgccacagctgaggaggaggaggactttggagaggaggccgaggaggaggcctag

SEQ ID NO: 174724 - DNA, 1335 bp, synthetic construct; identical to SEQ ID NO: 174722
  misc_feature 1..1335: note = Description of Artificial Sequence: Synthetic coding sequence
  source 1..1335: mol_type = other DNA

SEQ ID NO: 174725 - DNA, 1119 bp, synthetic construct; identical to SEQ ID NO: 174723
  misc_feature 1..1119: note = Description of Artificial Sequence: Synthetic coding sequence
  source 1..1119: mol_type = other DNA

SEQ ID NO: 174726 - DNA, 1281 bp, synthetic construct
  misc_feature 1..1281: note = Description of Artificial Sequence: Synthetic coding sequence
  source 1..1281: mol_type = other DNA
atgttctgggaggtgatcagtgatgagcacggcatcgaccccaccggcacctaccatggagacagcgacctgcagctggaccgcatctctgtgtactacaatgaggccactggaggcaagtatgtgccccgggccatcctggtggacctggagcccggcaccatggattctgtgcgcagcggccccttcggccagatcttccggccagacaactttgtgtttggccagagcggggccggcaacaactgggccaagggccactacacagaaggagctgagctggtggacagcgtgctggatgtggtgaggaaggaggccgagagctgtgactgcctgcagggcttccagctgacccacagcctgggcggcggcactggaagtggcatgggcaccctgctgatcagcaagatccgggaggagtacccagaccgcatcatgaacaccttctctgtggtgcccagccccaaggtgtctgacacagtggtggagccctacaatgccaccctgtctgtgcaccagctggtggagaacacagatgagacctactgcatcgacaatgaggccctgtatgacatctgcttccgcaccctgaagctgaccacccccacctacggggacctgaaccacctggtgtctgccaccatgtctggagtgaccacctgcctgcgcttccctggccagctgaatgctgacctgaggaagctggccgtgaacatggtgcccttcccccggctgcacttcttcatgcctggctttgcccccctgaccagccggggcagccagcagtaccgggccctgactgtgcctgagctgacccagcaggtgtttgatgccaagaacatgatggccgcctgtgaccccaggcatggccgctacctgactgtggccgctgtgttccggggccgcatgtccatgaaggaggtggatgagcagatgctgaatgtgcagaacaagaacagcagctactttgtggagtggatccccaacaacgtgaagacagctgtgtgtgacatccccccccggggcctgaagatggctgtgaccttcatcggcaacagcacagccatccaggagctgttcaagaggatcagcgagcagttcaccgccatgttccggaggaaggccttcctgcactggtacacaggagagggcatggatgagatggagttcacagaagctgagagcaacatgaatgacctggtgtctgagtaccagcagtaccaggatgccacagctgaggaggaggaggactttggagaggaggccgaggaggaggcctag

SEQ ID NO: 174727 - DNA, 1119 bp, synthetic construct; identical to SEQ ID NO: 174723
  misc_feature 1..1119: note = Description of Artificial Sequence: Synthetic coding sequence
  source 1..1119: mol_type = other DNA

SEQ ID NO: 174728 - DNA, 1119 bp, synthetic construct; identical to SEQ ID NO: 174723
  misc_feature 1..1119: note = Description of Artificial Sequence: Synthetic coding sequence
  source 1..1119: mol_type = other DNA

SEQ ID NO: 174729 - DNA, 1281 bp, synthetic construct; identical to SEQ ID NO: 174726
  misc_feature 1..1281: note = Description of Artificial Sequence: Synthetic coding sequence
  source 1..1281: mol_type = other DNA

SEQ ID NO: 174730 - DNA, 1281 bp, synthetic construct; identical to SEQ ID NO: 174726
  misc_feature 1..1281: note = Description of Artificial Sequence: Synthetic coding sequence
  source 1..1281: mol_type = other DNA

SEQ ID NO: 174731 - DNA, 1119 bp, synthetic construct; identical to SEQ ID NO: 174723
  misc_feature 1..1119: note = Description of Artificial Sequence: Synthetic coding sequence
  source 1..1119: mol_type = other DNA

SEQ ID NO: 174732 - DNA, 1281 bp, synthetic construct; identical to SEQ ID NO: 174726
  misc_feature 1..1281: note = Description of Artificial Sequence: Synthetic coding sequence
  source 1..1281: mol_type = other DNA

SEQ ID NO: 174733 - DNA, 1335 bp, synthetic construct; identical to SEQ ID NO: 174722
  misc_feature 1..1335: note = Description of Artificial Sequence: Synthetic coding sequence
  source 1..1335: mol_type = other DNA

SEQ ID NO: 174734 - DNA, 1281 bp, synthetic construct; identical to SEQ ID NO: 174726
  misc_feature 1..1281: note = Description of Artificial Sequence: Synthetic coding sequence
  source 1..1281: mol_type = other DNA

SEQ ID NO: 174735 - DNA, 1119 bp, synthetic construct; identical to SEQ ID NO: 174723
  misc_feature 1..1119: note = Description of Artificial Sequence: Synthetic coding sequence
  source 1..1119: mol_type = other DNA

SEQ ID NO: 174736 - DNA, 1335 bp, synthetic construct; identical to SEQ ID NO: 174722
  misc_feature 1..1335: note = Description of Artificial Sequence: Synthetic coding sequence
  source 1..1335: mol_type = other DNA

SEQ ID NO: 174737 - DNA, 1335 bp, synthetic construct; identical to SEQ ID NO: 174722
  misc_feature 1..1335: note = Description of Artificial Sequence: Synthetic coding sequence
  source 1..1335: mol_type = other DNA

SEQ ID NO: 174738 - DNA, 1335 bp, synthetic construct; identical to SEQ ID NO: 174722
  misc_feature 1..1335: note = Description of Artificial Sequence: Synthetic coding sequence
  source 1..1335: mol_type = other DNA

SEQ ID NO: 174739 - DNA, 1062 bp, synthetic construct
  misc_feature 1..1062: note = Description of Artificial Sequence: Synthetic coding sequence
  source 1..1062: mol_type = other DNA
atgagggagatcgtgcacatccaggccggccagtgtggcaaccagatcggggccaagttctgggaggtgatcagtgatgagcacggcatcgaccccaccggcacctaccatggagacagcgacctgcagctgacccacagcctgggcggcggcaccggcagcggcatgggcaccctgctgatcagcaagatccgggaggagtacccagaccgcatcatgaacaccttctctgtggtgcccagccccaaggtgtctgacacagtggtggagccctacaatgccaccctgtctgtgcaccagctggtggagaacacagatgagacctactgcatcgacaatgaggccctgtatgacatctgcttccgcaccctgaagctgaccacccccacctatggagacctgaaccacctggtgtctgccaccatgtctggagtgaccacctgcctgcgcttccctggccagctgaatgctgacctgaggaagctggccgtgaacatggtgcccttcccccggctgcacttcttcatgcctggctttgcccccctgaccagccggggcagccagcagtaccgggccctgactgtgcctgagctgacccagcaggtgtttgatgccaagaacatgatggccgcctgtgaccccaggcatggccgctacctgactgtggccgctgtgttccggggccgcatgtccatgaaggaggtggatgagcagatgctgaatgtgcagaacaagaacagcagctactttgtggagtggatccccaacaacgtgaagacagctgtgtgtgacatccccccccggggcctgaagatggctgtgaccttcatcggcaacagcacagccatccaggagctgttcaagaggatcagcgagcagttcaccgccatgttccggaggaaggccttcctgcactggtacaccggggagggcatggatgagatggagttcacagaggccgagagcaacatgaatgacctggtgtctgagtaccagcagtaccaggatgccacagctgaggaggaggaggactttggagaggaggccgaggaggaggcctag

SEQ ID NO: 174740 - DNA, 1281 bp, synthetic construct; identical to SEQ ID NO: 174726
  misc_feature 1..1281: note = Description of Artificial Sequence: Synthetic coding sequence
  source 1..1281: mol_type = other DNA

SEQ ID NO: 174741 - DNA, 1119 bp, synthetic construct; identical to SEQ ID NO: 174723
  misc_feature 1..1119: note = Description of Artificial Sequence: Synthetic coding sequence
  source 1..1119: mol_type = other DNA

SEQ ID NO: 174742 - DNA, 1281 bp, synthetic construct; identical to SEQ ID NO: 174726
  misc_feature 1..1281: note = Description of Artificial Sequence: Synthetic coding sequence
  source 1..1281: mol_type = other DNA

SEQ ID NO: 174743 - DNA, 1281 bp, synthetic construct; identical to SEQ ID NO: 174726
  misc_feature 1..1281: note = Description of Artificial Sequence: Synthetic coding sequence
  source 1..1281: mol_type = other DNA

SEQ ID NO: 174744 - DNA, 1119 bp, synthetic construct; identical to SEQ ID NO: 174723
  misc_feature 1..1119: note = Description of Artificial Sequence: Synthetic coding sequence
  source 1..1119: mol_type = other DNA

SEQ ID NO: 174745 - DNA, 1335 bp, synthetic construct; identical to SEQ ID NO: 174722
  misc_feature 1..1335: note = Description of Artificial Sequence: Synthetic coding sequence
  source 1..1335: mol_type = other DNA

SEQ ID NO: 174746 - DNA, 732 bp, synthetic construct
  misc_feature 1..732: note = Description of Artificial Sequence: Synthetic coding sequence
  source 1..732: mol_type = other DNA
atgagggagatcgtgcacatccaggccggccagtgtggcaaccagatcggggccaagttctgggaggtgatcagtgatgagcacggcatcgaccccaccggcacctaccatggagacagcgacctgcagctggaccgcatctctgtgtactacaatgaggccactggaggcaagtatgtgccccgggccatcctggtggacctggagcccggcaccatggattctgtgcgcagcggccccttcggccagatcttccggccagacaactttgtgtttggccagagcggggccggcaacaactgggccaagggccactacacagaaggagctgagctggtggacagcgtgctggatgtggtgaggaaggaggaggtggatgagcagatgctgaatgtgcagaacaagaacagcagctactttgtggagtggatccccaacaacgtgaagacagctgtgtgtgacatccccccccggggcctgaagatggctgtgaccttcatcggcaacagcacagccatccaggagctgttcaagaggatcagcgagcagttcaccgccatgttccggaggaaggccttcctgcactggtacaccggggagggcatggatgagatggagttcacagaggccgagagcaacatgaatgacctggtgtctgagtaccagcagtaccaggatgccacagctgaggaggaggaggactttggagaggaggccgaggaggaggcctag

SEQ ID NO: 174747 - DNA, 1119 bp, synthetic construct; identical to SEQ ID NO: 174723
  misc_feature 1..1119: note = Description of Artificial Sequence: Synthetic coding sequence
  source 1..1119: mol_type = other DNA

SEQ ID NO: 174748 - DNA, 1119 bp, synthetic construct; identical to SEQ ID NO: 174723
  misc_feature 1..1119: note = Description of Artificial Sequence: Synthetic coding sequence
  source 1..1119: mol_type = other DNA

SEQ ID NO: 174749 - DNA, 1335 bp, synthetic construct; identical to SEQ ID NO: 174722
  misc_feature 1..1335: note = Description of Artificial Sequence: Synthetic coding sequence
  source 1..1335: mol_type = other DNA

SEQ ID NO: 174750 - DNA, 1119 bp, synthetic construct; identical to SEQ ID NO: 174723
  misc_feature 1..1119: note = Description of Artificial Sequence: Synthetic coding sequence
  source 1..1119: mol_type = other DNA

SEQ ID NO: 174751 - DNA, 1119 bp, synthetic construct; identical to SEQ ID NO: 174723
  misc_feature 1..1119: note = Description of Artificial Sequence: Synthetic coding sequence
  source 1..1119: mol_type = other DNA

SEQ ID NO: 174752 - DNA, 1119 bp, synthetic construct; identical to SEQ ID NO: 174723
  misc_feature 1..1119: note = Description of Artificial Sequence: Synthetic coding sequence
  source 1..1119: mol_type = other DNA

SEQ ID NO: 174753 - DNA, 1119 bp, synthetic construct; identical to SEQ ID NO: 174723
  misc_feature 1..1119: note = Description of Artificial Sequence: Synthetic coding sequence
  source 1..1119: mol_type = other DNA

SEQ ID NO: 174754 - DNA, 1119 bp, synthetic construct; identical to SEQ ID NO: 174723
  misc_feature 1..1119: note = Description of Artificial Sequence: Synthetic coding sequence
  source 1..1119: mol_type = other DNA

SEQ ID NO: 174755 - DNA, 1119 bp, synthetic construct; identical to SEQ ID NO: 174723
  misc_feature 1..1119: note = Description of Artificial Sequence: Synthetic coding sequence
  source 1..1119: mol_type = other DNA

SEQ ID NO: 174756 - DNA, 624 bp, synthetic construct
  misc_feature 1..624: note = Description of Artificial Sequence: Synthetic coding sequence
  source 1..624: mol_type = other DNA
atgggcaccctgctgatcagcaagatccgggaggagtacccagaccgcatcatgaacaccttctctgtggtgcccagccccaaggtgtctgacacagtggtggagccctacaatgccaccctgtctgtgcaccagctggtggagaacacagatgagacctactgcatcgacaatgaggccctgtatgacatctgcttccgcaccctgaagctgaccacccccacctacggggacctgaaccacctggtgtctgccaccatgtctggagtgaccacctgcctgcgcttccctggccagctgaatgctgacctgaggaagctggccgtgaacatggtgcccttcccccggctgcacttcttcatgcctggctttgcccccctgaccagccggggcagccagcagtaccgggccctgactgtgcctgagctgacccagcaggtgtttgatgccaagaacatgatggccgcctgtgaccccaggcatggccgctacctgactgtggccgctgtgttccggggccgcatgtccatgaaggaggtggatgagcagatgctgaatgtgcagaacaagaacagcagctactttgtggagtggccccagcagtgccaggacagccggctgtag

SEQ ID NO: 174757 - DNA, 1248 bp, synthetic construct
  misc_feature 1..1248: note = Description of Artificial Sequence: Synthetic coding sequence
  source 1..1248: mol_type = other DNA
atgagggagatcgtgcacatccaggccggccagtgtggcaaccagatcggggccaagttctgggaggtgatcagtgatgagcacggcatcgaccccaccggcacctaccatggagacagcgacctgcagctggaccgcatctctgtgtactacaatgaggccactggaggcaagtatgtgccccgggccatcctggtggacctggagcccggcaccatggattctgtgcgcagcggccccttcggccagatcttccggccagacaactttgtgtttggccagagcggggccggcaacaactgcctgcagggcttccagctgacccacagcctgggcggcggcactggaagtggcatgggcaccctgctgatcagcaagatccgggaggagtacccagaccgcatcatgaacaccttctctgtggtgcccagccccaaggtgtctgacacagtggtggagccctacaatgccaccctgtctgtgcaccagctggtggagaacacagatgagacctactgcatcgacaatgaggccctgtatgacatctgcttccgcaccctgaagctgaccacccccacctacggggacctgaaccacctggtgtctgccaccatgtctggagtgaccacctgcctgcgcttccctggccagctgaatgctgacctgaggaagctggccgtgaacatggtgcccttcccccggctgcacttcttcatgcctggctttgcccccctgaccagccggggcagccagcagtaccgggccctgactgtgcctgagctgacccagcaggtgtttgatgccaagaacatgatggccgcctgtgaccccaggcatggccgctacctgactgtggccgctgtgttccggggccgcatgtccatgaaggaggtggatgagcagatgctgaatgtgcagaacaagaacagcagctactttgtggagtggatccccaacaacgtgaagacagctgtgtgtgacatccccccccggggcctgaagatggctgtgaccttcatcggcaacagcacagccatccaggagctgttcaagaggatcagcgagcagttcaccgccatgttccggaggaaggccttcctgcactggtacacaggagagggcatggatgagatggagttcacagaagctgagagcaacatgaatgacctggtgtctgagtaccagcagtaccaggatgccacagctgaggaggaggaggactttggagaggaggccgaggaggagtag

SEQ ID NO: 174758 - DNA, 1062 bp, synthetic construct; identical to SEQ ID NO: 174739
  misc_feature 1..1062: note = Description of Artificial Sequence: Synthetic coding sequence
  source 1..1062: mol_type = other DNA

SEQ ID NO: 174759 - DNA, 1062 bp, synthetic construct; identical to SEQ ID NO: 174739
  misc_feature 1..1062: note = Description of Artificial Sequence: Synthetic coding sequence
  source 1..1062: mol_type = other DNA

SEQ ID NO: 174760 - DNA, 1308 bp, synthetic construct
  misc_feature 1..1308: note = Description of Artificial Sequence: Synthetic coding sequence
  source 1..1308: mol_type = other DNA
atgagggagatcgtgcacatccaggccggccagtgtggcaaccagatcggggccaagttctgggaggtgatcagtgatgagcacggcatcgaccccaccggcacctaccatggagacagcgacctgcagctggaccgcatctctgtgtactacaatgaggccactggaggcaagtatgtgccccgggccatcctggtggacctggagcccggcaccatggattctgtgcgcagcggccccttcggccagatcttccggccagacaactttgtgtttggccagagcggggccggcaacaactgggccaagggccactacacagaaggagctgagctggtggacagcgtgctggatgtggtgaggaaggaggccgagagctgtgactgcctgcagggcttccagctgacccacagcctgggcggcggcactggaagtggcatgggcaccctgctgatcagcaagatccgggaggagtacccagaccgcatcatgaacaccttctctgtggtgcccagccccaaggtgtctgacacagtggtggagccctacaatgccaccctgtctgtgcaccagctggtggagaacacagatgagacctactgcatcgacaatgaggccctgtatgacatctgcttccgcaccctgaagctgaccacccccacctacggggacctgaaccacctggtgtctgccaccatgtctggagtgaccacctgcctgcgcttccctggccagctgaatgctgacctgaggaagctggccgtgaacatggtgcccttcccccggctgcacttcttcatgcctggctttgcccccctgaccagccggggcagccagcagtaccgggccctgactgtgcctgagctgacccagcaggtgtttgatgccaagaacatgatggccgcctgtgaccccaggcatggccgctacctgactgtggccgctgtgttccggggccgcatgtccatgaaggaggtggatgagcagatgctgaatgtgcagaacaagaacagcagctactttgtggagtggatccccaacaacgtgaagacagctgtgtgtgacatccccccccggggcctgaagatggctgtgaccttcatcggcaacagcacagccatccaggagctgttcaagaggatcagcgagcagttcaccgccatgttccggaggaaggccttcctgcactggtacacaggagagggcatggatgagatggagttcacagaagctgagagcaacatgaatgacctggtgtctgagtaccagcagtaccaggatgccacagctgagggcggcggcctgtag

SEQ ID NO: 174761 - DNA, 1308 bp, synthetic construct; identical to SEQ ID NO: 174760
  misc_feature 1..1308: note = Description of Artificial Sequence: Synthetic coding sequence
  source 1..1308: mol_type = other DNA

SEQ ID NO: 174762 - DNA, 1308 bp, synthetic construct; identical to SEQ ID NO: 174760
  misc_feature 1..1308: note = Description of Artificial Sequence: Synthetic coding sequence
  source 1..1308: mol_type = other DNA

SEQ ID NO: 174763 - DNA, 1248 bp, synthetic construct; identical to SEQ ID NO: 174757
  misc_feature 1..1248: note = Description of Artificial Sequence: Synthetic coding sequence
  source 1..1248: mol_type = other DNA

SEQ ID NO: 174764 - DNA, 1248 bp, synthetic construct; identical to SEQ ID NO: 174757
  misc_feature 1..1248: note = Description of Artificial Sequence: Synthetic coding sequence
  source 1..1248: mol_type = other DNA

SEQ ID NO: 174765 - DNA, 1248 bp, synthetic construct; identical to SEQ ID NO: 174757
  misc_feature 1..1248: note = Description of Artificial Sequence: Synthetic coding sequence
  source 1..1248: mol_type = other DNA

SEQ ID NO: 174766 - DNA, 1308 bp, synthetic construct; identical to SEQ ID NO: 174760
  misc_feature 1..1308: note = Description of Artificial Sequence: Synthetic coding sequence
  source 1..1308: mol_type = other DNA

SEQ ID NO: 174767 - DNA, 1308 bp, synthetic construct; identical to SEQ ID NO: 174760
  misc_feature 1..1308: note = Description of Artificial Sequence: Synthetic coding sequence
  source 1..1308: mol_type = other DNA

SEQ ID NO: 174768 - DNA, 1308 bp, synthetic construct; identical to SEQ ID NO: 174760
  misc_feature 1..1308: note = Description of Artificial Sequence: Synthetic coding sequence
  source 1..1308: mol_type = other DNA

SEQ ID NO: 174769 - DNA, 1062 bp, synthetic construct; identical to SEQ ID NO: 174739
  misc_feature 1..1062: note = Description of Artificial Sequence: Synthetic coding sequence
  source 1..1062: mol_type = other DNA

SEQ ID NO: 174770 - DNA, 1248 bp, synthetic construct; identical to SEQ ID NO: 174757
  misc_feature 1..1248: note = Description of Artificial Sequence: Synthetic coding sequence
  source 1..1248: mol_type = other DNA

SEQ ID NO: 174771 - DNA, 1308 bp, synthetic construct
  misc_feature 1..1308: note = Description of Artificial Sequence: Synthetic coding sequence
  source 1..1308: mol_type = other DNA
atgagggagatcgtgcacatccaggccggccagtgtggcaaccagatcggggccaagttctgggaggtgatcagtgatgagcacggcatcgaccccaccggcacctaccatggagacagcgacctgcagctggaccgcatctctgtgtactacaatgaggccactggaggcaagtatgtgccccgggccatcctggtggacctggagcccggcaccatggattctgtgcgcagcggccccttcggccagatcttccggccagacaactttgtgtttggccagagcggggccggcaacaactgggccaagggccactacacagaaggagctgagctggtggacagcgtgctggatgtggtgaggaaggaggccgagagctgtgactgcctgcagggcttccagctgacccacagcctgggcggcggcactggaagtggcatgggcaccctgctgatcagcaagatccgggaggagtacccagaccgcatcatgaacaccttctctgtggtgcccagccccaaggtgtctgacacagtggtggagccctacaatgccaccctgtctgtgcaccagctggtggagaacacagatgagacctactgcatcgacaatgaggccctgtatgacatctgcttccgcaccctgaagctgaccacccccacctacggggacctgaaccacctggtgtctgccaccatgtctggagtgaccacctgcctgcgcttccctggccagctgaatgctgacctgaggaagctggccgtgaacatggtgcccttcccccggctgcacttcttcatgcctggctttgcccccctgaccagccggggcagccagcagtaccgggccctgactgtgcctgagctgacccagcaggtgtttgatgccaagaacatgatggccgcctgtgaccccaggcatggccgctacctgactgtggccgctgtgttccggggccgcatgtccatgaaggaggtggatgagcagatgctgaatgtgcagaacaagaacagcagctactttgtggagtggatccccaacaacgtgaagacagctgtgtgtgacatccccccccggggcctgaagatggctgtgaccttcatcggcaacagcacagccatccaggagctgttcaagaggatcagcgagcagttcaccgccatgttccggaggaaggccttcctgcactggtacacaggagagggcatggatgagatggagttcacagaagctgagagcaacatgaatgacctggtgtctgagtaccagcagtaccaggatgccacagctgaggagggcggcgtgtag

SEQ ID NO: 174772 - DNA, 1062 bp, synthetic construct; identical to SEQ ID NO: 174739
  misc_feature 1..1062: note = Description of Artificial Sequence: Synthetic coding sequence
  source 1..1062: mol_type = other DNA

SEQ ID NO: 174773 - DNA, 1062 bp, synthetic construct; identical to SEQ ID NO: 174739
  misc_feature 1..1062: note = Description of Artificial Sequence: Synthetic coding sequence
  source 1..1062: mol_type = other DNA

SEQ ID NO: 174774 - DNA, 1062 bp, synthetic construct; identical to SEQ ID NO: 174739
  misc_feature 1..1062: note = Description of Artificial Sequence: Synthetic coding sequence
  source 1..1062: mol_type = other DNA

SEQ ID NO: 174775 - DNA, 1248 bp, synthetic construct; identical to SEQ ID NO: 174757
  misc_feature 1..1248: note = Description of Artificial Sequence: Synthetic coding sequence
  source 1..1248: mol_type = other DNA

SEQ ID NO: 174776 - DNA, 1248 bp, synthetic construct; identical to SEQ ID NO: 174757
  misc_feature 1..1248: note = Description of Artificial Sequence: Synthetic coding sequence
  source 1..1248: mol_type = other DNA

SEQ ID NO: 174777 - DNA, 1062 bp, synthetic construct; identical to SEQ ID NO: 174739
  misc_feature 1..1062: note = Description of Artificial Sequence: Synthetic coding sequence
  source 1..1062: mol_type = other DNA

SEQ ID NO: 174778 - DNA, 1362 bp, synthetic construct
  misc_feature 1..1362: note = Description of Artificial Sequence: Synthetic coding sequence
  source 1..1362: mol_type = other DNA
atgagcatcgtgacagtgcagctgggccagtgtggcaaccagattggatttgaggtgtttgatgccctgctgagtgacagccacagcagccagggcctgtgcagcatgagagaaaatgaggcctaccaggccagctgcaaggagcgcttcttcagcgaggaggagaatggagtgcccatcgcccgggctgtgctggtggacatggagcccaaggtgatcaaccagatgctgagcaaggccgcccagagcggccagtggaagtatggccagcacgcctgcttctgccagaagcagggcagcggcaacaactgggcctacggctacagcgtgcacggccccaggcatgaggagagcatcatgaacatcatcaggaaggaggtggagaagtgtgacagcttcagcggcttcttcatcatcatgtccatggccggcggcaccggcagcggcctgggcgcctttgtgacccagaacctggaggaccagtacagcaacagcctgaagatgaaccagatcatctggccctatggaactggagaggtgattgtgcagaactacaacagcatcctgaccctgagccacctgtaccgcagcagtgatgccctgctgctgcatgaaaatgatgccatccacaagatctgtgccaagctgatgaacatcaagcagatctccttcagtgacatcaaccaggtgctggcccaccagctgggctctgtgttccagcccacctacagcgctgagagcagcttccactacagaagaaaccccctgggggacctgatggagcacctggtgccccaccctgagttcaagatgctgtctgtgaggaacatcccccacatgtctgagaacagcctggcctacaccaccttcacctgggccggcctgctgaagcacctgcggcagatgctgatcagcaatgccaagatggaggagggcatcgacagacatgtgtggccacccctgagcggcctgccccccctgagcaagatgagcctgaacaaggacctgcacttcaacaccagcatcgccaacctggtgatcctgcggggcaaggatgtgcagagcgcagatgtggagggcttcaaggaccctgccctgtacacctcctggctgaagcctgtgaatgccttcaacgtgtggaagacccagagggccttcagcaaatatgagaagtctgctgtgctggtgagcaacagccagttcctggtgaagcccctggacatgattgtgggcaaggcctggaacatgtttgccagcaaggcctacatccaccagtacaccaagtttggaattgaggaggaggacttcctggacagcttcaccagcctggagcaggtggtggccagctactgcaacctgtag

SEQ ID NO: 174779 - DNA, 1197 bp, synthetic construct
  misc_feature 1..1197: note = Description of Artificial Sequence: Synthetic coding sequence
  source 1..1197: mol_type = other DNA
atgagcatcgtgacagtgcagctgggccagtgtggcaaccagattggatttgaggtgtttgatgccctgctgagtgacagccacagcagccagggcctgtgcagcatgagagaaaatgaggcctaccaggccagctgcaaggagcgcttcttcagcgaggaggagaatggagtgcccatcgcccgggctgtgctggtggacatggagcccaaggtgatcaaccagatgctgagcaaggccgcccagagcggccagtggaagtatggccagcacgcctgcttctgccagaagcagggcagcggcaacaactgggcctacggctacagcgtgcacggccccaggcatgaggagagcatcatgaacatcatcaggaaggaggtggagaagtgtgacagcttcagcggcttcttcatcatcatgtccatggccggcggcaccggcagcggcctgggcgcctttgtgacccagaacctggaggaccagtacagcaacagcctgaagatgaaccagatcatctggccctatggaactggagaggtgattgtgcagaactacaacagcatcctgaccctgagccacctgtaccgcagcagtgatgccctgctgctgcatgaaaatgatgccatccacaagatctgtgccaagctgatgaacatcaagcagatctccttcagtgacatcaaccaggtgctggcccaccagctgggctctgtgttccagcccacctacagcgctgagagcagcttccactacagaagaaaccccctgggcatcgacagacatgtgtggccacccctgagcggcctgccccccctgagcaagatgagcctgaacaaggacctgcacttcaacaccagcatcgccaacctggtgatcctgcggggcaaggatgtgcagagcgcagatgtggagggcttcaaggaccctgccctgtacacctcctggctgaagcctgtgaatgccttcaacgtgtggaagacccagagggccttcagcaaatatgagaagtctgctgtgctggtgagcaacagccagttcctggtgaagcccctggacatgattgtgggcaaggcctggaacatgtttgccagcaaggcctacatccaccagtacaccaagtttggcatcgaggaggaggacttcctggacagcttcaccagcctggagcaggtggtggccagctactgcaacctgtag

SEQ ID NO: 174780 - DNA, 600 bp, synthetic construct
  misc_feature 1..600: note = Description of Artificial Sequence: Synthetic coding sequence
  source 1..600: mol_type = other DNA
atgagcatcgtgacagtgcagctgggccagtgtggcaaccagattggatttgaggtgtttgatgccctgctgagtgacagccacagcagccagggcctgtgcagcatgagagaaaatgaggcctaccaggccagctgcaaggagcgcttcttcagcgaggaggagaatggaggcatcgacagacatgtgtggccacccctgagcggcctgccccccctgagcaagatgagcctgaacaaggacctgcacttcaacaccagcatcgccaacctggtgatcctgcggggcaaggatgtgcagagcgcagatgtggagggcttcaaggaccctgccctgtacacctcctggctgaagcctgtgaatgccttcaacgtgtggaagacccagagggccttcagcaaatatgagaagtctgctgtgctggtgagcaacagccagttcctggtgaagcccctggacatgattgtgggcaaggcctggaacatgtttgccagcaaggcctacatccaccagtacaccaagtttggaattgaggaggaggacttcctggacagcttcaccagcctggagcaggtggtggccagctactgcaacctgtag

SEQ ID NO: 174781 - DNA, 1056 bp, synthetic construct
  misc_feature 1..1056: note = Description of Artificial Sequence: Synthetic coding sequence
  source 1..1056: mol_type = other DNA
atgagcatcgtgacagtgcagctgggccagtgtggcaaccagattggatttgaggtgtttgatgccctgctgagtgacagccacagcagccagggcctgtgcagcatgagagaaaatgaggcctaccaggccagctgcaaggagcgcttcttcagcgaggaggagaatggagtgcccatcgcccgggctgtgctggtggacatggagcccaaggtgatcaaccagatgctgagcaaggccgcccagagcggccagtggaagtatggccagcacgcctgcttctgccagaagcagggcagcggcaacaactgggcctacggctacagcgtgcacggccccaggcatgaggagagcatcatgaacatcatcaggaaggaggtggagaagtgtgacagcttcagcggcttcttcatcatcatgtccatggccggcggcaccggcagcggcctgggcgcctttgtgacccagaacctggaggaccagtacagcaacagcctgaagatgaaccagatcatctggccctatggaactggagaggtgattgtgcagaactacaacagcatcctgaccctgagccacctgtaccgcagcagtgatgccctgctgctgcatgaaaatgatgccatccacaagatctgtgccaagctgatgaacatcaagcagatctccttcagtgacatcaaccaggtgctggcccaccagctgggctctgtgttccagcccacctacagcgctgagagcagcttccactacagaagaaaccccctggagggcttcaaggaccctgccctgtacacctcctggctgaagcctgtgaatgccttcaacgtgtggaagacccagagggccttcagcaaatatgagaagtctgctgtgctggtgagcaacagccagttcctggtgaagcccctggacatgattgtgggcaaggcctggaacatgtttgccagcaaggcctacatccaccagtacaccaagtttggaattgaggaggaggacttcctggacagcttcaccagcctggagcaggtggtggccagctactgcaacctgtag

SEQ ID NO: 174782 - DNA, 1191 bp, synthetic construct
  misc_feature 1..1191: note = Description of Artificial Sequence: Synthetic coding sequence
  source 1..1191: mol_type = other DNA
atgagcatcgtgacagtgcagctgggccagtgtggcaaccagattggatttgaggtgtttgatgccctgctgagtgacagccacagcagccagggcctgtgcagcatgagagaaaatgaggcctaccaggccagctgcaaggagcgcttcttcagcgaggaggagaatggagtgcccatcgcccgggctgtgctggtggacatggagcccaaggtgatcaaccagatgctgagcaaggccgcccagagcggccagtggaagtatggccagcacgcctgcttctgccagaagcagggcagcggcaacaactgggcctacggctacagcgtgcacggccccaggcatgaggagagcatcatgaacatcatcaggaaggaggtggagaagtgtgacagcttcagcggcttcttcatcatcatgtccatggccggcggcaccggcagcggcctgggcgcctttgtgacccagaacctggaggaccagtacagcaacagcctgaagatgaaccagatcatctggccctatggaactggagaggtgattgtgcagaactacaacagcatcctgaccctgagccacctgtaccgcagcagtgatgccctgctgctgcatgaaaatgatgccatccacaagatctgtgccaagctgatgaacatcaagcagatctccttcagtgacatcaaccaggtgctggcccaccagctgggctctgtgttccagcccacctacagcgctgagagcagcttccactacagaagaaaccccctgggggacctgatggagcacctggtgccccaccctgagttcaagatgctgtctgtgaggaacatcccccacatgtctgagaacagcctggcctacaccaccttcacctgggccggcctgctgaagcacctgcggcagatgctgatcagcaatgccaagatggaggagggcatcgacagacatgtgtggccacccctgagcggcctgccccccctgagcaagatgagcctgaacaaggacctgcacttcaacaccagcatcgccaacctggtgatcctgcggggcaaggatgtgcagagcgcagatgtgggcaagaagttccgggcctacatccaccagtacaccaagtttggcatcgaggaggaggacttcctggacagcttcaccagcctggagcaggtggtggccagctactgcaacctgtag

SEQ ID NO: 174783 - DNA, 714 bp, synthetic construct
  misc_feature 1..714: note = Description of Artificial Sequence: Synthetic coding sequence
  source 1..714: mol_type = other DNA
atgaacatcaagcagatctccttcagtgacatcaaccaggtgctggcccaccagctgggctctgtgttccagcccacctacagcgctgagagcagcttccactacagaagaaaccccctgggggacctgatggagcacctggtgccccaccctgagttcaagatgctgtctgtgaggaacatcccccacatgtctgagaacagcctggcctacaccaccttcacctgggccggcctgctgaagcacctgcggcagatgctgatcagcaatgccaagatggaggagggcatcgacagacatgtgtggccacccctgagcggcctgccccccctgagcaagatgagcctgaacaaggacctgcacttcaacaccagcatcgccaacctggtgatcctgcggggcaaggatgtgcagagcgcagatgtggagggcttcaaggaccctgccctgtacacctcctggctgaagcctgtgaatgccttcaacgtgtggaagacccagagggccttcagcaaatatgagaagtctgctgtgctggtgagcaacagccagttcctggtgaagcccctggacatgattgtgggcaaggcctggaacatgtttgccagcaaggcctacatccaccagtacaccaagtttggaattgaggaggaggacttcctggacagcttcaccagcctggagcaggtggtggccagctactgcaacctgtag

SEQ ID NO: 174784 - DNA, 378 bp, synthetic construct
  misc_feature 1..378: note = Description of Artificial Sequence: Synthetic coding sequence
  source 1..378: mol_type = other DNA
atgagcatcgtgacagtgcagctgggccagtgtggcaaccagattggatttgaggtgtttgatgccctgctgagtgacagccacagcagccagggcctgtgcagcatgagagaaaatgaggcctaccaggccagctgcaaggagcgcttcttcagcgaggaggagaatggagtgcccatcgcccgggctgtgctggtggacatggagcccaaggtgatcaaccagatgctgagcaaggccgcccagagcggccagtggaagtatggccagcacgcctgcttctgccagaagcagggcagcggcaacaactgggcctacggccgggacaaggacagcgcctgctacccagactggagcggcaccccaggcctgcagtag

SEQ ID NO: 174785 - DNA, 492 bp, synthetic construct
  misc_feature 1..492: note = Description of Artificial Sequence: Synthetic coding sequence
  source 1..492: mol_type = other DNA
atgacccagagcgtggtggtgcaggtgggccagtgtggcaaccagatcggctgctgcttctgggacctggccctgcgggagcacgccgctgtgaaccagaagggcatctatgatgaggccatcagcagcttcttcagaaatgtggacaccagggtggtgggagatggcggcagcatcagcaagggcaagatctgcagcctgaaggcccgggctgtgctgattgacatggaggagggcgtggtgaatgagatcctgcagggccccctgagagatgtgtttgacaccaagcagctgatcacagacatcagcggcagcggcaacaactgggccgtgggccacaaggtgtttggcagcctgtaccaggaccagatcctggagaagttcaggaagtctgctgagcactgtgactgcctgcagtgcttcttcatcatccacagcatgggcggcggcaagatcttccacagctttgcctgcaacagcgtgaagggctag

SEQ ID NO: 174786 - DNA, 621 bp, synthetic construct
  misc_feature 1..621: note = Description of Artificial Sequence: Synthetic coding sequence
  source 1..621: mol_type = other DNA
atggagagtgaccagaggaaggtggtgggagatggcggcagcatcagcaagggcaagatctgcagcctgaaggcccgggctgtgctgattgacatggaggagggcgtggtgaatgagatcctgcagggccccctgagagatgtgtttgacaccaagcagctgatcacagacatcagcggcagcggcaacaactgggccgtgggccacaaggtgtttggcagcctgtaccaggaccagatcctggagaagttcaggaagtctgctgagcactgtgactgcctgcagtgcttcttcatcatccacagcatgggcggcggcactggaagtggcctgggcaccttcctgctgaaggtgctggaggatgagttccctgaggtgtacagatttgtgaccagcatctaccccagcggggaggatgatgtgatcaccagcccctacaacagcatcctggccatgaaggagctgaatgagcacgccgactgtgtgctgcccatcgacaaccagagcctgtttgacatcatcagcaagattgacctgatggtgaacagcggcaagctgggcaccaccgtgaagcccaagagcctggtgaccagcagcagcggggccctgaagaagcagtag

SEQ ID NO: 174787 - DNA, 1428 bp, synthetic construct
  misc_feature 1..1428: note = Description of Artificial Sequence: Synthetic coding sequence
  source 1..1428: mol_type = other DNA
atgacccagagcgtggtggtgcaggtgggccagtgtggcaaccagatcggctgctgcttctgggacctggccctgcgggagcacgccgctgtgaaccagaagggcatctatgatgaggccatcagcagcttcttcagaaatgtggacaccagggtggtgggagatggcggcagcatcagcaagggcaagatctgcagcctgaaggcccgggctgtgctgattgacatggaggagggcgtggtgaatgagatcctgcagggccccctgagagatgtgtttgacaccaagcagctgatcacagacatcagcggcagcggcaacaactgggccgtgggccacaaggtgtttggcagcctgtaccaggaccagatcctggagaagttcaggaagtctgctgagcactgtgactgcctgcagtgcttcttcatcatccacagcatgggcggcggcactggaagtggcctgggcaccttcctgctgaaggtgctggaggatgagttccctgaggtgtacagatttgtgaccagcatctaccccagcggggaggatgatgtgatcaccagcccctacaacagcatcctggccatgaaggagctgaatgagcacgccgactgtgtgctgcccatcgacaaccagagcctgtttgacatcatcagcaagattgacctgatggtgaacagcggcaagctgggcaccaccgtgaagcccaagagcctggtgaccagcagcagcggggccctgaagaagcagcacaagaagccctttgatgccatgaacaacatcgtggccaacctgctgctgaacctgaccagcagcgccaggtttgagggcagcctgaacatggacctgaatgagatctccatgaacctggtgcccttcccccagctgcactacctggtgagcagcctgacccccctgtacaccctgacagatgtgaacatccccccccggcggctggaccagatgttcagtgatgccttcagcaaggaccaccagctgctgcgggctgaccccaagcacagcctgtacctggcctgtgccctgatggtgagaggaaatgtgcagatcagtgacctgcggagaaatattgagcggctgaagcccagcctgcagtttgtgtcctggaaccaggagggctggaagaccagcctgtgcagcgtgccccctgtgggccacagccacagcctgctggccctggccaacaacacctgtgtgaagcccaccttcatggagctgaaggagcgcttcatgaggctgtacaagaagaaggcccacctgcaccactacctgcaggtggagggcatggaggagagctgcttcacagaagctgtgagcagcctgagcgccctgatccaggagtatgaccagctggatgccaccaagaacatgcctgtgcaggacctgccccggctgagcatcgccatgtag

SEQ ID NO: 174788 - DNA, 621 bp, synthetic construct; identical to SEQ ID NO: 174786
  misc_feature 1..621: note = Description of Artificial Sequence: Synthetic coding sequence
  source 1..621: mol_type = other DNA

SEQ ID NO: 174789 - DNA, 1356 bp, synthetic construct
  misc_feature 1..1356: note = Description of Artificial Sequence: Synthetic coding sequence
  source 1..1356: mol_type = other DNA
atgccccgggagatcatcaccctgcagctgggccagtgtggcaaccagattggatttgagttctggaagcagctgtgtgccgagcacggcatcagccctgagggcatcgtggaggagtttgccacagagggcacagacaggaaggatgtgttcttctaccaggctgatgatgagcactacatccccagggctgtgctgctggacctggagcccagggtcatccacagcatcctgaacagcccctatgccaagctgtacaaccctgagaacatctacctgtctgagcacggcggcggggccggcaacaactgggccagcggcttcagccagggcgagaagatccacgaggacatctttgacatcatcgaccgggaggctgatggcagtgacagcctggagggctttgtgctgtgccacagcattgctgggggcactggaagtggcctgggcagctacctgctggagcggctgaatgaccgctaccccaagaagctggtgcagacctacagcgtcttccccaaccaggatgagatgtctgatgtggtggtgcagccctacaacagcctgctgaccctgaagaggctgacccagaatgctgactgtgtggtggtgctggacaacacagccctgaacagaattgccacagaccggctgcacatccagaaccccagcttcagccagatcaaccagctggtgtccaccatcatgtctgccagcaccaccaccctgcgctacccaggctacatgaacaatgacctgattggcctgattgccagcctcatccccaccccccggctgcacttcctgatgacaggctacacccccctgaccacagaccagagcgtggcctctgtgaggaagaccaccgtgctggatgtgatgaggcggctgctgcagcccaagaatgtgatggtgtccacaggccgggaccggcagaccaaccactgctacatcgccatcctgaacatcatccagggcgaggtggaccccacccaggtgcacaagagcctgcagaggatccgggagaggaagctggccaacttcatcccctggggccctgccagcatccaggtggccctgagcaggaagagcccctacctgcccagcgcccaccgggtgtctggcctgatgatggccaaccacaccagcatcagcagcctgtttgagaggacctgccggcagtatgacaagctgaggaagcgggaggccttcctggagcagttcagaaaagaagacatgttcaaggacaactttgatgagatggacaccagccgggagatcgtgcagcagctgattgatgagtaccacgccgccaccaggccagactacatctcctggggcacccaggagcagtag

SEQ ID NO: 174790 - DNA, 1356 bp, synthetic construct
  misc_feature 1..1356: note = Description of Artificial Sequence: Synthetic coding sequence
  source 1..1356: mol_type = other DNA
atgccccgggagatcatcaccctgcagctgggccagtgtggcaaccagattggatttgagttctggaagcagctgtgtgccgagcacggcatcagccctgagggcatcgtggaggagtttgccacagagggcacagacaggaaggatgtgttcttctaccaggctgatgatgagcactacatccccagggctgtgctgctggacctggagcccagggtcatccacagcatcctgaacagcccctatgccaagctgtacaaccctgagaacatctacctgtctgagcacggcggcggggccggcaacaactgggccagcggcttcagccagggcgagaagatccacgaggacatctttgacatcatcgaccgggaggctgatggcagtgacagcctggagggctttgtgctgtgccacagcattgctgggggcactggaagtggcctgggcagctacctgctggagcggctgaatgaccgctaccccaagaagctggtgcagacctacagcgtcttcccctaccaggatgagatgtctgatgtggtggtgcagccctacaacagcctgctgaccctgaagaggctgacccagaatgctgactgtgtggtggtgctggacaacacagccctgaacagaattgccacagaccggctgcacatccagaaccccagcttcagccagatcaaccagctggtgtccaccatcatgtctgccagcaccaccaccctgcgctacccaggctacatgaacaatgacctgattggcctgattgccagcctcatccccaccccccggctgcacttcctgatgacaggctacacccccctgaccacagaccagagcgtggcctctgtgaggaagaccaccgtgctggatgtgatgaggcggctgctgcagcccaagaatgtgatggtgtccacaggccgggaccggcagaccaaccactgctacatcgccatcctgaacatcatccagggcgaggtggaccccacccaggtgcacaagagcctgcagaggatccgggagaggaagctggccaacttcatcccctggggccctgccagcatccaggtggccctgagcaggaagagcccctacctgcccagcgcccaccgggtgtctggcctgatgatggccaaccacaccagcatcagcagcctgtttgagagcagctgccagcagtttgacaagctgaggaagagagatgccttcctggagcagttcagaaaagaagacatgttcaaggacaactttgatgagatggacaggagccgggaggtggtgcaggagctgattgatgagtaccacgccgccacccagcctgactacatctcctggggcacccaggagcagtag

SEQ ID NO: 174791 - DNA, 2001 bp, synthetic construct; identical to SEQ ID NO: 174698
  misc_feature 1..2001: note = Description of Artificial Sequence: Synthetic coding sequence
  source 1..2001: mol_type = other DNA

SEQ ID NO: 174792 - DNA, 1029 bp, synthetic construct
  misc_feature 1..1029: note = Description of Artificial Sequence: Synthetic coding sequence
  source 1..1029: mol_type = other DNA
atggtggtggtggagcagatcaagagccagaagatccacggctgccagatcctggagaccgtgtacaagcacagctgtggcggcctgccccctgtgcgcagcgccctggagaagatcctggccgtgtgccacggcgtgatgtacaagcagctgagcgcctggatgctgcacggcctgctgctggaccagcacgaggagttcttcatcaagcagggccccagcagtggaaatgtgtctgcccagcctgaggaggatgaggaggacctgggcattggaggcctgaccgggaagcagctgcgggagctgcaggacctgcggctcatcgaggaggagaacatgctggcccccagcctgaagcagttcagcctgcgggtggagatcctgcccagctacatccctgtgcgggtggccgagaagatcctgtttgtgggggagagcgtgcagatgtttgagaaccagaatgtgaacctgaccaggaagggcagcatcctgaagaaccaggaggacacctttgctgctgagctgcaccggctgaagcagcagcccctcttcagcctggtggactttgagcaggtggtggaccgcatccgcagcacagtggccgagcacctgtggaagctgatggtggaggagagtgacctgctgggccagctgaagatcatcaaggacttctacctgctgggccgcggggagctgttccaggccttcatcgacacagcccagcacatgctgaagaccccacccacagctgtgacagaacatgatgtgaatgtggccttccagcagagcgcccacaaggtgctgctggatgatgacaacctgctgcccctgctgcacctgaccatcgagtaccacggcaaggagcacaaggcagatgccacccaggcccgggagggccccagccgggagaccagcccccgggaggccccagccagcggctgggccgccctgggcctgagctacaaggtgcagtggcccctgcacatcctcttcaccccagctgtgctggagaagaaccggcagttctag

SEQ ID NO: 174793 - DNA, 3075 bp, synthetic construct
  misc_feature 1..3075: note = Description of Artificial Sequence: Synthetic coding sequence
  source 1..3075: mol_type = other DNA
atggcccggcacggccccccctggagccggctggatgcccagcaggagagagatgtgcgggagctggtgcggggcgtggccggcctgcaggatgaagctgaccccaacttccagctggccctgaactttgcctggagcaacttccgcttccaccgcttcctggatgtgaacagccacaagattgagaagaccatcgagggcatctatgagaagtttgtgatccacagcgacctgagcaaggccgcctcctggaagaggctgacagaggagttcctgaatgcccccctgcccagcatcaaggagatcaagacagatgcccactacagcatcctgagcctgctgctgtgcctgagtgacagccccagcaacagcagctatgtggagaccccaagaaacaaggaggtggagaagaaggatgactttgactggggcaagtacctgatggaggatgaggagatggacatcggcccctacatggacacccccaactggagcgaggagagcgaggaggagaatgaccagcagcccctgagccgggaggacagcggcatccaggtggacaggacccccctggaggagcaggaccagaacaggaagctggacccctgcatctcctggaaggatgagccagatgaccgctcctggctggagcaccacgtggtgcaccagtactggacagcccggcccagccagttcccccacagcctgcacctgcacagcaacctggccgctgtgtgggaccagcacctgtacagcagtgaccccctgtatgtgcctgatgacagagtgctggtgacagagacccaggtgatccgggagaccctgtggctgctgtctggagtgaagaagctgttcatcttccagctgattgatggcaaggtgacagtgaggaacaacatcatcgtgacccacctgacccacagctgcctgcggtctgtgctggagcagattgctgcctacggccaggtggtgttccggctgcaggagttcattgatgaggtgatgggccacagcagcgagagcatgctgcccggcagcggctctgtgcccaagaagagcacagaggcccccttccgcacctaccaggccttcatgtgggccctgtacaagtacttcatctccttcaaggaggagctggccgagattgagaagtgcatcatcaacaatgacaccaccatcaccctggccatcgtggtggacaagctggccccccggctgagccagctgaaggtgctgcacaaggtgttcagcactggagtggccgaggtgcccccagacaccagaaatgtggtgcgggccagccacctgctgaacaccctgtacaaggccatcctggagtatgacaacgtgggggaggccagcgagcagacagtgtccctgctcttcagcctgtgggtggagaccgtgcggccctacctgcagacagtggatgagtggatcgtgcacggccacctgtgggatggagcccgggagttcatcatccagaggaacaagaatgtgcctgtgaaccaccgggacttctggtacgccacctacaccctgtacagcgtgtctgagaagacagaaaatgaggagaagatgtctgacaatgccagcgccagcagcggcagtgaccagggccccagcagccggcagcacaccatggtgtccttcctgaagcctgtgctgaagcagatcatcatggccggcaagtccatgcagctgctgaagaacctgcagtgtgccgagagcaccacctgccaggccggggccagagatgctgagaggaagagcctgtacaccctcttcctggagagcgtgcagagccggctgcggcacggggaggacagcaccccccaggtgctgacagagcagcaggccaccaaggagaacctgatgaagatgcagagcattgctgagagccacctggagctggatgatgtgcatgaccccctgctggccatcaactttgccaggatgtacctggagcagagcgacttccacgagaagtttgctggaggagatgtgtgtgtggacaggagcagcgagagcgtgacctgccagacctttgagctgaccctgcggagctgcctgtacccccacatcgacaagcagtacctggactgctgcggcaacctgatgcagaccctgaagaaggactaccgcctggtggagtacctgcaggccatgaggaacttcttcctgatggagggcggggacaccatgtatgacttctacaccagcatctttgacaagatccgggagaaggagacctggcagaatgtgtccttcctgaatgtgcagctgcaggaggccgtgggccagcgctacccagaggacagcagccggctgagcatcagctttgaaaatgtggacacagccaagaagaagctgcctgtgcacatcctggatggcctgaccctgagctacaaggtgccctggcctgtggacatcgtcatcagcctggagtgccagaagatctacaaccaggtgttcctgctgctgctgcagatcaagtgggccaagtacagcctggatgtgctgctgtttggagagctggtgtccacagctgagaagccccggctgaaggagggcctcatccacgagcaggacacagtggcccagtttggcccccagaaggagcctgtgcggcagcagatccacaggatgttcctgctgcgggtgaagctgatgcactttgtgaacagcctgcacaactacatcatgacccgcatcctgcacagcacaggcctggagttccagcaccaggtggaggaggccaaggacctggaccagctgatcaagatccactaccgctacctgagcaccatccatgaccgctgcctgctgcgggagaaggtgtcctttgtgaaggaggccatcatgaaggtgctgaacctggccctgatgtttgctgatggctggcaggccggcctgggcacctggaggatggagagcattgagaagatggagagtgacttcaagaactgccacatgttcctggtgaccatcctgaacaaggctgtgtgccggggcagcttcccccacctggagagcctggccctgagcctgatggccggcatggagcagagctag

SEQ ID NO: 174794 - DNA, 3075 bp, synthetic construct
  misc_feature 1..3075: note = Description of Artificial Sequence: Synthetic coding sequence
  source 1..3075: mol_type = other DNA
atggcccggcacggccccccctggagccggctggatgcccagcaggagagagatgtgcgggagctggtgcggggcgtggccggcctgcaggatgaagctgaccccaacttccagctggccctgaactttgcctggagcaacttccgcttccaccgcttcctggatgtgaacagccacaagattgagaagaccatcgagggcatctatgagaagtttgtgatccacagcgacctgagcaaggccgcctcctggaagaggctgacagaggagttcctgaatgcccccctgcccagcatcaaggagatcaagacagatgcccactacagcatcctgagcctgctgctgtgcctgagtgacagccccagcaacagcagctatgtggagaccccaagaaacaaggaggtggagaagaaggatgactttgactggggcaagtacctgatggaggatgaggagatggacatcggcccctacatggacacccccaactggagcgaggagagcgaggaggagaatgaccagcagcccctgagccgggaggacagcggcatccaggtggacaggacccccctggaggagcaggaccagaacaggaagctggacccctgcatctcctggaaggatgagccagatgaccgctcctggctggagcaccacgtggtgcaccagtactggacagcccggcccagccagttcccccacagcctgcacctgcacagcaacctggccgctgtgtgggaccagcacctgtacagcagtgaccccctgtatgtgcctgatgacagagtgctggtgacagagacccaggtgatccgggagaccctgtggctgctgtctggagtgaagaagctgttcatcttccagctgattgatggcaaggtgacagtgaggaacaacatcatcgtgacccacctgacccacagctgcctgcggtctgtgctggagcagattgctgcctacggccaggtggtgttccggctgcaggagttcattgatgaggtgatgggccacagcagcgagagcatgctgcccggcagcggctctgtgcccaagaagagcacagaggcccccttccgcacctaccaggccttcatgtgggccctgtacaagtacttcatctccttcaaggaggagctggccgagattgagaagtgcatcatcaacaatgacaccaccatcaccctggccatcgtggtggacaagctggccccccggctgagccagctgaaggtgctgcacaaggtgttcagcactggagtggccgaggtgcccccagacaccagaaatgtggtgcgggccagccacctgctgaacaccctgtacaaggccatcctggagtatgacaacgtgggggaggccagcgagcagacagtgtccctgctcttcagcctgtgggtggagaccgtgcggccctacctgcagacagtggatgagtggatcgtgcacggccacctgtgggatggagcccgggagttcatcatccagaggaacaagaatgtgcctgtgaaccaccgggacttctggtacgccacctacaccctgtacagcgtgtctgagaagacagaaaatgaggagaagatgtctgacaatgccagcgccagcagcggcagtgaccagggccccagcagccggcagcacaccatggtgtccttcctgaagcctgtgctgaagcagatcatcatggccggcaagtccatgcagctgctgaagaacctgcagtgtgccgagagcaccacctgccaggccggggccagagatgctgagaggaagagcctgtacaccctcttcctggagagcgtgcagagccggctgcggcacggggaggacagcaccccccaggtgctgacagagcagcaggccaccaaggagaacctgatgaagatgcagagcattgctgagagccacctggagctggatgatgtgcatgaccccctgctggccatcaactttgccaggatgtacctggagcagagcgacttccacgagaagtttgctggaggagatgtgtgtgtggacaggagcagcgagagcgtgacctgccagacctttgagctgaccctgcggagctgcctgtacccccacatcgacaagcagtacctggactgctgcggcaacctgatgcagaccctgaagaaggactaccgcctggtggagtacctgcaggccatgaggaacttcttcctgatggagggcggggacaccatgtatgacttctacaccagcatctttgacaagatccgggagaaggagacctggcagaatgtgtccttcctgaatgtgcagctgcaggaggccgtgggccagcgctacccagaggacagcagccggctgagcatcagctttgaaaatgtggacacagccaagaagaagctgcctgtgcacatcctggatggcctgaccctgagctacaaggtgccctggcctgtggacatcgtcatcagcctggagtgccagaagatctacaaccaggtgttcctgctgctgctgcagatcaagtgggccaagtacagcctggatgtgctgctgtttggagagctggtgtccacagctgagaagccccggctgaaggagggcctcatccacgagcaggacacagtggcccagtttggcccccagaaggagcctgtgcggcagcagatccacaggatgttcctgctgcgggtgaagctgatgcactttgtgaacagcctgcacaactacatcatgacccgcatcctgcacagcacaggcctggagttccagcaccaggtggaggaggccaaggacctggaccagctgatcaagatccactaccgctacctgagcaccatccatgaccgctgcctgctgcgggagaaggtgtcctttgtgaaggaggccatcatgaaggtgctgaacctggccctgatgtttgctgatggctggcaggccggcctgggcacctggaggatggagagcattgagaagatggagagtgacttcaagaactgccacatgttcctggtgaccatcctgaacaaggctgtgtgccggggcagcttcccccactgtgagtacatcatgctgaagtacttctacctgtgcatcagcctgtag

SEQ ID NO: 174795 - DNA, 1431 bp, synthetic construct
  misc_feature 1..1431: note = Description of Artificial Sequence: Synthetic coding sequence
  source 1..1431: mol_type = other DNA
atgtggacaggctacaagatcctgatcttctcctacctgaccacagagatctggatggagaagcagtacctgagccagcgggaggtggacctggaggcctacttcaccaggaaccacacagtgctgcagggcacccgcttcaagagggccatcttccagggccagtactgcaggaactttggctgctgtgaggacagagatgatggctgtgtgacagagttctacgccgccaatgccctgtgctactgtgacaagttctgtgaccgggagaacagcgactgctgcccagactacaagagcttctgccgggaggagaaggagtggccaccccacacccagccctggtacccagagggctgcttcaaggatggccagcactatgaggagggcagcgtcatcaaggagaactgcaacagctgcacctgcagcggccagcagtggaagtgcagccagcacgtgtgcctggtgcgctctgagctgattgagcaggtgaacaagggggactatggctggacagcccagaactacagccagttctggggcatgaccctggaggatggcttcaagttccggctgggcaccctgccccccagccccatgctgctgtccatgaatgagatgacagccagcctgcctgccaccacagacctgcctgagttctttgtggccagctacaagtggccaggctggacccacggccccctggaccagaagaactgtgccgcctcctgggccttcagcacagcctctgtggccgctgaccgcatcgccatccagagcaagggccgctacacagccaacctgagcccccagaacctgatcagctgctgtgccaagaacagacatggctgcaacagcggcagcattgaccgggcctggtggtacctgaggaagaggggcctggtgagccacgcctgctaccccctcttcaaggaccagaatgccaccaacaacggctgtgccatggccagcagaagtgatggccggggcaagagacatgccaccaagccctgccccaacaacgtggagaagagcaaccgcatctaccagtgcagccccccctacagagtgagcagcaatgaaacagagatcatgaaggagatcatgcagaatggacctgtgcaggccatcatgcaggtgcgggaggacttcttccactacaagacaggcatctaccgccacgtgaccagcaccaacaaggagagcgagaagtacaggaagctgcagacccatgctgtgaagctgaccggctggggcaccctgcggggggcccagggccagaaggagaagttctggattgctgccaacagctggggcaagtcctggggagaaaatggctacttccgcatcctgcggggcgtgaatgaaagtgacatcgagaagctgatcatcgccgcctggggccagctgaccagcagtgatgagccctag

SEQ ID NO: 174796 - DNA, 1008 bp, synthetic construct
  misc_feature 1..1008: note = Description of Artificial Sequence: Synthetic coding sequence
  source 1..1008: mol_type = other DNA
atgtggacaggctacaagatcctgatcttctcctacctgaccacagagatctggatggagaagcagtacctgagccagcgggaggtggacctggaggcctacttcaccaggaaccacacagtgctgcagggcacccgcttcaagagggccatcttccagggccagtactgcaggaactttggctgctgtgaggacagagatgatggctgtgtgacagagttctacgccgccaatgccctgtgctactgtgacaagttctgtgaccgggagaacagcgactgctgcccagactacaagagcttctgccgggaggagaaggagtggccaccccacacccagccctggtacccagagggccgctggacagcccagaactacagccagttctggggcatgaccctggaggatggcttcaagttccggctgggcaccctgccccccagccccatgctgctgtccatgaatgagatgacccggctggtgtcccatgcctgctaccccctcttcaaggaccagaatgccaccaacaacggctgtgccatggccagcagaagtgatggccggggcaagagacatgccaccaagccctgccccaacaacgtggagaagagcaaccgcatctaccagtgcagccccccctacagagtgagcagcaatgaaacagagatcatgaaggagatcatgcagaatggacctgtgcaggccatcatgcaggtgcgggaggacttcttccactacaagacaggcatctacagacatgtgaccagcaccaacaaggagagcgagaagtacaggaagctgcagacccatgctgtgaagctgaccggctggggcaccctgcggggggcccagggccagaaggagaagttctggattgctgccaacagctggggcaagtcctggggagaaaatggctacttccgcatcctgcggggcgtgaatgaaagtgacatcgagaagctgatcatcgccgcctggggccagctgaccagcagtgatgagccctag

SEQ ID NO: 174797 - DNA, 612 bp, synthetic construct
  misc_feature 1..612: note = Description of Artificial Sequence: Synthetic coding sequence
  source 1..612: mol_type = other DNA
atggagaagcagtacctgagccagcgggaggtggacctggaggcctacttcaccaggaaccacacagtgctgcagggcacccgcttcaagagggccatcttccagggccagtactgcaggaactttggctgctgtgaggacagagatgatggctgtgtgacagagttctacgccgccaatgccctgtgctactgtgacaagttctgtgaccgggagaacagcgactgctgcccagactacaagagcttctgccgggaggagaaggagtggccaccccacacccagccctggtacccagagggctgcttcaaggatggccagcactatgaggagggcagcgtcatcaaggagaactgcaacagctgcacctgcagcggccagcagtggaagtgcagccagcacgtgtgcctggtgcgctctgagctgattgagcaggtgaacaagggggactatggctggacagcccagaactacagccagttctggggcatgaccctggaggatggcttcaagttccggctgggcaccctgccccccagccccatgctgctgtccatgaatgagatgacagtgtctgtgcccagcgacagcaggatgtgcatgtacctgtag

SEQ ID NO: 174798 - DNA, 468 bp, synthetic construct
  misc_feature 1..468: note = Description of Artificial Sequence: Synthetic coding sequence
  source 1..468: mol_type = other DNA
atggccagcagaagtgatggccggggcaagagacatgccaccaagccctgccccaacaacgtggagaagagcaaccgcatctaccagtgcagccccccctacagagtgagcagcaatgaaacagagatcatgaaggagatcatgcagaatggacctgtgcaggccatcatgcaggtgcgggaggacttcttccactacaagacaggcatctacagacatgtgaccagcaccaacaaggagagcgagaagtacaggaagctgcagacccatgctgtgaagctgaccggctggggcaccctgcggggggcccagggccagaaggagaagttctggattgctgccaacagctggggcaagtcctggggagaaaatggctacttccgcatcctgcggggcgtgaatgaaagtgacatcgagaagctgatcatcgccgcctggggccagctgaccagcagtgatgagccctag

SEQ ID NO: 174799 - DNA, 618 bp, synthetic construct
  misc_feature 1..618: note = Description of Artificial Sequence: Synthetic coding sequence
  source 1..618: mol_type = other DNA
atgagggcctggatgtttgtgtccatgcaggccgagatctggatggagaagcagtacctgagccagcgggaggtggacctggaggcctacttcaccaggaaccacacagtgctgcagggcacccgcttcaagagggccatcttccagggccagtactgcaggaactttggctgctgtgaggacagagatgatggctgtgtgacagagttctacgccgccaatgccctgtgctactgtgacaagttctgtgaccgggagaacagcgactgctgcccagactacaagagcttctgccgggaggagaaggagtggccaccccacacccagccctggtacccagagggctgcttcaaggatggccagcactatgaggagggcagcgtcatcaaggagaactgcaacagctgcacctgcagcggccagcagtggaagtgcagccagcacgtgtgcctggtgcgctctgagctgattgagcaggtgaacaagggggactatggctggacagcccagaactacagccagttctggggcatgaccctggaggatggcttcaagttccggctgggcaccctgccccccagccccatgctgctgtccatgaatgagatgacagaatag

SEQ ID NO: 174800 - DNA, 3570 bp, synthetic construct
  misc_feature 1..3570: note = Description of Artificial Sequence: Synthetic coding sequence
  source 1..3570: mol_type = other DNA
atgtctgtgaagagccccttcaacgtgatgagcaggaacaacctggaggccccaccctgcaagatgacagagcccttcaactttgagaagaatgaaaacaagctgccccctcatgagagcctgcggagccctggcaccctgcccaaccaccccaacttccggctgaagagcagtgaaaatggaaacaagaagaacaacttcctgctgtgtgagcagaccaagcagtacctggccagccaggaggacaacagcgtgagcagcaaccccaacggcatcaatggagaggtggtgggcagcaagggggacaggaagaagctgcctgctggcaacagcgtgagcccccccagcgctgagagcaacagcccccccaaggaggtgaacatcaagccaggcaacaacgtgcggcctgccaagagcaagaagctgaacaagctggtggagaacagcctgagcatcagcaaccctggcctcttcaccagcctgggcccccccctgcggagcaccacctgccaccgctgtggcctgtttggcagcctgcgctgcagccagtgcaagcagacctactactgcagcacagcctgccagaggcgggactggagcgcccacagcatcgtgtgcaggcctgtgcagcccaacttccacaagctggagaacaagagcagcattgagaccaaggatgtggaggtgaacaacaagagtgactgccccctgggcgtgaccaaggagatcgccatctgggccgagcgcatcatgttcagtgacctgcggagcctgcagctgaagaagaccatggagatcaagggcaccgtgacagagttcaagcaccctggggacttctacgtgcagctgtacagcagcgaggtgctggagtacatgaaccagctgagcgccagcctgaaggagacctacgccaacgtgcatgagaaggactacatccctgtgaagggggaggtgtgcatcgccaagtacacagtggaccagacctggaacagagccatcatccagaatgtggatgtgcagcagaagaaggcccacgtgctgtacattgattatggaaatgaggagatcatccccctgaaccgcatctaccacctgaacagaaatattgacctcttccccccctgtgccatcaagtgctttgtggccaacgtcatcccagctgagggcaactggagcagtgactgcatcaaggccaccaagcccctgctgatggagcagtactgcagcatcaagatcgtggacatcctggaggaggaggtggtgacctttgctgtggaggtggagctgcccaacagcggcaagctgctggaccacgtgctgattgagatgggctacggcctgaagcccagcggccaggacagcaagaaggaaaatgctgaccagagcgaccctgaagatgtgggcaagatgaccacagagaacaacatcgtggtggacaagagtgacctgatccccaaggtgctgaccctgaatgtgggagatgagttctgtggggtggtggcccacatccagaccccagaggacttcttctgccagcagctgcagagcggcaggaagctggccgagctgcaggccagcctgagcaagtactgtgaccagctgcccccaagaagtgacttctacccagccatcggggacatctgctgtgcccagttctctgaagatgaccagtggtaccgggcctctgtgctggcctatgccagcgaggagagcgtgctggtgggctacgtggactatggcaactttgagatcctgagcctgatgaggctgtgccccatcatccccaagctgctggagctgcccatgcaggccatcaagtgtgtgctggccggcgtgaagcccagcctgggcatctggaccccagaggccatctgcctgatgaagaagctggtgcagaacaagatcatcaccgtgaaggtggtggacaagctggagaacagcagcctggtggagctgattgacaagtctgagaccccccacgtgtctgtgtccaaggtgctgctggatgctggctttgctgtgggggagcagagcatggtgacagacaagcccagtgatgtgaaggagacctctgtgcccctgggcgtggagggcaaggtgaaccccctggagtggacctgggtggagctgggcgtggaccagacagtggatgtggtggtgtgtgtgatctacagccctggagagttctactgccacgtgctgaaggaggatgccctgaagaagctgaatgacctgaacaagagcctggccgagcactgccagcagaagctgcccaacggcttcaaggccgagatcggccagccctgctgtgccttctttgctggagatggctcctggtaccgggccctggtgaaggagatcctgcccaacggccacgtgaaggtgcactttgtggactatggcaacatcgaggaggtgacagcagatgagctgaggatgatcagcagcaccttcctgaacctgcccttccagggcatccgctgccagctggccgacatccagagcaggaacaagcactggagcgaggaggccatcacccgcttccagatgtgtgtggccggcatcaagctgcaggcccgggtggtggaggtgacagaaaatggaattggagtggagctgacagacctgagcacctgctacccccgcatcatcagtgatgtgctgattgatgagcacctggtgctgaagagcgccagcccccacaaggacctgcccaatgaccggctggtgaacaagcatgagctgcaggtgcacgtgcagggcctgcaggccaccagcagcgctgagcagtggaagaccatcgagctgcctgtggacaagaccatccaggccaacgtgctggagatcatcagccccaacctcttctacgccctgcccaagggcatgcctgagaaccaggagaagctgtgcatgctgacagctgagctgctggagtactgcaatgcccccaagagcaggcctccctaccggcccagaattggagatgcctgctgtgccaagtacaccagtgatgacttctggtacagagctgtggtgctgggcaccagtgacacagatgtggaggtgctgtatgctgactatggcaacatcgagaccctgcccctgtgccgggtgcagcccatcaccagcagccacctggccctgcccttccagatcatccgctgcagcctggagggcctgatggagctgaatggcagcagcagccagctgatcatcatgctgctgaagaacttcatgctgaaccagaatgtgatgctgtctgtgaagggcatcaccaagaatgtgcacacagtgtctgtggagaagtgcagtgaaaatggcaccgtggatgtggccgacaagctggtgaccttcggcctggccaagaacatcaccccccagaggcagagcgccctgaacacagagaagatgtacaggatgaactgctgctgcacagagctgcagaagcaggtggagaagcatgagcacatcctgctcttcctgctgaacaacagcaccaaccagaacaagttcatcgagatgaagaagctgctgaagaagacagccagcctgggcggcaagcccctgtag

SEQ ID NO: 174801 - DNA, 3315 bp, synthetic construct
  misc_feature 1..3315: note = Description of Artificial Sequence: Synthetic coding sequence
  source 1..3315: mol_type = other DNA
atgtctgtgaagagccccttcaacgtgatgagcaggaacaacctggaggccccaccctgcaagatgacagagcccttcaactttgagaagaatgaaaacaagctgccccctcatgagagcctgcggagccctggcaccctgcccaaccaccccaacttccggctgaagagcagtgaaaatggaaacaagaagaacaacttcctgctgtgtgagcagaccaagcagtacctggccagccaggaggacaacagcgtgagcagcaaccccaacggcatcaatggagaggtggtgggcagcaagggggacaggaagaagctgcctgctggcaacagcgtgagcccccccagcgctgagagcaacagcccccccaaggaggtgaacatcaagccaggcaacaacgtgcggcctgccaagagcaagaagctgaacaagctggtggagaacagcctgagcatcagcaaccctggcctcttcaccagcctgggcccccccctgcggagcaccacctgccaccgctgtggcctgtttggcagcctgcgctgcagccagtgcaagcagacctactactgcagcacagcctgccagaggcgggactggagcgcccacagcatcgtgtgcaggcctgtgcagcccaacttccacaagctggagaacaagagcagcattgagaccaaggatgtggaggtgaacaacaagagtgactgccccctgggcgtgaccaaggagatcgccatctgggccgagcgcatcatgttcagtgacctgcggagcctgcagctgaagaagaccatggagatcaagggcaccgtgacagagttcaagcaccctggggacttctacgtgcagctgtacagcagcgaggtgctggagtacatgaaccagctgagcgccagcctgaaggagacctacgccaacgtgcatgagaaggactacatccctgtgaagggggaggtgtgcatcgccaagtacacagtggaccagacctggaacagagccatcatccagaatgtggatgtgcagcagaagaaggcccacgtgctgtacattgattatggaaatgaggagatcatccccctgaaccgcatctaccacctgaacagaaatattgacctcttccccccctgtgccatcaagtgctttgtggccaacgtcatcccagctgagggcaactggagcagtgactgcatcaaggccaccaagcccctgctgatggagcagtactgcagcatcaagatcgtggacatcctggaggaggaggtggtgacctttgctgtggaggtggagctgcccaacagcggcaagctgctggaccacgtgctgattgagatgggctacggcctgaagcccagcggccaggacagcaagaaggaaaatgctgaccagagcgaccctgaagatgtgggcaagatgaccacagagaacaacatcgtggtggacaagagtgacctgatccccaaggtgctgaccctgaatgtgggagatgagttctgtggggtggtggcccacatccagaccccagaggacttcttctgccagcagctgcagagcggcaggaagctggccgagctgcaggccagcctgagcaagtactgtgaccagctgcccccaagaagtgacttctacccagccatcggggacatctgctgtgcccagttctctgaagatgaccagtggtaccgggcctctgtgctggcctatgccagcgaggagagcgtgctggtgggctacgtggactatggcaactttgagatcctgagcctgatgaggctgtgccccatcatccccaagctgctggagctgcccatgcaggccatcaagtgtgtgctggccggcgtgaagcccagcctgggcatctggaccccagaggccatctgcctgatgaagaagctggtgcagaacaagatcatcaccgtgaaggtggtggacaagctggagaacagcagcctggtggagctgattgacaagtctgagaccccccacgtgtctgtgtccaaggtgctgctggatgctggctttgctgtgggggagcagagcatggtgacagacaagcccagtgatgtgaaggagacctctgtgcccctgggcgtggagggcaaggtgaaccccctggagtggacctgggtggagctgggcgtggaccagacagtggatgtggtggtgtgtgtgatctacagccctggagagttctactgccacgtgctgaaggaggatgccctgaagaagctgaatgacctgaacaagagcctggccgagcactgccagcagaagctgcccaacggcttcaaggccgagatcggccagccctgctgtgccttctttgctggagatggctcctggtaccgggccctggtgaaggagatcctgcccaacggccacgtgaaggtgcactttgtggactatggcaacatcgaggaggtgacagcagatgagctgaggatgatcagcagcaccttcctgaacctgcccttccagggcatccgctgccagctggccgacatccagagcaggaacaagcactggagcgaggaggccatcacccgcttccagatgtgtgtggccggcatcaagctgcaggcccgggtggtggaggtgacagaaaatggaattggagtggagctgacagacctgagcacctgctacccccgcatcatcagtgatgtgctgattgatgagcacctggtgctgaagagcgccagcccccacaaggacctgcccaatgaccggctggtgaacaagcatgagctgcaggtgcacgtgcagggcctgcaggccaccagcagcgctgagcagtggaagaccatcgagctgcctgtggacaagaccatccaggccaacgtgctggagatcatcagccccaacctcttctacgccctgcccaagggcatgcctgagaaccaggagaagctgtgcatgctgacagctgagctgctggagtactgcaatgcccccaagagcaggcctccctaccggcccagaattggagatgcctgctgtgccaagtacaccagtgatgacttctggtacagagctgtggtgctgggcaccagtgacacagatgtggaggtgctgtatgctgactatggcaacatcgagaccctgcccctgtgccgggtgcagcccatcaccagcagccacctggccctgcccttccagatcatccgctgcagcctggaggagaagatgtacaggatgaactgctgctgcacagagctgcagaagcaggtggagaagcatgagcacatcctgctcttcctgctgaacaacagcaccaaccagaacaagttcatcgagatgaagaagctgctgaagagctag

SEQ ID NO: 174802 - DNA, 3228 bp, synthetic construct
  misc_feature 1..3228: note = Description of Artificial Sequence: Synthetic coding sequence
  source 1..3228: mol_type = other DNA
atgtctgtgaagagccccttcaacgtgatgagcaggaacaacctggaggccccaccctgcaagatgacagagcccttcaactttgagaagaatgaaaacaagctgccccctcatgagagcctgcggagccctggcaccctgcccaaccaccccaacttccggctgaagagcagtgaaaatggaaacaagaagaacaacttcctgctgtgtgagcagaccaagcagtacctggccagccaggaggacaacagcgtgagcagcaaccccaacggcatcaatggagaggtggtgggcagcaagggggacaggaagaagctgcctgctggcaacagcgtgagcccccccagcgctgagagcaacagcccccccaaggaggtgaacatcaagccaggcaacaacgtgcggcctgccaagagcaagaagctgaacaagctggtggagaacagcctgagcatcagcaaccctggcctcttcaccagcctgggcccccccctgcggagcaccacctgccaccgctgtggcctgtttggcagcctgcgctgcagccagtgcaagcagacctactactgcagcacagcctgccagaggcgggactggagcgcccacagcatcgtgtgcaggcctgtgcagcccaacttccacaagctggagaacaagagcagcattgagaccaaggatgtggaggtgaacaacaagagtgactgccccctgggcgtgaccaaggagatcgccatctgggccgagcgcatcatgttcagtgacctgcggagcctgcagctgaagaagaccatggagatcaagggcaccgtgacagagttcaagcaccctggggacttctacgtgcagctgtacagcagcgaggtgctggagtacatgaaccagctgagcgccagcctgaaggagacctacgccaacgtgcatgagaaggactacatccctgtgaagggggaggtgtgcatcgccaagtacacagtggaccagacctggaacagagccatcatccagaatgtggatgtgcagcagaagaaggcccacgtgctgtacattgattatggaaatgaggagatcatccccctgaaccgcatctaccacctgaacagaaatattgacctcttccccccctgtgccatcaagtgctttgtggccaacgtcatcccagctgagggcaactggagcagtgactgcatcaaggccaccaagcccctgctgatggagcagtactgcagcatcaagatcgtggacatcctggaggaggaggtggtgacctttgctgtggaggtggagctgcccaacagcggcaagctgctggaccacgtgctgattgagatgggctacggcctgaagcccagcggccaggacagcaagaaggaaaatgctgaccagagcgaccctgaagatgtgggcaagatgaccacagagaacaacatcgtggtggacaagagtgacctgatccccaaggtgctgaccctgaatgtgggagatgagttctgtggggtggtggcccacatccagaccccagaggacttcttctgccagcagctgcagagcggcaggaagctggccgagctgcaggccagcctgagcaagtactgtgaccagctgcccccaagaagtgacttctacccagccatcggggacatctgctgtgcccagttctctggagtgaagcccagcctgggcatctggaccccagaggccatctgcctgatgaagaagctggtgcagaacaagatcatcaccgtgaaggtggtggacaagctggagaacagcagcctggtggagctgattgacaagtctgagacccctcatgtgtctgtgtccaaggtgctgctggatgctggctttgctgtgggggagcagagcatggtgacagacaagcccagtgatgtgaaggagacctctgtgcccctgggcgtggagggcaaggtgaaccccctggagtggacctgggtggagctgggcgtggaccagacagtggatgtggtggtgtgtgtgatctacagccctggagagttctactgccacgtgctgaaggaggatgccctgaagaagctgaatgacctgaacaagagcctggccgagcactgccagcagaagctgcccaacggcttcaaggccgagatcggccagccctgctgtgccttctttgctgacatccagagcaggaacaagcactggagcgaggaggccatcacccgcttccagatgtgtgtggccggcatcaagctgcaggcccgggtggtggaggtgacagaaaatggaattggagtggagctgacagacctgagcacctgctacccccgcatcatcagtgatgtgctgattgatgagcacctggtgctgaagagcgccagcccccacaaggacctgcccaatgaccggctggtgaacaagcatgagctgcaggtgcacgtgcagggcctgcaggccaccagcagcgctgagcagtggaagaccatcgagctgcctgtggacaagaccatccaggccaacgtgctggagatcatcagccccaacctcttctacgccctgcccaagggcatgcctgagaaccaggagaagctgtgcatgctgacagctgagctgctggagtactgcaatgcccccaagagcaggcctccctaccggcccagaattggagatgcctgctgtgccaagtacaccagtgatgacttctggtacagagctgtggtgctgggcaccagtgacacagatgtggaggtgctgtatgctgactatggcaacatcgagaccctgcccctgtgccgggtgcagcccatcaccagcagccacctggccctgcccttccagatcatccgctgcagcctggagggcctgatggagctgaatggcagcagcagccagctgatcatcatgctgctgaagaacttcatgctgaaccagaatgtgatgctgtctgtgaagggcatcaccaagaatgtgcacacagtgtctgtggagaagtgcagtgaaaatggcaccgtggatgtggccgacaagctggtgaccttcggcctggccaagaacatcaccccccagaggcagagcgccctgaacacagagaagatgtacaggatgaactgctgctgcacagagctgcagaagcaggtggagaagcatgagcacatcctgctcttcctgctgaacaacagcaccaaccagaacaagttcatcgagatgaagaagctgctgaagaagacagccagcctgggcggcaagcccctgtag

SEQ ID NO: 174803 - DNA, 3342 bp, synthetic construct
  misc_feature 1..3342: note = Description of Artificial Sequence: Synthetic coding sequence
  source 1..3342: mol_type = other DNA
atgtctgtgaagagccccttcaacgtgatgagcaggaacaacctggaggccccaccctgcaagatgacagagcccttcaactttgagaagaatgaaaacaagctgccccctcatgagagcctgcggagccctggcaccctgcccaaccaccccaacttccggctgaagagcagtgaaaatggaaacaagaagaacaacttcctgctgtgtgagcagaccaagcagtacctggccagccaggaggacaacagcgtgagcagcaaccccaacggcatcaatggagaggtggtgggcagcaagggggacaggaagaagctgcctgctggcaacagcgtgagcccccccagcgctgagagcaacagcccccccaaggaggtgaacatcaagccaggcaacaacgtgcggcctgccaagagcaagaagctgaacaagctggtggagaacagcctgagcatcagcaaccctggcctcttcaccagcctgggcccccccctgcggagcaccacctgccaccgctgtggcctgtttggcagcctgcgctgcagccagtgcaagcagacctactactgcagcacagcctgccagaggcgggactggagcgcccacagcatcgtgtgcaggcctgtgcagcccaacttccacaagctggagaacaagagcagcattgagaccaaggatgtggaggtgaacaacaagagtgactgccccctgggcgtgaccaaggagatcgccatctgggccgagcgcatcatgttcagtgacctgcggagcctgcagctgaagaagaccatggagatcaagggcaccgtgacagagttcaagcaccctggggacttctacgtgcagctgtacagcagcgaggtgctggagtacatgaaccagctgagcgccagcctgaaggagacctacgccaacgtgcatgagaaggactacatccctgtgaagggggaggtgtgcatcgccaagtacacagtggaccagacctggaacagagccatcatccagaatgtggatgtgcagcagaagaaggcccacgtgctgtacattgattatggaaatgaggagatcatccccctgaaccgcatctaccacctgaacagaaatattgacctcttccccccctgtgccatcaagtgctttgtggccaacgtcatcccagctgagggcaactggagcagtgactgcatcaaggccaccaagcccctgctgatggagcagtactgcagcatcaagatcgtggacatcctggaggaggaggtggtgacctttgctgtggaggtggagctgcccaacagcggcaagctgctggaccacgtgctgattgagatgggctacggcctgaagcccagcggccaggacagcaagaaggaaaatgctgaccagagcgaccctgaagatgtgggcaagatgaccacagagaacaacatcgtggtggacaagagtgacctgatccccaaggtgctgaccctgaatgtgggagatgagttctgtggggtggtggcccacatccagaccccagaggacttcttctgccagcagctgcagagcggcaggaagctggccgagctgcaggccagcctgagcaagtactgtgaccagctgcccccaagaagtgacttctacccagccatcggggacatctgctgtgcccagttctctgaagatgaccagtggtaccgggcctctgtgctggcctatgccagcgaggagagcgtgctggtgggctacgtggactatggcaactttgagatcctgagcctgatgaggctgtgccccatcatccccaagctgctggagctgcccatgcaggccatcaagtgtgtgctggccggcgtgaagcccagcctgggcatctggaccccagaggccatctgcctgatgaagaagctggtgcagaacaagatcatcaccgtgaaggtggtggacaagctggagaacagcagcctggtggagctgattgacaagtctgagaccccccacgtgtctgtgtccaaggtgctgctggatgctggctttgctgtgggggagcagagcatggtgacagacaagcccagtgatgtgaaggagacctctgtgcccctgggcgtggagggcaaggtgaaccccctggagtggacctgggtggagctgggcgtggaccagacagtggatgtggtggtgtgtgtgatctacagccctggagagttctactgccacgtgctgaaggaggatgccctgaagaagctgaatgacctgaacaagagcctggccgagcactgccagcagaagctgcccaacggcttcaaggccgagatcggccagccctgctgtgccttctttgctggagatggctcctggtaccgggccctggtgaaggagatcctgcccaacggccacgtgaaggtgcactttgtggactatggcaacatcgaggaggtgacagcagatgagctgaggatgatcagcagcaccttcctgaacctgcccttccagggcatccgctgccagctggccgacatccagagcaggaacaagcactggagcgaggaggccatcacccgcttccagatgtgtgtggccggcatcaagctgcaggcccgggtggtggaggtgacagaaaatggaattggagtggagctgacagacctgagcacctgctacccccgcatcatcagtgatgtgctgattgatgagcacctggtgctgaagagcgccagcccccacaaggacctgcccaatgaccggctggtgaacaagcatgagctgcaggtgcacgtgcagggcctgcaggccaccagcagcgctgagcagtggaagaccatcgagctgcctgtggacaagaccatccaggccaacgtgctggagatcatcagccccaacctcttctacgccctgcccaagggcatgcctgagaaccaggagaagctgtgcatgctgacagctgagctgctggagtactgcaatgcccccaagagcaggcctccctaccggcccagaattggagatgcctgctgtgccaagtacaccagtgatgacttctggtacagagctgtggtgctgggcaccagtgacacagatgtggaggtgctgtatgctgactatggcaacatcgagaccctgcccctgtgccgggtgcagcccatcaccagcagccacctggccctgcccttccagatcatccgctgcagcctggaggagaagatgtacaggatgaactgctgctgcacagagctgcagaagcaggtggagaagcatgagcacatcctgctcttcctgctgaacaacagcaccaaccagaacaagttcatcgagatgaagaagctgctgaagaagacagccagcctgggcggcaagcccctgtag

SEQ ID NO: 174804 - DNA, 2154 bp, synthetic construct
  misc_feature 1..2154: note = Description of Artificial Sequence: Synthetic coding sequence
  source 1..2154: mol_type = other DNA
atgaaccagctgagcgccagcctgaaggagacctacgccaacgtgcatgagaaggactacatccctgtgaagggggaggtgtgcatcgccaagtacacagtggaccaggccatcaagtgctttgtggccaacgtcatcccagctgagggcaactggagcagtgactgcatcaaggccaccaagcccctgctgatggagcagtactgcagcatcaagatcgtggacatcctggaggaggaggtggtgacctttgctgtggaggtggagctgcccaacagcggcaagctgctggaccacgtgctgattgagatgggctacggcctgaagcccagcggccaggacagcaagaaggaaaatgctgaccagagcgaccctgaagatgtgggcaagatgaccacagagaacaacatcgtggtggacaagagtgacctgatccccaaggtgctgaccctgaatgtgggagatgagttctgtggggtggtggcccacatccagaccccagaggacttcttctgccagcagctgcagagcggcaggaagctggccgagctgcaggccagcctgagcaagtactgtgaccagctgccccccaggagtgacttctacccagccatcggggacatctgctgtgcccagttcagcggcgtgaagcccagcctgggcatctggaccccagaggccatctgcctgatgaagaagctggtgcagaacaagatcatcaccgtgaaggtggtggacaagctggagaacagcagcctggtggagctgattgacaagtctgagaccccccacgtgtctgtgtccaaggtgctgctggatgctggctttgctgtgggggagcagagcatggtgacagacaagcccagtgatgtgaaggagacctctgtgcccctgggcgtggagggcaaggtgaaccccctggagtggacctgggtggagctgggcgtggaccagacagtggatgtggtggtgtgtgtgatctacagccctggagagttctactgccacgtgctgaaggaggatgccctgaagaagctgaatgacctgaacaagagcctggccgagcactgccagcagaagctgcccaacggcttcaaggccgagatcggccagccctgctgtgccttctttgctggagatggctcctggtaccgggccctggtgaaggagatcctgcccaacggccacgtgaaggtgcactttgtggactatggcaacatcgaggaggtgacagcagatgagctgaggatgatcagcagcaccttcctgaacctgcccttccagggcatccgctgccagctggccgacatccagagcaggaacaagcactggagcgaggaggccatcacccgcttccagatgtgtgtggccggcatcaagctgcaggcccgggtggtggaggtgacagaaaatggaattggagtggagctgacagacctgagcacctgctacccccgcatcatcagtgatgtgctgattgatgagcacctggtgctgaagagcgccagcccccacaaggacctgcccaatgaccggctggtgaacaagcatgagctgcaggtgcacgtgcagggcctgcaggccaccagcagcgctgagcagtggaagaccatcgagctgcctgtggacaagaccatccaggccaacgtgctggagatcatcagccccaacctcttctacgccctgcccaagggcatgcctgagaaccaggagaagctgtgcatgctgacagctgagctgctggagtactgcaatgcccccaagagcaggcctccctaccggcccagaattggagatgcctgctgtgccaagtacaccagtgatgacttctggtacagagctgtggtgctgggcaccagtgacacagatgtggaggtgctgtatgctgactatggcaacatcgagaccctgcccctgtgccgggtgcagcccatcaccagcagccacctggccctgcccttccagatcatccgctgcagcctggaggagaagatgtacaggatgaactgctgctgcacagagctgcagaagcaggtggagaagcatgagcacatcctgctcttcctgctgaacaacagcaccaaccagaacaagttcatcgagatgaagaagctgctgaagaagacagccagcctgggcggcaagcccctgtag

SEQ ID NO: 174805 - DNA, 1956 bp, synthetic construct
  misc_feature 1..1956: note = Description of Artificial Sequence: Synthetic coding sequence
  source 1..1956: mol_type = other DNA
atgctgcggctgcagatgacagatggccacatcagctgcacagctgtggagttctcctacatgagcaagatcagcctgaacaccccacctggcaccaaggtgaagctgtctggaattgtggacatcaagaatggcttcctgctgctgaatgacagcaacaccaccgtgctgggcggggaggtggagcacctgattgagaagtgggagctgcagaggagcctgagcaagcacaacagaagcaacatcggcacagagggcggccccccaccatttgtgcccttcggccagaagtgtgtgagccacgtgcaggtggacagccgggagctggacaggaggaagaccctgcaggtgaccatgcctgtgaagcccaccaatgacaatgatgaatttgagaagcagaggacagctgccatcgccgaggtggccaagagcaaggagaccaagaccttcggcggcggcggcggcggggcccggagcaacctgaacatgaatgctgctggcaacagaaaccgggaggtgctgcagaaggagaagagcaccaagtctgagggcaagcatgagggcgtgtaccgggagctggtggatgagaaggccctgaagcacatcacagagatgggcttcagcaaggaggccagccggcaggccctgatggacaatggaaacaacctggaggccgccctgaatgtgctgctgaccagcaacaagcagaagcctgtgatgggcccccccctgcggggccggggcaagggccggggccgcatccgctcagaagatgaggaggacctgggcaatgcccggcccagcgcccccagcaccctgtttgacttcctggagagcaagatgggcaccctgaatgtggaggagcccaagagccagccccagcagctgcaccagggccagtaccgcagcagcaacacagagcagaatggagtgaaggacaacaaccacctgcggcaccccccaagaaatgacacccggcagcccagaaatgagaagcccccacgcttccagagggacagccagaacagcaagtctgtgctggagggcagcggcctgcccaggaacagaggcagcgagcggcccagcaccagctctgtgtctgaggtgtgggccgaggaccgcatcaagtgtgaccggccctacagccgctatgacaggaccaaggacaccagctaccccctgggcagccagcacagtgatggagccttcaagaagagggacaacagcatgcagagccgcagcggcaagggccccagctttgctgaggccaaggagaaccccctgccccagggctctgtggactacaacaaccagaagaggggcaagcgggagagccagaccagcatcccagactacttctatgacaggaagagccagaccatcaacaatgaggccttcagcggcatcaagattgagaagcacttcaacgtgaacacagactaccagaaccctgtgcgcagcaacagcttcatcggcgtgcccaatggagaggtggagatgcccctgaagggcagaagaattggccccatcaagccagctggccctgtgacagctgtgccctgtgatgacaagatcttctacaacagcggccccaagagaagaagtggccccatcaagccagagaagatcctggagagcagcatccccatggagtatgccaagatgtggaagccaggagatgaatgttttgccctgtactgggaggacaacaagttctacagagctgaggtggaggccctgcacagcagcggcatgacagctgtggtgaagttcatcgactatggcaactatgaggaggtgctgctgagcaacatcaagcccatccagacagaggcctgggaggaggagggcacctatgaccagaccctggagttcagaagaggaggagatggccagccccggcgcagcacccggcccacccagcagttctaccagcccccccgggccaggaactag

SEQ ID NO: 174806 - DNA, 1956 bp, synthetic construct; identical to SEQ ID NO: 174805
  misc_feature 1..1956: note = Description of Artificial Sequence: Synthetic coding sequence
  source 1..1956: mol_type = other DNA

SEQ ID NO: 174807 - DNA, 390 bp, synthetic construct
  misc_feature 1..390: note = Description of Artificial Sequence: Synthetic coding sequence
  source 1..390: mol_type = other DNA
atgctgcggctgcagatgacagatggccacatcagctgcacagctgtggagttctcctacatgagcaagatcagcctgaacaccccacctggcaccaaggtgaagctgtctggaattgtggacatcaagaatggcttcctgctgctgaatgacagcaacaccaccgtgctgggcggggaggtggagcacctgattgagaagtgggagctgcagaggagcctgagcaagcacaacagaagcaacatcggcacagagggcggccccccaccatttgtgcccttcggccagaagtgtgtgagccacgtgcaggtggacagccgggagctggacaggaggaagaccctgcaggtgaccatgcctgtgaagcccaccaatgacaatgatgaatag

SEQ ID NO: 174808 - DNA, 1956 bp, synthetic construct; identical to SEQ ID NO: 174805
  misc_feature 1..1956: note = Description of Artificial Sequence: Synthetic coding sequence
  source 1..1956: mol_type = other DNA

SEQ ID NO: 174809 - DNA, 2235 bp, synthetic construct
  misc_feature 1..2235: note = Description of Artificial Sequence: Synthetic coding sequence
  source 1..2235: mol_type = other DNA
atggcccaggtggccggggccgccctgagccaggccggctggtacctgagtgatgagggcatcgaggcctgcaccagcagcccagacaaggtgaatgtgaatgacatcatcctgattgccctgaacacagacctgcggaccatcggcaagaagttcctgcccagcgacatcaacagcggcaaggtggagaagctggagggcccctgtgtgctgcagatccagaagatcagaaatgtggccgcccccaaggacaatgaggagagccaggccgcccccaggatgctgcggctgcagatgacagatggccacatcagctgcacagctgtggagttctcctacatgagcaagatcagcctgaacaccccacctggcaccaaggtgaagctgagcggcatcgtggacatcaagaatggcttcctgctgctgaatgacagcaacaccaccgtgctgggcggggaggtggagcacctgattgagaagtgggagctgcagaggagcctgagcaagcacaacagaagcaacattggaacagaaggaggccccccaccatttgtgcccttcggccagaagtgtgtgagccacgtgcaggtggacagccgggagctggacaggaggaagaccctgcaggtgaccatgcctgtgaagcccaccaatgacaatgatgaatttgagaagcagaggacagctgccatcgccgaggtggccaagagcaaggagaccaagacctttggaggcggcggcggcggggcccggagcaacctgaacatgaatgctgctggcaacagaaaccgggaggtgctgcagaaggagaagagcaccaagtctgagggcaagcatgaaggagtgtaccgggagctggtggatgagaaggccctgaagcacatcacagagatgggcttcagcaaggaggccagccggcaggccctgatggacaatggaaacaacctggaggccgccctgaatgtgctgctgaccagcaacaagcagaagcctgtgatgggcccccccctgcggggccggggcaagggccggggccgcatccgctcagaagatgaggaggacctgggcaatgcccggcccagcgcccccagcaccctgtttgacttcctggagagcaagatgggcaccctgaatgtggaggagcccaagagccagccccagcagctgcaccagggccagtaccgcagcagcaacacagagcagaatggagtgaaggacaacaaccacctgcggcaccccccaagaaatgacacccggcagcccagaaatgagaagccaccccgcttccagagggacagccagaacagcaagtctgtgctggagggcagcggcctgcccaggaacagaggcagcgagcggcccagcaccagctctgtgtctgaggtgtgggccgaggaccgcatcaagtgtgaccggccctacagccgctatgacaggaccaaggacaccagctaccccctgggcagccagcacagtgatggagccttcaagaagagggacaacagcatgcagagccgcagcggcaagggccccagctttgctgaggccaaggagaaccccctgccccagggctctgtggactacaacaaccagaagaggggcaagcgggagagccagaccagcatcccagactacttctatgacaggaagagccagaccatcaacaatgaggccttcagcggcatcaagattgagaagcacttcaacgtgaacacagactaccagaaccctgtgcgcagcaacagcttcatcggcgtgcccaacggggaggtggagatgcccctgaagggccgccgcatcggccccatcaagccagctggccctgtgacagctgtgccctgtgatgacaagatcttctacaacagcggccccaagaggaggagcggccccatcaagccagagaagatcctggagagcagcatccccatggagtatgccaagatgtggaagccaggagatgagtgctttgccctgtactgggaggacaacaagttctacagagctgaggtggaggccctgcacagcagcggcatgacagctgtggtgaagttcattgattatggcaactatgaggaggtgctgctgagcaacatcaagcccatccagacagaggcctgggaggaggagggcacctatgaccagaccctggagttcagaagaggaggagatggccagcccaggaggagcacccggcccacccagcagttctaccagcccccccgggccagaaattag

SEQ ID NO: 174810 - DNA, 3297 bp, synthetic construct
  misc_feature 1..3297: note = Description of Artificial Sequence: Synthetic coding sequence
  source 1..3297: mol_type = other DNA
atgctggagggggacctggtgtccaagatgctgcgggctgtgctgcagagccacaagaatggagtggccctgccccggctgcagggcgagtaccgcagcctgactggagactggatccccttcaagcagctgggcttccccaccctggaggcctacctgcggtctgtgcctgctgtggtgcgcatcgagaccagccgctctggagagatcacctgctacgccatggcctgcacagaaacagccagaattgcccagctggtggcccggcagaggagcagcaagaggaagacaggccggcaggtgaactgccagatgagggtgaagaagaccatgcccttcttcctggagggcaagcccaaggccaccctgcggcagcccggctttgccagcaacttctctgtgggcaagaagcccaacccagcccccctgcgggacaagggcaacagcgtgggcgtgaagccagatgctgagatgagcccctacatgctgcacaccaccctgggcaatgaggccttcaaggacatccctgtgcagagacatgtgaccatgagcaccaacaaccgcttcagccccaaggccagcctgcagccccccctgcagatgcacctgagcaggaccagcaccaaggagatgtctgacaacctgaaccagacagtggagaagcccaacgtgaagcccccagccagctacacctacaagatggatgaggtgcagaaccgcatcaaggagatcctgaacaagcacaacaacggcatctggatcagcaagctgccccacttctacaaggagctgtacaaggaggacctgaaccagggcatcctgcagcagtttgagcactggccccacatctgcaccgtggagaagccctgcagcggcggccaggacctgctgctgtacccagccaagaggaagcagctgctgcggtctgagctggacacagagaaggtgcccctgagccccctgcccggccccaagcagaccccacccctgaagggctgccccaccgtgatggccggggacttcaaggagaaggtggccgacctgctggtgaagtacaccagcggcctgtgggccagcgccctgcccaaggcctttgaggagatgtacaaggtgaagttcccagaagatgccctgaagaacctggccagcctgagtgatgtgtgcagcattgactacatcagcggcaacccccagaaggccatcctgtatgccaagctgcccctgcccacagacaagatccagaaggatgctggccaggcccatggagacaatgacatcaaggccatggtggagcaggagtacctgcaggtggaggagagcattgctgagagcgccaacaccttcatggaggacatcaccgtgccccccctgatgatccccacagaggccagccccagcgtgctggtggtggagctgagcaacaccaatgaggtggtgatccgctacgtgggcaaggactacagcgctgcccaggagctgatggaggatgagatgaaggagtactacagcaagaaccccaagatcacccctgtgcaggccgtgaatgtgggccagctgctggccgtgaatgctgaggaggatgcctggctgcgggcccaggtgatcagcacagaggagaacaagatcaaggtgtgctacgtggactatggcttctctgaaaatgtggagaagagcaaggcctacaagctgaaccccaagttctgcagcctgtccttccaggccaccaagtgcaagctggccggcctggaggtgctgagtgatgatcctgacctggtgaaggtggtggagagcctgacctgtgggaagatctttgctgtggagatcctggacaaggctgacatccccctggtggtgctgtatgacaccagcggagaagatgacatcaacatcaatgccacctgcctgaaggccatctgtgacaagagcctggaggtgcacctgcaggtggatgccatgtacaccaacgtgaaggtgaccaacatctgcagtgatggcaccctgtactgccaggtgccctgcaagggcctgaacaagctgagtgacctgctgaggaagattgaggactacttccactgcaagcacatgaccagcgagtgctttgtgtccctgcccttctgtgggaagatctgcctcttccactgcaagggcaagtggctgcgggtggagatcaccaacgtgcacagcagccgggccctggatgtgcagttcctggacagcggcaccgtgacctctgtgaaggtgtctgagctgcgggagatccccccacgcttcctgcaggagatgattgccatccccccccaggccatcaagtgctgcctggccgacctgccccagagcatcggcatgtggaccccagatgctgtgctgtggctgcgggacagcgtgctgaactgcagcgactgcagcatcaaggtgaccaaggtggatgagacccggggcatcgcccacgtgtacctgttcacccccaagaacttcccagacccccacaggagcatcaaccggcagatcaccaatgctgacctgtggaagcaccagaaggatgtgttcctgagcgccatcagcagtggagctgacagccccaacagcaagaatggaaacatgcccatgagcggcaacacaggagagaacttcaggaagaacctgacagatgtgatcaagaagtccatggtggaccacaccagcgccttcagcacagaggagctgcccccacctgtgcacctgagcaagccaggagagcacatggatgtgtatgtgcctgtggcctgccaccctggctactttgtgatccagccctggcaggagatccacaagctggaggtgctgatggaggagatgatcctgtactacagcgtgtctgaggagcggcacatcgctgtggagaaggaccaggtgtatgctgccaaggtggagaacaagtggcaccgggtgctgctgaagggcatcctgaccaacggcctggtgtctgtgtatgagctggactatggcaagcatgagctggtgaacatcaggaaggtgcagcccctggtggacatgttcaggaagctgcccttccaggccgtgacagcccagctggccggcgtgaagtgcaaccagtggagcgaggaggcctccatggtgttcagaaatcatgtggagaagaagcccctggtggccctggtgcagacagtgattgaaaatgccaacccctgggacaggaaggtggtggtgtacctggtggacaccagcctgcctgacacagacacctggattcatgacttcatgtctgagtacctgattgagctgagcaaggtgaactag

SEQ ID NO: 174811 - DNA, 3075 bp, synthetic construct
  misc_feature 1..3075: note = Description of Artificial Sequence: Synthetic coding sequence
  source 1..3075: mol_type = other DNA
atggcctgcacagaaacagccagaattgcccagctggtggcccggcagaggagcagcaagaggaagacaggccggcaggtgaactgccagatgagggtgaagaagaccatgcccttcttcctggagggcaagcccaaggccaccctgcggcagcccggctttgccagcaacttctctgtgggcaagaagcccaacccagcccccctgcgggacaagggcaacagcgtgggcgtgaagccagatgctgagatgagcccctacatgctgcacaccaccctgggcaatgaggccttcaaggacatccctgtgcagagacatgtgaccatgagcaccaacaaccgcttcagccccaaggccagcctgcagccccccctgcagatgcacctgagcaggaccagcaccaaggagatgtctgacaacctgaaccagacagtggagaagcccaacgtgaagcccccagccagctacacctacaagatggatgaggtgcagaaccgcatcaaggagatcctgaacaagcacaacaacggcatctggatcagcaagctgccccacttctacaaggagctgtacaaggaggacctgaaccagggcatcctgcagcagtttgagcactggccccacatctgcaccgtggagaagccctgcagcggcggccaggacctgctgctgtacccagccaagaggaagcagctgctgcggtctgagctggacacagagaaggtgcccctgagccccctgcccggccccaagcagaccccacccctgaagggctgccccaccgtgatggccggggacttcaaggagaaggtggccgacctgctggtgaagtacaccagcggcctgtgggccagcgccctgcccaaggcctttgaggagatgtacaaggtgaagttcccagaagatgccctgaagaacctggccagcctgagtgatgtgtgcagcattgactacatcagcggcaacccccagaaggccatcctgtatgccaagctgcccctgcccacagacaagatccagaaggatgctggccaggcccatggagacaatgacatcaaggccatggtggagcaggagtacctgcaggtggaggagagcattgctgagagcgccaacaccttcatggaggacatcaccgtgccccccctgatgatccccacagaggccagccccagcgtgctggtggtggagctgagcaacaccaatgaggtggtgatccgctacgtgggcaaggactacagcgctgcccaggagctgatggaggatgagatgaaggagtactacagcaagaaccccaagatcacccctgtgcaggccgtgaatgtgggccagctgctggccgtgaatgctgaggaggatgcctggctgcgggcccaggtgatcagcacagaggagaacaagatcaaggtgtgctacgtggactatggcttctctgaaaatgtggagaagagcaaggcctacaagctgaaccccaagttctgcagcctgtccttccaggccaccaagtgcaagctggccggcctggaggtgctgagtgatgatcctgacctggtgaaggtggtggagagcctgacctgtgggaagatctttgctgtggagatcctggacaaggctgacatccccctggtggtgctgtatgacaccagcggagaagatgacatcaacatcaatgccacctgcctgaaggccatctgtgacaagagcctggaggtgcacctgcaggtggatgccatgtacaccaacgtgaaggtgaccaacatctgcagtgatggcaccctgtactgccaggtgccctgcaagggcctgaacaagctgagtgacctgctgaggaagattgaggactacttccactgcaagcacatgaccagcgagtgctttgtgtccctgcccttctgtgggaagatctgcctcttccactgcaagggcaagtggctgcgggtggagatcaccaacgtgcacagcagccgggccctggatgtgcagttcctggacagcggcaccgtgacctctgtgaaggtgtctgagctgcgggagatccccccacgcttcctgcaggagatgattgccatccccccccaggccatcaagtgctgcctggccgacctgccccagagcatcggcatgtggaccccagatgctgtgctgtggctgcgggacagcgtgctgaactgcagcgactgcagcatcaaggtgaccaaggtggatgagacccggggcatcgcccacgtgtacctgttcacccccaagaacttcccagacccccacaggagcatcaaccggcagatcaccaatgctgacctgtggaagcaccagaaggatgtgttcctgagcgccatcagcagtggagctgacagccccaacagcaagaatggaaacatgcccatgagcggcaacacaggagagaacttcaggaagaacctgacagatgtgatcaagaagtccatggtggaccacaccagcgccttcagcacagaggagctgcccccacctgtgcacctgagcaagccaggagagcacatggatgtgtatgtgcctgtggcctgccaccctggctactttgtgatccagccctggcaggagatccacaagctggaggtgctgatggaggagatgatcctgtactacagcgtgtctgaggagcggcacatcgctgtggagaaggaccaggtgtatgctgccaaggtggagaacaagtggcaccgggtgctgctgaagggcatcctgaccaacggcctggtgtctgtgtatgagctggactatggcaagcatgagctggtgaacatcaggaaggtgcagcccctggtggacatgttcaggaagctgcccttccaggccgtgacagcccagctggccggcgtgaagtgcaaccagtggagcgaggaggcctccatggtgttcagaaatcatgtggagaagaagcccctggtggccctggtgcagacagtgattgaaaatgccaacccctgggacaggaaggtggtggtgtacctggtggacaccagcctgcctgacacagacacctggattcatgacttcatgtctgagtacctgattgagctgagcaaggtgaactag

SEQ ID NO: 174812 - DNA, 1257 bp, synthetic construct
  misc_feature 1..1257: note = Description of Artificial Sequence: Synthetic coding sequence
  source 1..1257: mol_type = other DNA
atgtacaccaacgtgaaggtgaccaacatctgcagtgatggcaccctgtactgccaggtgccctgcaagggcctgaacaagctgagtgacctgctgaggaagattgaggactacttccactgcaagatcaccaacgtgcacagcagccgggccctggatgtgcagttcctggacagcggcaccgtgacctctgtgaaggtgtctgagctgcgggagatccccccacgcttcctgcaggagatgattgccatccccccccaggccatcaagtgctgcctggccgacctgccccagagcatcggcatgtggaccccagatgctgtgctgtggctgcgggacagcgtgctgaactgcagcgactgcagcatcaaggtgaccaaggtggatgagacccggggcatcgcccacgtgtacctgttcacccccaagaacttcccagacccccacaggagcatcaaccggcagatcaccaatgctgacctgtggaagcaccagaaggatgtgttcctgagcgccatcagcagtggagctgacagccccaacagcaagaatggaaacatgcccatgagcggcaacacaggagagaacttcaggaagaacctgacagatgtgatcaagaagtccatggtggaccacaccagcgccttcagcacagaggagctgcccccacctgtgcacctgagcaagccaggagagcacatggatgtgtatgtgcctgtggcctgccaccctggctactttgtgatccagccctggcaggagatccacaagctggaggtgctgatggaggagatgatcctgtactacagcgtgtctgaggagcggcacatcgctgtggagaaggaccaggtgtatgctgccaaggtggagaacaagtggcaccgggtgctgctgaagggcatcctgaccaacggcctggtgtctgtgtatgagctggactatggcaagcatgagctggtgaacatcaggaaggtgcagcccctggtggacatgttcaggaagctgcccttccaggccgtgacagcccagctggccggcgtgaagtgcaaccagtggagcgaggaggcctccatggtgttcagaaatcatgtggagaagaagcccctggtggccctggtgcagacagtgattgaaaatgccaacccctgggacaggaaggtggtggtgtacctggtggacaccagcctgcctgacacagacacctggattcatgacttcatgtctgagtacctgattgagctgagcaaggtgaactag

SEQ ID NO: 174813 - DNA, 2514 bp, synthetic construct
  misc_feature 1..2514: note = Description of Artificial Sequence: Synthetic coding sequence
  source 1..2514: mol_type = other DNA
atgagcctgagccacctgtacagagatggagagggcagaattgatgatgatgatgatgagcgggagaactttgagatcacagactgggacctgcagaatgagttcaaccccaaccggcagaggcactggcagaccaaggaggaggccacctatggagtgtgggccgagcgggacagtgatgatgagcggcccagctttggaggcaagagggcccgggactacagcgcccctgtgaacttcatctctgctggcctgaagaagggagctgctgaggaggccgagctggaggacagtgatgatgaggagaagcctgtgaagcaggatgacttccccaaggactttggccccaggaagctgaagacaggaggcaacttcaagcccagccagaagggctttgctgggggcaccaagagcttcatggactttggctcctgggagcggcacaccaagggcatcggccagaagctgctgcagaagatgggctacgtgcccggccggggcctgggcaagaatgcccagggcatcatcaaccccatcgaggccaagcagaggaaaggaaaaggagctgtgggcgcctacggcagcgagaggaccacccagagcatgcaggacttccctgtggtggacagcgaggaggaggccgaggaggagttccagaaggagctgagccagtggaggaaggaccccagcggcagcaagaagaagcccaagtacagctacaagacagtggaggagctgaaggccaagggccgcatcagcaagaagctgacagccccccagaaggagctgagccaggtgaaggtgattgacatgacaggccgggagcagaaggtgtactacagctacagccagatcagccacaagcacaacgtgcctgatgatggcctgcccctgcagagccagcagctgccccagagcggcaaggaggccaaggcccctggctttgccctgcctgagctggagcacaacctgcagctgctgattgacctgacagagcaggagatcatccagaatgaccggcagctgcagtatgaaagagacatggtggtgaacctcttccacgagctggagaagatgacagaggtgctggaccacgaggagagggtcatcagcaacctgagcaaggtgctggagatggtggaggagtgtgaaagaaggatgcagcctgactgcagcaaccccctgaccctggatgaatgtgcccgcatctttgagaccctgcaggacaagtactatgaggagtacaggatgtctgacagagtggacctggccgtggccatcgtgtaccccctgatgaaggagtacttcaaggagtgggaccccctgaaggactgcacctatggaacagagatcatcagcaagtggaagagcctgctggagaatgaccagctgctgagccatggaggccaggacctgtctgcagatgccttccacaggctcatctgggaggtgtggatgccctttgtgaggaacatcgtgacccagtggcagcccaggaactgtgaccccatggtggacttcctggacagctgggtgcacatcatccctgtgtggatcctggacaacatcctggaccagctgatcttccccaagctgcagaaggaggtggagaactggaaccccctgacagacacagtgcccatccacagctggatccacccctggctgcccctgatgcaggcccggctggagcccctgtacagccccatccgcagcaagctgagcagcgccctgcagaagtggcaccccagcgacagcagcgccaagctgatcctgcagccctggaaggatgtgttcaccccaggctcctgggaggccttcatggtgaagaacatcgtgcccaagctgggcatgtgcctgggggagctggtgatcaacccccaccagcagcacatggatgccttctactgggtgattgactgggagggcatgatctctgtgagcagcctggtgggcctgctggagaagcacttcttccccaagtggctgcaggtgctgtgctcctggctgagcaacagccccaactatgaggagatcaccaagtggtacctgggctggaagtccatgttcagtgaccaggtgctggcccaccccagcgtgaaggacaagttcaatgaggccctggacatcatgaacagagctgtgagcagcaatgtgggcgcctacatgcagcccggggccagagaaaatattgcctacctgacccacacagaaagaaggaaggacttccagtatgaggccatgcaggagcggcgggaggccgagaacatggcccagaggggcatcggcgtggccgccagctctgtgcccatgaacttcaaggacctgattgagaccaaggccgaggagcacaacatcgtgttcatgcctgtgattggcaagagacatgagggcaagcagctgtacaccttcggcagaattgtcatctacatcgaccggggcgtggtgtttgtgcagggcgagaagacctgggtgcccaccagcctgcagagcctgattgacatggccaagtag

SEQ ID NO: 174814 - DNA, 2514 bp, synthetic construct; identical to SEQ ID NO: 174813
  misc_feature 1..2514: note = Description of Artificial Sequence: Synthetic coding sequence
  source 1..2514: mol_type = other DNA

SEQ ID NO: 174815 - DNA, 2514 bp, synthetic construct; identical to SEQ ID NO: 174813
  misc_feature 1..2514: note = Description of Artificial Sequence: Synthetic coding sequence
  source 1..2514: mol_type = other DNA

SEQ ID NO: 174816 - DNA, 2514 bp, synthetic construct; identical to SEQ ID NO: 174813
  misc_feature 1..2514: note = Description of Artificial Sequence: Synthetic coding sequence
  source 1..2514: mol_type = other DNA

SEQ ID NO: 174817 - DNA, 267 bp, synthetic construct
  misc_feature 1..267: note = Description of Artificial Sequence: Synthetic coding sequence
  source 1..267: mol_type = other DNA
atgagcctgagccacctgtacagagatggagagggcagaattgatgatgatgatgatgagcgggagaactttgagatcacagactgggacctgcagaatgagttcaaccccaaccggcagaggcactggcagaccaaggaggaggccacctatggagtgtgggccgagcgggacagtgatgatgagcggcccagctttggaggcaagagggcccgggactacagcgcccctgtgaacttcatctctgctggcctgaagaagggctag

SEQ ID NO: 174818 - DNA, 261 bp, synthetic construct
  misc_feature 1..261: note = Description of Artificial Sequence: Synthetic coding sequence
  source 1..261: mol_type = other DNA
atgagcctgagccacctgtacagagatggagagggcagaattgatgatgatgatgatgagcgggagaactttgagatcacagactgggacctgcagaatgagttcaaccccaaccggcagaggcactggcagaccaaggaggaggccacctatggagtgtgggccgagcgggacagtgatgatgagcggcccagctttggaggcaagagggcccgggactacagcgcccctgtgaacttcatctctgctggcctgaagtag

SEQ ID NO: 174819 - DNA, 129 bp, synthetic construct
  misc_feature 1..129: note = Description of Artificial Sequence: Synthetic coding sequence
  source 1..129: mol_type = other DNA
atgagcctgagccacctgtacagagatggagagggcagaattgatgatgatgatgatgagcgggagaactttgagatcacagactgggacctgcagaatgagttcaaccccaaccggcagaggcactag

SEQ ID NO: 174820 - DNA, 1569 bp, synthetic construct
  misc_feature 1..1569: note = Description of Artificial Sequence: Synthetic coding sequence
  source 1..1569: mol_type = other DNA
atgagcctgagccacctgtacagagatggagagggcagaattgatgatgatgatgatgagcgggagaactttgagatcacagactgggacctgcagaatgagttcaacctcttccacgagctggagaagatgacagaggtgctggaccacgaggagagggtcatcagcaacctgagcaaggtgctggagatggtggaggagtgtgagaggaggatgcagcctgactgcagcaaccccctgaccctggatgaatgtgcccgcatctttgagaccctgcaggacaagtactatgaggagtacaggatgtctgacagagtggacctggccgtggccatcgtgtaccccctgatgaaggagtacttcaaggagtgggaccccctgaaggactgcacctacggcacagagatcatcagcaagtggaagagcctgctggagaatgaccagctgctgagccacggcggccaggacctgtctgcagatgccttccacaggctcatctgggaggtgtggatgccctttgtgagaaatattgtgacccagtggcagcccaggaactgtgaccccatggtggacttcctggacagctgggtgcacatcatccctgtgtggatcctggacaacatcctggaccagctgatcttccccaagctgcagaaggaggtggagaactggaaccccctgacagacacagtgcccatccacagctggatccacccctggctgcccctgatgcaggcccggctggagcccctgtacagccccatccgcagcaagctgagcagcgccctgcagaagtggcaccccagcgacagcagcgccaagctgatcctgcagccctggaaggatgtgttcaccccaggctcctgggaggccttcatggtgaagaacatcgtgcccaagctgggcatgtgcctgggggagctggtgatcaacccccaccagcagcacatggatgccttctactgggtgattgactgggagggcatgatctctgtgagcagcctggtgggcctgctggagaagcacttcttccccaagtggctgcaggtgctgtgctcctggctgagcaacagccccaactatgaggagatcaccaagtggtacctgggctggaagtccatgttcagtgaccaggtgctggcccaccccagcgtgaaggacaagttcaatgaggccctggacatcatgaacagagctgtgagcagcaatgtgggcgcctacatgcagcccggggcccgggagaacatcgcctacctgacccacacagagaggaggaaggacttccagtatgaggccatgcaggagcggcgggaggccgagaacatggcccagaggggcattggagtggccgccagctctgtgcccatgaacttcaaggacctgattgagaccaaggccgaggagcacaacatcgtgttcatgcctgtgattggcaagagacatgagggcaagcagctgtacaccttcggccgcatcgtcatctacatcgacagaggagtggtgtttgtgcagggcgagaagacctgggtgcccaccagcctgcagagcctgattgacatggccaagtag

SEQ ID NO: 174821 - DNA, 576 bp, synthetic construct
  misc_feature 1..576: note = Description of Artificial Sequence: Synthetic coding sequence
  source 1..576: mol_type = other DNA
tgaggaagaggcctgggcaagaatgcccagggcatcatcaaccccatcgaggccaagcagaggaagggcaaaggagctgtgggcgcctacggcagcgagaggaccacccagagcatgcaggacttccctgtggtggacagcgaggaggaggccgaggagtggctgttcctggccgccagtgactgcatcctgctggtgcaggagttccagaaggagctgagccagtggaggaaggaccccagcggcagcaagaagaagcccaagtacagctacaagacagtggaggagctgaaggccaagggccgcatcagcaagaagctgacagccccccagaaggagctgagccaggtgaaggtgattgacatgacaggccgggagcagaaggtgtactacagctacagccagatcagccacaagcacaacgtgcctgatgatggcctgcccctgcagagccagcagctgccccagagcggcaaggaggccaaggcccctggctttgccctgcctgagctggagcacaacctgcagctgctgattgacctgacagagcaggagatcatccagaatgacagatag

SEQ ID NO: 174822 - DNA, 366 bp, synthetic construct
  misc_feature 1..366: note = Description of Artificial Sequence: Synthetic coding sequence
  source 1..366: mol_type = other DNA
atgagcctgagccacctgtacagagatggagagggcagaattgatgatgatgatgatgagcgggagaactttgagatcacagactgggacctgcagaatgagttcaaccccaaccggcagaggcactggcagaccaaggaggaggccacctatggagtgtgggccgagcgggacagtgatgatgagcggcccagctttggaggcaagagggcccgggactacagcgcccctgtgaacttcatctctgctggcctgaagaagggagctgctgaggaggccgagctggaggacagtgatgatgaggagaagcctgtgaagcaggatgacttccccaaggactttggccccaggaagctgaagacctag

SEQ ID NO: 174823 - DNA, 723 bp, synthetic construct
  misc_feature 1..723: note = Description of Artificial Sequence: Synthetic coding sequence
  source 1..723: mol_type = other DNA
atggaggagagcgtggtgcggcccagcgtgtttgtggtggatggccagacagacatccccttcacccggctgggccgcagccaccggcggcagagctgcagcgtggcccgggtgggcctgggcctgctgctgctgctgatgggcgccggcctggccgtgcagggctggttcctgctgcagctgcactggaggctgggggagatggtgacccggctgcctgatggccctgctggctcctgggagcagctgatccaggagaggaggagccatgaggtgaacccagctgcccacctgactggagccaacagcagcctgaccggcagcggcggccccctgctgtgggagacccagctgggcctggccttcctgcggggcctgagctaccatgatggagccctggtggtgaccaaggccggctactactacatctacagcaaggtgcagctgggcggcgtgggctgccccctgggcctggccagcaccatcacccacggcctgtacaagaggaccccccgctacccagaggagctggagctgctggtgtcccagcagagcccctgtggccgggccaccagcagcagccgggtgtggtgggacagcagcttcctgggcggcgtggtgcacctggaggccggggagaaggtggtggtgcgggtgctggatgagcggctggtgcggctgagagatggcaccaggagctactttggagccttcatggtgtag

SEQ ID NO: 174824 - DNA, 954 bp, synthetic construct
  misc_feature 1..954: note = Description of Artificial Sequence: Synthetic coding sequence
  source 1..954: mol_type = other DNA
atgaggcgggccagccgggactacaccaagtacctgcggggcagcgaggagatgggcggcggccctggggcccctcatgagggccccctgcacgcccctcctcctccagccccccaccagcccccagctgccagccgctccatgtttgtggccctgctgggcctgggcctgggccaggtggtgtgcagcgtggccctcttcttctacttccgggcccagatggaccccaaccgcatcagtgaagatggcacccactgcatctaccgcatcctgcggctgcatgaaaatgctgacttccaggacaccaccctggagagccaggacaccaagctgatcccagacagctgccgccgcatcaagcaggccttccagggcgctgtgcagaaggagctgcagcacatcgtgggcagccagcacatccgggcagagaaggccatggtggatggctcctggctggacctggccaagaggagcaagctggaggcccagccctttgcccacctgaccatcaatgccacagacatccccagcggcagccacaaggtgtccctgagctcctggtaccatgaccggggctgggccaagatcagcaacatgaccttcagcaatggcaagctgattgtgaaccaggacggcttctactacctgtatgccaacatctgcttccgccaccacgagaccagcggggacctggccacagagtacctgcagctgatggtgtatgtgaccaagaccagcatcaagatccccagcagccacaccctgatgaagggcggcagcaccaagtactggagcggcaacagcgagttccacttctacagcatcaacgtgggcggcttcttcaagctgcggtctggagaggagatcagcattgaggtgagcaaccccagcctgctggaccctgaccaggatgccacctactttggagccttcaaggtgcgggacatcgactag

SEQ ID NO: 174825 - DNA, 735 bp, synthetic construct
  misc_feature 1..735: note = Description of Artificial Sequence: Synthetic coding sequence
  source 1..735: mol_type = other DNA
atggaccccaaccgcatcagtgaagatggcacccactgcatctaccgcatcctgcggctgcatgaaaatgctgacttccaggacaccaccctggagagccaggacaccaagctgatcccagacagctgccgccgcatcaagcaggccttccagggcgctgtgcagaaggagctgcagcacatcgtgggcagccagcacatccgggcagagaaggccatggtggatggctcctggctggacctggccaagaggagcaagctggaggcccagccctttgcccacctgaccatcaatgccacagacatccccagcggcagccacaaggtgtccctgagctcctggtaccatgaccggggctgggccaagatcagcaacatgaccttcagcaatggcaagctgattgtgaaccaggacggcttctactacctgtatgccaacatctgcttccgccaccacgagaccagcggggacctggccacagagtacctgcagctgatggtgtatgtgaccaagaccagcatcaagatccccagcagccacaccctgatgaagggcggcagcaccaagtactggagcggcaacagcgagttccacttctacagcatcaacgtgggcggcttcttcaagctgcggagcggggaggagatcagcattgaggtgagcaaccccagcctgctggaccctgaccaggatgccacctactttggagccttcaaggtgcgggacattgattag

SEQ ID NO: 174826 - DNA, 735 bp, synthetic construct; identical to SEQ ID NO: 174825
  misc_feature 1..735: note = Description of Artificial Sequence: Synthetic coding sequence
  source 1..735: mol_type = other DNA

SEQ ID NO: 174827 - DNA, 735 bp, synthetic construct; identical to SEQ ID NO: 174825
  misc_feature 1..735: note = Description of Artificial Sequence: Synthetic coding sequence
  source 1..735: mol_type = other DNA

SEQ ID NO: 174828 - DNA, 735 bp, synthetic construct; identical to SEQ ID NO: 174825
  misc_feature 1..735: note = Description of Artificial Sequence: Synthetic coding sequence
  source 1..735: mol_type = other DNA

SEQ ID NO: 174829 - DNA, 750 bp, synthetic construct
  misc_feature 1..750: note = Description of Artificial Sequence: Synthetic coding sequence
  source 1..750: mol_type = other DNA
atggccgcccggcgcagccagaggagaagaggccggcggggggagcccggcacagccctgctggtgcccctggccctgggcctgggcctggccctggcctgcctgggcctgctgctggccgtggtgtccctgggcagccgggccagcctgagcgcccaggagcccgcccaggaggagctggtggccgaggaggaccaggaccccagcgagctgaacccccagacagaggagagccaggaccctgcccccttcctgaaccggctggtgcggccccggcgcagcgcccccaagggcaggaagacccgggcccggcgggccatcgccgcccactatgaggtgcaccccaggcctggccaggatggagcccaggccggcgtggatggcaccgtgtctggctgggaggaggcccgcatcaacagcagcagccccctgcgctacaaccggcagatcggggagttcatcgtgacccgggccggcctgtactacctgtactgccaggtgcactttgatgagggcaaggctgtgtacctgaagctggacctgctggtggatggagtgctggccctgcgctgcctggaggagttcagcgccacagctgccagcagcctgggcccccagctgcggctgtgccaggtgtctggcctgctggccctgcggcccggcagcagcctgcgcatccgcaccctgccctgggcccacctgaaggccgcccccttcctgacctacttcggcctcttccaggtgcactag

SEQ ID NO: 174830 - DNA, 993 bp, synthetic construct
  misc_feature 1..993: note = Description of Artificial Sequence: Synthetic coding sequence
  source 1..993: mol_type = other DNA
atggccgcccggcgcagccagaggagaagaggccggcggggggagcccggcacagccctgctggtgcccctggccctgggcctgggcctggccctggcctgcctgggcctgctgctggccgtggtgtccctgggcagccgggccagcctgagcgcccaggagcccgcccaggaggagctggtggccgaggaggaccaggaccccagcgagctgaacccccagacagaggagagccaggaccctgcccccttcctgaaccggctggtgcggccccggcgcagcgcccccaagggcaggaagacccgggcccggcgggccatcgccgcccactatgaggtgcaccccaggcctggccaggatggagcccaggccggcgtggatggcaccgtgtctggctgggaggaggcccgcatcaacagcagcagccccctgcgctacaaccggcagatcggggagttcatcgtgacccgggccggcctgtactacctgtactgccagagcagtgatgccctggaggcctgggagaatggagagaggagcaggaagagaagagctgtgctgacccagaagcagaagaagcagcacagcgtgctgcacctggtgcccatcaatgccaccagcaaggatgacagtgatgtgacagaggtgatgtggcagcctgccctgcggcggggccggggcctgcaggcccagggctatggagtgcgcatccaggatgctggggtgtacctgctgtacagccaggtgctcttccaggatgtgaccttcaccatgggccaggtggtgtcccgggagggccagggccggcaggagaccctcttccgctgcatccgctccatgcccagccacccagaccgggcctacaacagctgctacagcgctggggtcttccacctgcaccagggcgacatcctgagcgtcatcatcccccgggcccgggccaagctgaacctgagcccccacggcaccttcctgggctttgtgaagctgtag

SEQ ID NO: 174831 - DNA, 723 bp, synthetic construct; identical to SEQ ID NO: 174823
  misc_feature 1..723: note = Description of Artificial Sequence: Synthetic coding sequence
  source 1..723: mol_type = other DNA

SEQ ID NO: 174832 - DNA, 615 bp, synthetic construct
  misc_feature 1..615: note = Description of Artificial Sequence: Synthetic coding sequence
  source 1..615: mol_type = other DNA
atggaggagagcgtggtgcggcccagcgtgtttgtggtggatggccagacagacatccccttcacccggctgggccgcagccaccggcggcagagctgcagcgtggccagagatggccctgctggctcctgggagcagctgatccaggagaggaggagccatgaggtgaacccagctgcccacctgactggagccaacagcagcctgaccggcagcggcggccccctgctgtgggagacccagctgggcctggccttcctgcggggcctgagctaccatgatggagccctggtggtgaccaaggccggctactactacatctacagcaaggtgcagctgggcggcgtgggctgccccctgggcctggccagcaccatcacccacggcctgtacaagaggaccccccgctacccagaggagctggagctgctggtgtcccagcagagcccctgtggccgggccaccagcagcagccgggtgtggtgggacagcagcttcctgggcggcgtggtgcacctggaggccggggagaaggtggtggtgcgggtgctggatgagcggctggtgcggctgagagatggcaccaggagctactttggagccttcatggtgtag

SEQ ID NO: 174833 - DNA, 525 bp, synthetic construct
  misc_feature 1..525: note = Description of Artificial Sequence: Synthetic coding sequence
  source 1..525: mol_type = other DNA
atgaggcacttcctgagcaaggtgtacagcttccccatgaggaagctgatcctcttcctggtgtttcctgtggtgcggcagacccccacccagcacttcaagaaccagtttcctgccctgcactgggagcacgagctgggcctggccttcaccaagaacaggatgaactacaccaacaagttcctgctgatccctgagagcggggactacttcatctacagccaggtgaccttccggggcatgaccagcgagtgcagcgagatccggcaggccggccggcccaacaagccagacagcatcaccgtggtgatcaccaaggtgacagacagctacccagagcccacccagctgctgatgggcaccaagtctgtgtgtgaggtgggcagcaactggttccagcccatctacctgggcgccatgttcagcctgcaggagggggacaagctgatggtgaatgtgtctgacatcagcctggtggactacaccaaggaggacaagaccttctttggagccttcctgctgtag

SEQ ID NO: 174834 - DNA, 756 bp, synthetic construct
  misc_feature 1..756: note = Description of Artificial Sequence: Synthetic coding sequence
  source 1..756: mol_type = other DNA
atggccgaggacctgggcctgagctttggagaaacagcctctgtggagatgctgcctgagcacggcagctgccggcccaaggcccggagcagcagcgcccgctgggccctgacctgctgcctggtgctgctgcccttcctggccggcctgaccacctacctgctggtgtcccagctgcgggcccagggcgaggcctgtgtgcagttccaggccctgaagggccaggagtttgcccccagccaccagcaggtgtatgcccccctgcgggcagatggagacaagccccgggcccacctgactgtggtgcggcagacccccacccagcacttcaagaaccagtttcctgccctgcactgggagcacgagctgggcctggccttcaccaagaacaggatgaactacaccaacaagttcctgctgatccctgagagcggggactacttcatctacagccaggtgaccttccggggcatgaccagtgaatgttctgagatccggcaggccggccggcccaacaagccagacagcatcaccgtggtgatcaccaaggtgacagacagctacccagagcccacccagctgctgatgggcaccaagtctgtgtgtgaggtgggcagcaactggttccagcccatctacctgggcgccatgttcagcctgcaggagggggacaagctgatggtgaatgtgtctgacatcagcctggtggactacaccaaggaggacaagaccttcttcggggccttcctgctgtag

SEQ ID NO: 174835 - DNA, 534 bp, synthetic construct
  misc_feature 1..534: note = Description of Artificial Sequence: Synthetic coding sequence
  source 1..534: mol_type = other DNA
atgtgcctgagccacctggagaacatgcccctgagccacagcaggacccagggcgcccagaggagctcctggaagctgtggctgttctgcagcatcgtgatgctgctcttcctgtgcagcttctcctggctgatcttcatcttcctgcagctggagacagccaaggagccctgcatggccaagtttggccccctgcccagcaagtggcagatggccagcagcgagcccccctgtgtgaacaaggtgtctgactggaagctggagatcctgcagaatggcctgtacctgatctacggccaggtggccccaaatgccaactacaatgatgtggccccctttgaggtgcggctgtacaagaacaaggacatgatccagaccctgaccaacaagagcaagatccagaatgtgggcggcacctatgagctgcacgtgggggacaccatcgacctgatcttcaacagcgagcaccaggtgctgaagaacaacacctactggggcatcatcctgctggccaacccccagttcatctcctag

SEQ ID NO: 174836 - DNA, 600 bp, synthetic construct
  misc_feature 1..600: note = Description of Artificial Sequence: Synthetic coding sequence
  source 1..600: mol_type = other DNA
atgaccctgcaccccagccccatcacctgtgagttcctgttcagcacagccctgatcagccccaagatgtgcctgagccacctggagaacatgcccctgagccacagcaggacccagggcgcccagaggagctcctggaagctgtggctgttctgcagcatcgtgatgctgctcttcctgtgcagcttctcctggctgatcttcatcttcctgcagctggagacagccaaggagccctgcatggccaagtttggccccctgcccagcaagtggcagatggccagcagcgagcccccctgtgtgaacaaggtgtctgactggaagctggagatcctgcagaatggcctgtacctgatctacggccaggtggccccaaatgccaactacaatgatgtggccccctttgaggtgcggctgtacaagaacaaggacatgatccagaccctgaccaacaagagcaagatccagaatgtgggcggcacctatgagctgcacgtgggggacaccatcgacctgatcttcaacagcgagcaccaggtgctgaagaacaacacctactggggcatcatcctgctggccaacccccagttcatctcctag

SEQ ID NO: 174837 - DNA, 552 bp, synthetic construct
  misc_feature 1..552: note = Description of Artificial Sequence: Synthetic coding sequence
  source 1..552: mol_type = other DNA
atggagcgggtgcagcccctggaggagaatgtgggcaatgctgcccggcccaggtttgaaagaaacaagctgctgctggtggccagcgtcatccagggcctgggcctgctgctgtgcttcacctacatctgcctgcacttcagcgccctgcaggtgagccaccgctacccccgcatccagagcatcaaggtgcagttcacagagtacaagaaggagaagggcttcatcctgaccagccagaaggaggatgagatcatgaaggtgcagaacaacagcgtcatcatcaactgtgatggcttctacctgatcagcctgaagggctacttcagccaggaggtgaacatcagcctgcactaccagaaggatgaggagcccctcttccagctgaagaaggtgcgctctgtgaacagcctgatggtggccagcctgacctacaaggacaaggtgtacctgaatgtgaccacagacaacaccagcctggatgacttccacgtgaatggaggagagctgatcctgatccaccagaaccctggagagttctgtgtgctgtag

SEQ ID NO: 174838 - DNA, 402 bp, synthetic construct
  misc_feature 1..402: note = Description of Artificial Sequence: Synthetic coding sequence
  source 1..402: mol_type = other DNA
atggtgagccaccgctacccccgcatccagagcatcaaggtgcagttcacagagtacaagaaggagaagggcttcatcctgaccagccagaaggaggatgagatcatgaaggtgcagaacaacagcgtcatcatcaactgtgatggcttctacctgatcagcctgaagggctacttcagccaggaggtgaacatcagcctgcactaccagaaggatgaggagcccctcttccagctgaagaaggtgcgctctgtgaacagcctgatggtggccagcctgacctacaaggacaaggtgtacctgaatgtgaccacagacaacaccagcctggatgacttccacgtgaatggaggagagctgatcctgatccaccagaaccctggagagttctgtgtgctgtag

SEQ ID NO: 174839 - DNA, 402 bp, synthetic construct; identical to SEQ ID NO: 174838
  misc_feature 1..402: note = Description of Artificial Sequence: Synthetic coding sequence
  source 1..402: mol_type = other DNA

SEQ ID NO: 174840 - DNA, 765 bp, synthetic construct
  misc_feature 1..765: note = Description of Artificial Sequence: Synthetic coding sequence
  source 1..765: mol_type = other DNA
atggagtatgccagtgatgccagcctggaccctgaggccccctggcccccagccccccgggcccgggcctgccgggtgctgccctgggccctggtggccggcctgctgctgctgctgctgctggccgccgcctgtgctgtgttcctggcctgcccctgggccgtgtctggggcccgggccagccctggcagcgctgccagcccccggctgcgggagggccctgagctgagcccagatgatcctgctggcctgctggacctgcggcagggcatgtttgcccagctggtggcccagaatgtgctgctgattgatggccccctgtcctggtacagcgaccccggcctggccggcgtgtccctgactggaggcctgagctacaaggaggacaccaaggagctggtggtggccaaggccggcgtgtactacgtgttcttccagctggagctgcggcgggtggtggccggggagggcagcggctctgtgtccctggccctgcacctgcagcccctgcggtctgctgctggagctgctgccctggccctgactgtggacctgcccccagccagcagcgaggccagaaattctgccttcggcttccagggccgcctgctgcacctgtctgctggccagaggctgggcgtgcacctgcacacagaggcccgggcccggcatgcctggcagctgacccagggcgccaccgtgctgggcctcttccgggtgaccccagagatcccagctggcctgcccagccccaggtctgagtag

SEQ ID NO: 174841 - DNA, 1851 bp, synthetic construct
  misc_feature 1..1851: note = Description of Artificial Sequence: Synthetic coding sequence
  source 1..1851: mol_type = other DNA
atggccccccgggccaggagaagaagacccctgtttgccctgctgctgctgtgtgccctgctggcccggctgcaggtggccctgcagatcgccccaccctgcaccagcgagaagcactatgagcacctgggccgctgctgcaacaagtgtgagcccgggaagtacatgagcagcaagtgcaccaccaccagtgacagcgtgtgcctgccctgtggcccagatgagtacctggacagctggaatgaggaggacaagtgcctgctgcacaaggtgtgtgacaccgggaaggccctggtggccgtggtggccggcaacagcaccaccccccggcgctgtgcctgcacagctggctaccactggagccaggactgtgagtgctgcagaagaaacacagaatgtgcccctggcctgggcgcccagcaccccctgcagctgaacaaggacacagtgtgcaagccctgcctggccggctacttcagtgatgccttcagcagcacagacaagtgccggccctggaccaactgcaccttcctgggcaagagggtggagcaccacggcacagagaagagtgatgctgtgtgcagcagcagcctgcctgccaggaagcccccaaatgagccccacgtgtacctgcccggcctcatcatcctgctgctgtttgcctctgtggccctggtggccgccatcatctttggagtgtgctacaggaagaagggcaaggccctgacagccaacctgtggcactggatcaatgaggcctgtggccgcctgagcggggacaaggagagcagcggggacagctgtgtgtccacccacacagccaactttggccagcagggcgcctgtgagggcgtgctgctgctgaccctggaggagaagaccttccctgaggacatgtgctacccagaccagggcggcgtgtgccagggcacctgtgtgggcggcggcccctatgcccagggagaagatgccaggatgctgagcctggtgtccaagacagaaattgaagaagattccttccggcagatgcccacagaagatgagtacatggaccggcccagccagcccacagaccagctgctcttcctgacagagcccggcagcaagagcaccccacccttcagcgagcccctggaggtgggggagaatgacagcctgagccagtgcttcaccggcacccagagcacagtgggcagcgagagctgcaactgcacagagcccctgtgcaggacagactggacccccatgagcagcgagaactacctgcagaaggaggtggacagcggccactgcccccactgggccgccagccccagccccaactgggcagatgtgtgcaccggctgcaggaaccccccaggagaggactgtgagcccctggtgggcagccccaagaggggccccctgccccagtgtgcctacggcatgggcctgcccccagaggaggaggccagcaggacagaggcccgggaccagccagaagatggagcagatggccgcctgcccagcagcgcccgggccggggccggcagcggcagcagccctgggggccagagccctgccagcggaaatgtgacaggcaacagcaacagcaccttcatcagcagcggccaggtgatgaacttcaagggggacatcatcgtggtgtatgtgtcccagaccagccaggagggcgctgctgctgctgctgagcccatgggccggcctgtgcaggaggagaccctggcccggcgggacagctttgctggaaatggcccccgcttcccagacccctgtggcggccctgagggcctgcgggagcctgagaaggccagcaggcctgtgcaggagcagggcggggccaaggcctag

SEQ ID NO: 174842 - DNA, 780 bp, synthetic construct
  misc_feature 1..780: note = Description of Artificial Sequence: Synthetic coding sequence
  source 1..780: mol_type = other DNA
atggcccgcatccccaagaccctgaagtttgtggtggtgattgtggccgtgctgctgcctgtgctggcctacagcgccaccacagcccggcaggaggaggtgccccagcagacagtggccccccagcagcagaggcacagcttcaagggggaggagtgcccagctggcagccacaggtctgagcacactggagcctgcaacccctgcacagagggcgtggactacaccaatgccagcaacaatgagcccagctgcttcccctgcaccgtgtgcaagagtgaccagaagcacaagagcagctgcaccatgacccgggacacagtgtgccagtgcaaggagggcaccttcagaaatgaaaacagccctgagatgtgcaggaagtgcagccgctgccccagcggggaggtgcaggtgagcaactgcacctcctgggatgacatccagtgtgtggaggagtttggagccaatgccaccgtggagaccccagctgctgaggagaccatgaacaccagccctggcaccccagccccagctgctgaggagaccatgaacaccagccctggcaccccagccccagctgctgaggagaccatgaccaccagccctggcaccccagccccagctgctgaggagaccatgaccaccagccctggcaccccagccccagctgctgaggagaccatgatcaccagccctggcaccccagccagcagccactacctgagctgcaccatcgtgggcatcatcgtgctgattgtgctgctgattgtgtttgtgtag

SEQ ID NO: 174843 - DNA, 474 bp, synthetic construct
  misc_feature 1..474: note = Description of Artificial Sequence: Synthetic coding sequence
  source 1..474: mol_type = other DNA
atgacccgggacacagtgtgccagtgcaaggagggcaccttcagaaatgaaaacagccctgagatgtgcaggaagtgcagccgctgccccagcggggaggtgcaggtgagcaactgcacctcctgggatgacatccagtgtgtggaggagtttggagccaatgccaccgtggagaccccagctgctgaggagaccatgaacaccagccctggcaccccagccccagctgctgaggagaccatgaacaccagccctggcaccccagccccagctgctgaggagaccatgaccaccagccctggcaccccagccccagctgctgaggagaccatgaccaccagccctggcaccccagccccagctgctgaggagaccatgatcaccagccctggcaccccagccagcagccactacctgagctgcaccatcgtgggcatcatcgtgctgattgtgctgctgattgtgtttgtgtag

SEQ ID NO: 174844 - DNA, 834 bp, synthetic construct
  misc_feature 1..834: note = Description of Artificial Sequence: Synthetic coding sequence
  source 1..834: mol_type = other DNA
atggcccgcatccccaagaccctgaagtttgtggtggtgattgtggccgtgctgctgcctgtgctggcctacagcgccaccacagcccggcaggaggaggtgccccagcagacagtggccccccagcagcagaggcacagcttcaagggggaggagtgcccagctggcagccacaggtctgagcacactggagcctgcaacccctgcacagagggcgtggactacaccaatgccagcaacaatgagcccagctgcttcccctgcaccgtgtgcaagagtgaccagaagcacaagagcagctgcaccatgacccgggacacagtgtgccagtgcaaggagggcaccttcagaaatgaaaacagccctgagatgtgcaggaagtgcagccgctgccccagcggggaggtgcaggtgagcaactgcacctcctgggatgacatccagtgtgtggaggagtttggagccaatgccaccgtggagaccccagctgctgaggagaccatgaacaccagccctggcaccccagccccagctgctgaggagaccatgaacaccagccctggcaccccagccccagctgctgaggagaccatgaccaccagccctggcaccccagccccagctgctgaggagaccatgaccaccagccctggcaccccagccccagctgctgaggagaccatgatcaccagccctggcaccccagccagcagccactacctgagctgcaccatcgtgggcatcatcgtgctgattgtgctgctgattgtgccctacctgaagaagaagaagaagaagaagctgaagaagaagcagaagaggaagagcaagtag

SEQ ID NO: 174845 - DNA, 1851 bp, synthetic construct; identical to SEQ ID NO: 174841
  misc_feature 1..1851: note = Description of Artificial Sequence: Synthetic coding sequence
  source 1..1851: mol_type = other DNA

SEQ ID NO: 174846 - DNA, 966 bp, synthetic construct
  misc_feature 1..966: note = Description of Artificial Sequence: Synthetic coding sequence
  source 1..966: mol_type = other DNA
ggcagccgggcccgctgggccacagaggccgctgaggccgccgccccagccagcctgagccgggccatggccccccgggccaggagaagaagacccctgtttgccctgctgctgctgtgtgccctgctggcccggctgcaggtggccctgcagatcgccccaccctgcaccagcgagaagcactatgagcacctgggccgctgctgcaacaagtgtgagcccgggaagtacatgagcagcaagtgcaccaccaccagtgacagcgtgtgcctgccctgtggcccagatgagtacctggacagctggaatgaggaggacaagtgcctgctgcacaaggtgtgtgacaccgggaaggccctggtggccgtggtggccggcaacagcaccaccccccggcgctgtgcctgcacagctggctaccactggagccaggactgtgagtgctgcagaagaaacacagaatgtgcccctggcctgggcgcccagcaccccctgcagctgaacaaggacacagtgtgcaagccctgcctggccggctacttcagtgatgccttcagcagcacagacaagtgccggccctggaccaactgcaccttcctgggcaagagggtggagcaccacggcacagagaagagtgatgctgtgtgcagcagcagcctgcctgccaggaagcccccaaatggaaatgtgactggaaacagcaacagcaccttcatcagcagcggccaggtgatgaacttcaagggggacatcatcgtggtgtatgtgtcccagaccagccaggagggcgctgctgctgctgctgagcccatgggccggcctgtgcaggaggagaccctggcccggcgggacagctttgctggaaatggcccccgcttcccagacccctgtggcggccctgagggcctgcgggagcctgagaaggccagcaggcctgtgcaggagcagggcggggccaaggcctag

SEQ ID NO: 174847 - DNA, 1206 bp, synthetic construct
  misc_feature 1..1206: note = Description of Artificial Sequence: Synthetic coding sequence
  source 1..1206: mol_type = other DNA
atgaacaacctgctgtgctgtgccctggtgttcctggacatcagcatcaagtggaccacccaggagaccttcccccccaagtacctgcactatgatgaggagaccagccaccagctgctgtgtgacaagtgccccccaggcacctacctgaagcagcactgcacagccaagtggaagacagtgtgtgccccctgcccagaccactactacacagacagctggcacaccagtgatgaatgtctgtactgcagccctgtgtgcaaggagctgcagtatgtgaagcaggagtgcaacagaacccacaacagagtgtgtgagtgcaaggagggccgctacctggagattgagttctgcctgaagcacaggagctgccccccaggcttcggcgtggtgcaggccggcaccccagagaggaacacagtgtgcaagcgctgcccagatggcttcttcagcaatgagaccagcagcaaggccccctgcaggaagcacaccaactgcagcgtgtttggcctgctgctgacccagaagggaaatgccacccatgacaacatctgcagcggcaacagcgagagcacccagaagtgtggcattgatgtgaccctgtgtgaggaggccttcttccgctttgctgtgcccaccaagttcacccccaactggctgtctgtgctggtggacaacctgcccggcaccaaggtgaatgctgagagcgtggagcgcatcaagaggcagcacagcagccaggagcagaccttccagctgctgaagctgtggaagcaccagaacaaggaccaggacatcgtgaagaagatcatccaggacatcgacctgtgtgagaacagcgtgcagaggcacatcggccacgccaacctgacctttgagcagctgcggagcctgatggagagcctgcccgggaagaaggtgggcgctgaggacatcgagaagaccatcaaggcctgcaagcccagcgaccagatcctgaagctgctgagcctgtggaggatcaagaatggagaccaggacaccctgaagggcctgatgcacgccctgaagcacagcaagacctaccacttccccaagacagtgacccagagcctgaagaagaccatccgcttcctgcacagcttcaccatgtacaagctgtaccagaagctgttcctggagatgattggcaaccaggtgcagagcgtgaagatcagctgcctgtag

SEQ ID NO: 174848 - DNA, 390 bp, synthetic construct
  misc_feature 1..390: note = Description of Artificial Sequence: Synthetic coding sequence
  source 1..390: mol_type = other DNA
atggcccggggcagcctgcggcggctgctgcggctgctggtgctgggcctgtggctggccctgctgcggtctgtggccggggagcaggcccctggaacagccccctgcagccggggcagctcctggagcgctgacctggacaagtgcatggactgtgccagctgccgggcccggccccacagcgacttctgcctgggctgtgccgccgcccccccagcccccttccggctgctgtggcccatcctgggcggggccctgagcctgacctttgtgctgggcctgctgagcggcttcctggtgtggaggcgctgcagaagaagagagaagttcaccacccccatcgaggagactggaggagagggctgcccagctgtggccctgatccagtag

SEQ ID NO: 174849 - DNA, 285 bp, synthetic construct
  misc_feature 1..285: note = Description of Artificial Sequence: Synthetic coding sequence
  source 1..285: mol_type = other DNA
atggcccggggcagcctgcggcggctgctgcggctgctggtgctgggcctgtggctggccctgctgcggtctgtggccggggagcaggcccctggagctgctgcccccccagcccccttccggctgctgtggcccatcctgggcggggccctgagcctgacctttgtgctgggcctgctgagcggcttcctggtgtggaggcgctgcagaagaagagagaagttcaccacccccatcgaggagaccggcggggagggctgcccagctgtggccctgatccagtag

SEQ ID NO: 174850 - DNA, 882 bp, synthetic construct
  misc_feature 1..882: note = Description of Artificial Sequence: Synthetic coding sequence
  source 1..882: mol_type = other DNA
atgagcggcctgggccgcagccggcggggcggccgcagccgggtggaccaggaggagcgcttcccccagggcctgtggacaggagtggccatgaggagctgcccagaggagcagtactgggaccccctgctgggcacctgcatgagctgcaagaccatctgcaaccaccagagccagaggacctgtgccgccttctgccgcagcctgagctgcaggaaggagcagggcaagttctatgaccacctgctgcgggactgcatcagctgtgccagcatctgtggccagcaccccaagcagtgtgcctacttctgtgagaacaagctgcggagccctgtgaacctgcccccagagctgcggcggcagaggtctggagaggtggagaacaacagcgacaacagcggccgctaccagggcctggagcaccggggcagcgaggccagccctgccctgcccggcctgaagctgtctgctgaccaggtggccctggtgtacagcaccctgggcctgtgcctgtgtgctgtgctgtgctgcttcctggtggccgtggcctgcttcctgaagaagagaggagacccctgcagctgccagcccaggagccggccccggcagagccctgccaagagcagccaggaccacgccatggaggccggcagccctgtgtccaccagccctgagcctgtggagacctgcagcttctgcttccctgagtgccgggcccccacccaggagagcgctgtgaccccaggcaccccagaccccacctgtgccggccgctggggctgccacaccaggaccaccgtgctgcagccctgcccccacatcccagattctggcctgggcatcgtgtgtgtgcctgcccaggagggcggccctggggcctag

SEQ ID NO: 174851 - DNA, 747 bp, synthetic construct
  misc_feature 1..747: note = Description of Artificial Sequence: Synthetic coding sequence
  source 1..747: mol_type = other DNA
atgagcggcctgggccgcagccggcggggcggccgcagccgggtggaccaggaggagcgctggagcctgagctgcaggaaggagcagggcaagttctatgaccacctgctgcgggactgcatcagctgtgccagcatctgtggccagcaccccaagcagtgtgcctacttctgtgagaacaagctgcggagccctgtgaacctgcccccagagctgcggcggcagaggtctggagaggtggagaacaacagcgacaacagcggccgctaccagggcctggagcaccggggcagcgaggccagccctgccctgcccggcctgaagctgtctgctgaccaggtggccctggtgtacagcaccctgggcctgtgcctgtgtgctgtgctgtgctgcttcctggtggccgtggcctgcttcctgaagaagagaggagacccctgcagctgccagcccaggagccggccccggcagagccctgccaagagcagccaggaccacgccatggaggccggcagccctgtgtccaccagccctgagcctgtggagacctgcagcttctgcttccctgagtgccgggcccccacccaggagagcgctgtgaccccaggcaccccagaccccacctgtgccggcaggaagaccaagcccccacctgtgctgacagctggcaactgtggggtgcaccggcccccacctgagaccagcacaggcagcccccggggccagaggctgctgtggacccagtag

SEQ ID NO: 174852 - DNA, 555 bp, synthetic construct
  misc_feature 1..555: note = Description of Artificial Sequence: Synthetic coding sequence
  source 1..555: mol_type = other DNA
atgaggcggggccccaggagcctgcggggcagagatgccccagcccccaccccctgtgtgcctgcagaatgttttgacctgctggtgcgccactgtgtggcctgtggcctgctgcggaccccccggcccaagccagctggggccagcagccctgcccccaggacagccctgcagccccaggagagcgtgggcgctggggccggggaggccgccctgcccctgcccggcctgctgtttggagccccagccctgctgggcctggccctggtgctggccctggtgctggtgggcctggtgtcctggaggcggcggcagaggcggctgcggggggccagcagcgctgaggccccagatggagacaaggatgcccctgagcccctggacaaggtgatcatcctgagccctggcatcagtgatgccacagccccagcctggcccccacctggagaggaccccggcaccaccccacctggccacagcgtgcctgtgcctgccacagagctgggcagcacagagctggtgaccaccaagacagctggccctgagcagcagtag

SEQ ID NO: 174853 - DNA, 852 bp, synthetic construct
  misc_feature 1..852: note = Description of Artificial Sequence: Synthetic coding sequence
  source 1..852: mol_type = other DNA
atggagcccccaggggactggggccccccaccctggaggagcacccccaagacagatgtgctgcggctggtgctgtacctgaccttcctgggcgccccctgctacgccccagccctgcccagctgcaaggaggatgagtaccctgtgggcagcgagtgctgccccaagtgcagccctggctacagagtgaaggaggcctgtggggagctgactggaacagtgtgtgagccctgccccccaggcacctacatcgcccacctgaatggcctgagcaagtgcctgcagtgccagatgtgtgaccctgccatgggcctgcgggccagcaggaactgcagcaggacagaaaatgctgtgtgtggctgcagccctggccacttctgcatcgtgcaggatggagaccactgtgccgcctgccgggcctatgccaccagcagccctggccagagggtgcagaagggcggcacagagagccaggacaccctgtgccagaactgccccccaggcaccttcagccccaacggcaccctggaggagtgccagcaccagaccaagtgctcctggctggtgaccaaggccggggccggcaccagcagcagccactgggtgtggtggttcctgagcggcagcctggtgattgtcatcgtgtgcagcacagtgggcctcatcatctgtgtgaagaggaggaagcccagaggagatgtggtgaaggtgattgtgtctgtgcagaggaagaggcaggaggccgagggggaggccaccgtgattgaggccctgcaggcccccccagatgtgaccaccgtggccgtggaggagaccatccccagcttcaccggccgcagccccaaccactag

SEQ ID NO: 174854 - DNA, 522 bp, synthetic construct
  misc_feature 1..522: note = Description of Artificial Sequence: Synthetic coding sequence
  source 1..522: mol_type = other DNA
atggagcccccaggggactggggccccccaccctggaggagcacccccaagacagatgtgctgcggctggtgctgtacctgaccttcctgggcgccccctgctacgccccagccctgcccagctgcaaggaggatgagtaccctgtgggcagcgagtgctgccccaagtgcagccctggctacagagtgaaggaggcctgtggggagctgactggaacagtgtgtgagccctgccccccaggcacctacatcgcccacctgaatggcctgagcaagtgcctgcagtgccagatgtgtgaccctgacatcggcagcccctgtgacctgcggggccggggccacctggaggccggggcccacctgagccctggccggcagaagggggagccagaccctgaggtggcctttgagagcctgtctgctgagccccacgcccggctgtccatggccagcgccccctgtggccaggccggcctgcacctgcgggacagagcagatggcaccccaggcggccgggcctag

SEQ ID NO: 174855 - DNA, 552 bp, synthetic construct
  misc_feature 1..552: note = Description of Artificial Sequence: Synthetic coding sequence
  source 1..552: mol_type = other DNA
atggagcccccaggggactggggccccccaccctggaggagcacccccaagacagatgtgctgcggctggtgctgtacctgaccttcctgggcgccccctgctacgccccagccctgcccagctgcaaggaggatgagtaccctgtgggcagcgagtgctgccccaagtgcagccctggctacagagtgaaggaggcctgtggggagctgactggaacagtgtgtgagccctgccccccaggcacctacatcgcccacctgaatggcctgagcaagtgcctgcagtgccagatgtgtgaccctgccatgggcctgcgggccagcaggaactgcagcaggacagaaaatgctgtgtgtggctgcagccctggccacttctgcatcgtgcaggatggagaccactgtgccgcctgccgggcctatgccaccagcagccctggccagagggtgcagaagggcggcacagagagccaggacaccctgtgccagaactgccccccaggcaccttcagccccaacggcaccctggaggagtgccagcaccagacctag

SEQ ID NO: 174856 - DNA, 696 bp, synthetic construct
  misc_feature 1..696: note = Description of Artificial Sequence: Synthetic coding sequence
  source 1..696: mol_type = other DNA
atggagcccccaggggactggggccccccaccctggaggagcacccccaagacagatgtgctgcggctggtgctgtacctgaccttcctgggcgccccctgctacgccccagccctgcccagctgcaaggaggatgagtaccctgtgggcagcgagtgctgccccaagtgcagccctggctacagagtgaaggaggcctgtggggagctgactggaacagtgtgtgagccctgccccccaggcacctacatcgcccacctgaatggcctgagcaagtgcctgcagtgccagatgtgtgaccctgccatgggcctgcgggccagcaggaactgcagcaggacagaaaatgctgtgtgtggctgcagccctggccacttctgcatcgtgcaggatggagaccactgtgccgcctgccgggcctatgccaccagcagccctggccagagggtgcagaagggcggcacagagagccaggacaccctgtgccagaactgccccccaggcaccttcagccccaacggcaccctggaggagtgccagcaccagaccaagtgctcctggctggtgaccaaggccggggccggcaccagcagcagccactgggtgtggtggttcctgagcggcagcctggtgattgtcatcgtgtgcagcacagtgggcctcatcatctgtgtgaagaggaggaagcccaggtag

SEQ ID NO: 174857 - DNA, 696 bp, synthetic construct; identical to SEQ ID NO: 174856
  misc_feature 1..696: note = Description of Artificial Sequence: Synthetic coding sequence
  source 1..696: mol_type = other DNA

SEQ ID NO: 174858 - DNA, 696 bp, synthetic construct; identical to SEQ ID NO: 174856
  misc_feature 1..696: note = Description of Artificial Sequence: Synthetic coding sequence
  source 1..696: mol_type = other DNA

SEQ ID NO: 174859 - DNA, 555 bp, synthetic construct
  misc_feature 1..555: note = Description of Artificial Sequence: Synthetic coding sequence
  source 1..555: mol_type = other DNA
atgctgcagatggccggccagtgcagccagaatgagtactttgacagcctgctgcacgcctgcatcccctgccagctgcgctgcagcagcaacaccccacccctgacctgccagcgctactgcaatgcctctgtgaccaacagcgtgaagggcaccaatgccatcctgtggacctgcctgggcctgagcctcatcatcagcctggccgtgtttgtgctgatgttcctgctgaggaagatcaacagcgagcccctgaaggatgagttcaagaacacaggcagcggcctgctgggcatggccaacatcgacctggagaagagcaggactggagatgagatcatcctgccccggggcctggagtacacagtggaggagtgcacctgtgaggactgcatcaagagcaagcccaaggtggacagcgaccactgcttccccctgcctgccatggaggagggcgccaccatcctggtgaccaccaagaccaatgactactgcaagagcctgcctgctgccctgagcgccacagaaattgagaagagcatcagcgccaggtag

SEQ ID NO: 174860 - DNA, 408 bp, synthetic construct
  misc_feature 1..408: note = Description of Artificial Sequence: Synthetic coding sequence
  source 1..408: mol_type = other DNA
atgctgcagatggccggccagtgcagccagaatgagtactttgacagcctgctgcacgcctgcatcccctgccagctgcgctgcagcagcaacaccccacccctgacctgccagcgctactgcaatgcccggagcggcctgctgggcatggccaacatcgacctggagaagagcaggactggagatgagatcatcctgccccggggcctggagtacacagtggaggagtgcacctgtgaggactgcatcaagagcaagcccaaggtggacagcgaccactgcttccccctgcctgccatggaggagggcgccaccatcctggtgaccaccaagaccaatgactactgcaagagcctgcctgctgccctgagcgccacagaaattgagaagagcatcagcgccaggtag

SEQ ID NO: 174861 - DNA, 417 bp, synthetic construct
  misc_feature 1..417: note = Description of Artificial Sequence: Synthetic coding sequence
  source 1..417: mol_type = other DNA
atggccggccagtgcagccagaatgagtactttgacagcctgctgcacgcctgcatcccctgccagctgcgctgcagcagcaacaccccacccctgacctgccagcgctactgcaatgcctctgtgaccaacagcgtgaagggcaccaatgccatcctgtggacctgcctgggcctgagcctcatcatcagcctggccgtgtttgtgctgatgttcctgctgaggaagatcaacagcgagcccctgaaggatgagttcaagaacacagagatggagagccgctctgtggcccaggccggcgtgcagtggagggacctgaacagcctgcagcccctgcccctgggcttcaagcagttcagccacctgagcctgctgagcaactgggactaccgcatccgcagccctggccatggatag

SEQ ID NO: 174862 - DNA, 768 bp, synthetic construct
  misc_feature 1..768: note = Description of Artificial Sequence: Synthetic coding sequence
  source 1..768: mol_type = other DNA
atggcccagcacggggccatgggcgccttccgggccctgtgtggcctggccctgctgtgtgccctgagcctgggccagaggcccactggaggccctggctgcggccctggccgcctgctgctgggcactggaacagatgcccgctgctgccgggtgcacaccacccgctgctgccgggactacccaggagaggagtgctgcagcgagtgggactgcatgtgtgtgcagcctgagttccactgtggggacccctgctgcaccacctgccgccaccacccctgccccccaggccagggcgtgcagagccagggcaagttctcctttggcttccagtgcatcgactgtgccagcggcaccttcagcggcggccacgagggccactgcaagccctggacagactgctgctggcgctgcagaagaagacccaagaccccagaggccgccagcagccccaggaagagcggggccagtgaccggcagaggcggcggggcggctgggagacctgtggctgtgagcccggccggcccccaggccccccaacagctgccagccccagccctggggccccccaggccgccggggccctgcggagcgccctgggccgggccctgctgccctggcagcagaagtgggtgcaggagggcggcagtgaccagaggcctggcccctgcagcagcgctgctgctgctggcccctgccggcgggagcgggagacccagagctggccacccagcagcctggccggcccagatggagtgggcagctag

SEQ ID NO: 174863 - DNA, 705 bp, synthetic construct
  misc_feature 1..705: note = Description of Artificial Sequence: Synthetic coding sequence
  source 1..705: mol_type = other DNA
atggcccagcacggggccatgggcgccttccgggccctgtgtggcctggccctgctgtgtgccctgagcctgggccagaggcccactggaggccctggctgcggccctggccgcctgctgctgggcactggaacagatgcccgctgctgccgggtgcacaccacccgctgctgccgggactacccaggagaggagtgctgcagcgagtgggactgcatgtgtgtgcagcctgagttccactgtggggacccctgctgcaccacctgccgccaccacccctgccccccaggccagggcgtgcagagccagggcaagttctcctttggcttccagtgcatcgactgtgccagcggcaccttcagcggcggccacgagggccactgcaagccctggacagactgcacccagtttggcttcctgactgtgtttcctggcaacaagacccacaatgctgtgtgtgtgcccggcagccccccagctgagcccctgggctggctgactgtggtgctgctggccgtggccgcctgtgtgctgctgctgaccagcgcccagctgggcctgcacatctggcagctgaggaagacccagctgctgctggaggtgccccccagcacagaagatgcccggagctgccagtttcctgaggaggagcggggggagaggtctgctgaggagaagggccgcctgggggacctgtgggtgtag

SEQ ID NO: 174864 - DNA, 726 bp, synthetic construct
  misc_feature 1..726: note = Description of Artificial Sequence: Synthetic coding sequence
  source 1..726: mol_type = other DNA
atggcccagcacggggccatgggcgccttccgggccctgtgtggcctggccctgctgtgtgccctgagcctgggccagaggcccactggaggccctggctgcggccctggccgcctgctgctgggcactggaacagatgcccgctgctgccgggtgcacaccacccgctgctgccgggactacccaggagaggagtgctgcagcgagtgggactgcatgtgtgtgcagcctgagttccactgtggggacccctgctgcaccacctgccgccaccacccctgccccccaggccagggcgtgcagagccagggcaagttctcctttggcttccagtgcatcgactgtgccagcggcaccttcagcggcggccacgagggccactgcaagccctggacagactgcacccagtttggcttcctgactgtgtttcctggcaacaagacccacaatgctgtgtgtgtgcccggcagccccccagctgagcccctgggctggctgactgtggtgctgctggccgtggccgcctgtgtgctgctgctgaccagcgcccagctgggcctgcacatctggcagctgcggagccagtgcatgtggccccgggagacccagctgctgctggaggtgccccccagcacagaagatgcccggagctgccagtttcctgaggaggagcggggggagaggtctgctgaggagaagggccgcctgggggacctgtgggtgtag

SEQ ID NO: 174865 - DNA, 834 bp, synthetic construct
  misc_feature 1..834: note = Description of Artificial Sequence: Synthetic coding sequence
  source 1..834: mol_type = other DNA
atgtgtgtgggcgcccggcggctgggccggggcccctgtgccgccctgctgctgctgggcctgggcctgagcacagtgacaggcctgcactgtgtgggggacacctaccccagcaatgaccgctgctgccatgaatgtagacctggaaatggcatggtgagccgctgcagccgcagccagaacacagtgtgccggccctgtggccctggcttctacaatgatgtggtgagcagcaagccctgcaagccctgcacctggtgcaacctgcggagcggcagcgagaggaagcagctgtgcacagccacccaggacacagtgtgccgctgcagagctggcacccagcccctggacagctacaagccaggagtggactgtgccccctgccccccaggccacttcagccctggggacaaccaggcctgcaagccctggaccaactgcaccctggccggcaagcacaccctgcagcctgccagcaacagcagtgatgccatctgtgaagatcgggaccccccagccacccagccccaggagacccagggccccccagcccggcccatcaccgtgcagcccacagaggcctggcccaggaccagccagggccccagcaccaggcctgtggaggtgcctgggggccgggctgtggccgccatcctgggcctgggcctggtgctgggcctgctgggccccctggccatcctgctggccctgtacctgctgcggcgggaccagaggctgcccccagatgcccacaagcccccaggcggcggcagcttccgcacccccatccaggaggagcaggctgatgcccacagcaccctggccaagatctag

SEQ ID NO: 174866 - DNA, 399 bp, synthetic construct
  misc_feature 1..399: note = Description of Artificial Sequence: Synthetic coding sequence
  source 1..399: mol_type = other DNA
tgaccaggggccccacccctgcccccaggggcccagacccggccccggccccggggcgtgggggagaccaccctggccatgtggccaggcctggccggcctgagccgcagcggcagcgagaggaagcagctgtgcacagccacccaggacacagtgtgccgctgcagagctggcacccagcccctggacagctacaagccaggagtggactgtgccccctgccccccaggccacttcagccctggggacaaccaggcctgcaagccctggaccaactgcaccctggccggcaagcacaccctgcagcctgccagcaacagcagtgatgccatctgtgaagatcgggaccccccagccacccagccccaggagacccagggccccccagcccggccctag

SEQ ID NO: 174867 - DNA, 423 bp, synthetic construct
  misc_feature 1..423: note = Description of Artificial Sequence: Synthetic coding sequence
  source 1..423: mol_type = other DNA
atgagggccctggagggccctggcctgagcctgctgtgcctggtgctggccctgcctgccctgctgcctgtgcctgctgtgcggggcgtggccgagacccccacctacccctggagagatgctgagactggagagcggctggtgtgtgcccagtgccccccaggcacctttgtgcagaggccctgcagaagagacagccccaccacctgtggcccctgcccccccaggcactacacccagttctggaactacctggagcgctgccgctactgcaatgtgctgtgtggggagcgggaggaggaggcccgggcctgccacgccacccacaacagagcctgctgcggctgctgccgccgctgtgcctggccaggctgccccggctggagcggggcctctgtgtctgccagcagcctgtgcacctag

SEQ ID NO: 174868 - DNA, 903 bp, synthetic construct
  misc_feature 1..903: note = Description of Artificial Sequence: Synthetic coding sequence
  source 1..903: mol_type = other DNA
atgagggccctggagggccctggcctgagcctgctgtgcctggtgctggccctgcctgccctgctgcctgtgcctgctgtgcggggcgtggccgagacccccacctacccctggagagatgctgagactggagagcggctggtgtgtgcccagtgccccccaggcacctttgtgcagaggccctgcagaagagacagccccaccacctgtggcccctgcccccccaggcactacacccagttctggaactacctggagcgctgccgctactgcaatgtgctgtgtggggagcgggaggaggaggcccgggcctgccacgccacccacaacagagcctgccgctgcaggacaggcttctttgcccatgctggcttctgcctggagcacgccagctgccccccaggggccggcgtgattgcccctggcacccccagccagaacacccagtgccagccctgccccccaggcaccttcagcgccagcagcagcagcagcgagcagtgccagccccacaggaactgcacagccctgggcctggccctgaatgtgcccggcagcagcagccatgacaccctgtgcaccagctgcaccggcttccccctgagcaccagggtgcctggagctgaggagtgtgagcgggccgtcatcgactttgtggccttccaggacatcagcatcaagaggctgcagaggctgctgcaggccctggaggcccctgagggctggggccccaccccccgggccggccgggccgccctgcagctgaagctgcggcggcggctgacagagctgctgggcgcccaggatggagccctgctggtgcggctgctgcaggccctgcgggtggccaggatgcctggcctggagaggtctgtgcgggagcgcttcctgcctgtgcactag

SEQ ID NO: 174869 - DNA, 903 bp, synthetic construct; identical to SEQ ID NO: 174868
  misc_feature 1..903: note = Description of Artificial Sequence: Synthetic coding sequence
  source 1..903: mol_type = other DNA

SEQ ID NO: 174870 - DNA, 1788 bp, synthetic construct
  misc_feature 1..1788: note = Description of Artificial Sequence: Synthetic coding sequence
  source 1..1788: mol_type = other DNA
atgagggtgctgctggccgccctgggcctgctcttcctgggcgccctgcgggccttcccccaggaccggccctttgaggacacctgccacggcaaccccagccactactatgacaaggctgtgcggcgctgctgctaccgctgccccatgggcctcttccccacccagcagtgcccccagaggcccacagactgcaggaagcagtgtgagccagactactacctggatgaggccgaccgctgcacagcctgtgtgacctgcagcagagatgacctggtggagaagaccccctgtgcctggaacagcagccgggtgtgtgaatgtcggcccggcatgttctgcagcaccagcgctgtgaacagctgtgcccgctgcttcttccacagcgtgtgcccagctggcatgattgtgaagtttcctggaacagcccagaagaacacagtgtgtgagcccgccagccctggggtgtccccagcctgtgccagccctgagaactgcaaggagcccagcagcggcaccatcccccaggccaagcccacccctgtgtccccagccaccagcagcgccagcaccatgcctgtgcggggcggcacccggctggcccaggaggccgccagcaagctgacccgggccccagacagccccagctctgtgggccggcccagcagtgaccccggcctgagccccacccagccctgcccagagggcagcggggactgcaggaagcagtgtgagccagactactacctggatgaagctggccgctgcacagcctgtgtgtcctgcagcagagatgacctggtggagaagaccccctgtgcctggaacagcagcaggacctgtgagtgcaggcctggcatgatctgtgccaccagcgccaccaacagccgggcccgctgtgtgccctaccccatctgtgccgctgagaccgtgaccaagccccaggacatggccgagaaggacaccacctttgaggccccacccctgggcacccagcctgactgcaaccccaccccagaaaatggagaggccccagccagcaccagccccacccagagcctgctggtggacagccaggccagcaagaccctgcccatccccaccagcgcccctgtggccctgagcagcacaggcaagcctgtgctggatgctggccctgtgctcttctgggtgatcctggtgctggtggtggtggtgggcagcagcgccttcctgctgtgccacagaagagcctgcaggaagaggatccggcagaagctgcacctgtgctaccctgtgcagaccagccagcccaagctggagctggtggacagccggcccaggaggagcagcacccagctgcggagcggggcctctgtgacagagcctgtggccgaggagcggggcctgatgagccagcccctgatggagacctgccacagcgtgggcgccgcctacctggagagcctgcccctgcaggatgccagccctgctgggggccccagcagcccccgggacctgcctgagccccgggtgtccacagagcacaccaacaacaagattgagaagatctacatcatgaaggctgacaccgtcatcgtgggcaccgtgaaggccgagctgcctgagggccggggcctggccggccctgctgagcctgagctggaggaggagctggaggccgaccacaccccccactacccagagcaggagacagagccccccctgggcagctgcagtgatgtgatgctgtctgtggaggaggagggcaaggaggaccccctgcccacagctgccagcggcaagtag

SEQ ID NO: 174871 - DNA, 399 bp, synthetic construct
  misc_feature 1..399: note = Description of Artificial Sequence: Synthetic coding sequence
  source 1..399: mol_type = other DNA
atgagccagcccctgatggagacctgccacagcgtgggcgccgcctacctggagagcctgcccctgcaggatgccagccctgctgggggccccagcagcccccgggacctgcctgagccccgggtgtccacagagcacaccaacaacaagattgagaagatctacatcatgaaggctgacacagtgattgtgggcaccgtgaaggccgagctgcctgagggccggggcctggccggccctgctgagcctgagctggaggaggagctggaggccgaccacaccccccactacccagagcaggagacagagccccccctgggcagctgcagtgatgtgatgctgtctgtggaggaggagggcaaggaggaccccctgcccacagctgccagcggcaagtag

SEQ ID NO: 174872 - DNA, 1452 bp, synthetic construct
  misc_feature 1..1452: note = Description of Artificial Sequence: Synthetic coding sequence
  source 1..1452: mol_type = other DNA
atgttctgcagcaccagcgctgtgaacagctgtgcccgctgcttcttccacagcgtgtgcccagctggcatgattgtgaagtttcctggaacagcccagaagaacacagtgtgtgagcccgccagccctggggtgtccccagcctgtgccagccctgagaactgcaaggagcccagcagcggcaccatcccccaggccaagcccacccctgtgtccccagccaccagcagcgccagcaccatgcctgtgcggggcggcacccggctggcccaggaggccgccagcaagctgacccgggccccagacagccccagctctgtgggccggcccagcagtgaccccggcctgagccccacccagccctgcccagagggcagcggggactgcaggaagcagtgtgagccagactactacctggatgaggccggccgctgcacagcctgtgtgtcctgcagcagagatgacctggtggagaagaccccctgtgcctggaacagcagcaggacctgtgaatgtcggcccggcatgatctgtgccaccagcgccaccaacagccgggcccgctgtgtgccctaccccatctgtgccgctgagaccgtgaccaagccccaggacatggccgagaaggacaccacctttgaggccccacccctgggcacccagcctgactgcaaccccaccccagaaaatggagaggccccagccagcaccagccccacccagagcctgctggtggacagccaggccagcaagaccctgcccatccccaccagcgcccctgtggccctgagcagcacaggcaagcctgtgctggatgctggccctgtgctcttctgggtgatcctggtgctggtggtggtggtgggcagcagcgccttcctgctgtgccaccggcgggcctgcaggaagaggatccggcagaagctgcacctgtgctaccctgtgcagaccagccagcccaagctggagctggtggacagccggccccggcgcagcagcaccctgcggagcggggcctctgtgacagagcctgtggccgaggagcggggcctgatgagccagcccctgatggagacctgccacagcgtgggcgccgcctacctggagagcctgcccctgcaggatgccagccctgctgggggccccagcagcccccgggacctgcctgagccccgggtgtccacagagcacaccaacaacaagattgagaagatctacatcatgaaggctgacaccgtcatcgtgggcaccgtgaaggccgagctgcctgagggccggggcctggccggccctgctgagcctgagctggaggaggagctggaggccgaccacaccccccactacccagagcaggagacagagccccccctgggcagctgcagtgatgtgatgctgtctgtggaggaggagggcaaggaggaccccctgcccacagctgccagcggcaagtag

SEQ ID NO: 174873 - DNA, 1437 bp, synthetic construct
  misc_feature 1..1437: note = Description of Artificial Sequence: Synthetic coding sequence
  source 1..1437: mol_type = other DNA
atggcccccctgcggcccctgctgatcctggccctgctggcctgggtggccctggccgaccaggagagctgcaagggccgctgcacagagggcttcaacgtggacaagaagtgccagtgtgatgagctgtgcagctactaccagagctgctgcacagactacacagctgagtgcaagccccaggtgaccagaggagatgtgttcaccatgccagaagatgagtacacagtgtatgatgatggagaggagaagaacaatgccaccgtgcatgagcaggtgggcggccccagcctgaccagtgacctgcaggcccagagcaaaggaaatcctgagcagacccctgtgctgaagccagaggaggaggccccagcccctgaggtgggcgccagcaagccagagggcatcgacagcaggcctgagaccctgcaccctggccggccccagcccccagctgaggaggagctgtgcagcggcaagccctttgatgccttcacagacctgaagaatggcagcctgtttgccttccggggccagtactgctatgagctggatgagaaggctgtgcggcccggctaccccaagctgatcagagatgtgtggggcatcgagggccccattgatgctgccttcacccgcatcaactgccagggcaagacctacctgttcaagggcagccagtactggaggtttgaagatggagtgctggaccctgactaccccaggaacatcagtgatggctttgatggcatcccagacaacgtggatgctgccctggccctgcctgcccacagctacagcggccgggagcgggtgtacttcttcaagggcaagcagtactgggagtaccagttccagcaccagcccagccaggaggagtgtgagggcagcagcctgtctgctgtgtttgagcactttgccatgatgcagagggacagctgggaggacatctttgagctgctcttctggggccgcaccagcgctggcacccggcagccccagttcatcagccgggactggcacggcgtgcccggccaggtggatgctgccatggccggccgcatctacatcagcggcatggccccccggcccagcctggccaagaagcagcgcttccgccacaggaacaggaagggctaccgcagccagaggggccacagccggggcaggaaccagaacagccggcggcccagccgggccacctggctgagcctcttcagcagcgaggagagcaacctgggcgccaacaactatgatgactacaggatggactggctggtgcctgccacctgtgagcccatccagagcgtcttcttcttcagcggggacaagtactacagagtgaacctgcggacccggcgggtggacacagtggaccccccctaccccaggagcatcgcccagtactggctgggctgcccagcccctggccacctgtag

SEQ ID NO: 174874 - DNA, 639 bp, synthetic construct
  misc_feature 1..639: note = Description of Artificial Sequence: Synthetic coding sequence
  source 1..639: mol_type = other DNA
atggccgaggccaagtactacctgatccagggcctggtgaacatgtgccagagcgccctgcaggacaagaaggacagctaccagcctgtgtgcaacatccccatcatcaccagcctgaaggaggaggagcggctcatcgagagcagcaccaagcctgtggtgaagctgctgtacaacagaagcaacaacaagtacagctacaccagcaacagtgatgaccacctgctgaagaacatcgagctgtttgacaagctgagcctgcgcttcaacggccgggtgctcttcatcaaggatgtgattggagatgagatctgctgctggagcttctacggccagggcaggaagctggccgaggtgtgctgcaccagcatcgtgtatgccacagagaagaagcagaccaaggtggagttccctgaggcccgcatctatgaggagaccctgaatgtgctgctgtatgagaccccccgggtgcctgacaacagcctgctggaggccaccagccgcagccgcagccaggccagccccagtgaagatgaggagacctttgagctgcgggacagagtgcggcgcatccacgtgaagcgctacagcacctatgatgaccggcagctgggccaccagagcacccaccgggactag

SEQ ID NO: 174875 - DNA, 1965 bp, synthetic construct
  misc_feature 1..1965: note = Description of Artificial Sequence: Synthetic coding sequence
  source 1..1965: mol_type = other DNA
atgtctgaggccagcagcgaggacctggtgccccccctggaggccggggccgccccctaccgggaggaggaggaggccgccaagaagaagaaggagaagaagaagaagagcaagggcctggccaacgtgttctgtgtgttcaccaagggcaagaagaagaagggccagcccagcagcgctgagccagaagatgctgctggcagccggcagggcctggatggccccccacccaccgtggaggagctgaaggccgccctggagcggggccagctggaggccgcccggcccctgctggccctggagcgggagctggccgctgctgctgctgctgggggcgtgtctgaggaggagctggtgcggcggcagagcaaggtggaggccctgtatgagctgctgcgggaccaggtgctgggcgtgctgcggcggcccctggaggcccctcctgagcggctgcggcaggccctggccgtggtggccgagcaggagcgggaggaccggcaggccgctgctgctggccctggcaccagcggcctggccgccacccggccccggcgctggctgcagctgtggaggagaggagtggccgaggccgctgaggagaggatgggccagaggcctgctgctggagctgaggtgcctgagagcgtcttcctgcacctgggccgcaccatgaaggaggacctggaggccgtggtggagcggctgaagcccctcttccctgctgagtttggagtggtggccgcctatgcagagagctaccaccagcactttgctgcccacctggccgctgtggcccagtttgagctgtgtgagcgggacacctacatgctgctgctgtgggtgcagaacctgtacccaaatgacatcatcaacagccccaagctggtgggggagctgcagggcatgggcctgggcagcctgctgcccccccggcagatccggctgctggaggccaccttcctgagcagcgaggccgccaacgtgcgggagctgatggaccgggccctggagctggaggcccggcgctgggccgaggatgtgcccccccagaggctggatggccactgccacagcgagctggccatcgacatcatccagatcaccagccaggcccaggccaaggccgagagcatcaccctggacctgggcagccagatcaagagggtgctgctggtggagctgcctgccttcctgcggagctaccagagggccttcaatgagttcctggagcggggcaagcagctgaccaactaccgggccaacgtgattgccaacatcaacaactgcctgtccttcaggatgtccatggagcagaactggcaggtgccccaggacaccctgagcctgctgctgggccccctgggggagctgaagagccacggctttgacaccctgctgcagaacctgcacgaggacctgaagcccctcttcaagcgcttcacccacacccgctgggccgcccctgtggagaccctggagaacatcatcgccaccgtggacacccggctgcctgagttcagcgagctgcagggctgcttccgggaggagctgatggaggccctgcacctgcacctggtgaaggagtacatcatccagctgagcaagggccgcctggtgctgaagacagctgagcagcagcagcagctggccggctacatcctggccaatgctgacaccatccagcacttctgcacccagcacggcagccctgccacctggctgcagcctgccctgcccaccctggccgagatcatccggctgcaggaccccagcgccatcaagattgaggtggccacctacgccacctgctacccagacttcagcaagggccacctgagcgccatcctggccatcaagggcaacctgagcaacagcgaggtgaagaggatccgcagcatcctggatgtgtccatgggcgcccaggagcccagccggcccctcttcagcctcatcaaggtgggctag

SEQ ID NO: 174876 - DNA, 972 bp, synthetic construct
  misc_feature 1..972: note = Description of Artificial Sequence: Synthetic coding sequence
  source 1..972: mol_type = other DNA
atggaccgggccctggagctggaggcccggcgctgggccgaggatgtgcccccccagaggctggatggccactgccacagcgagctggccatcgacatcatccagatcaccagccaggcccaggccaaggccgagagcatcaccctggacctgggcagccagatcaagagggtgctgctggtggagctgcctgccttcctgcggagctaccagagggccttcaatgagttcctggagcggggcaagcagctgaccaactaccgggccaacgtcatcgccaacatcaacaactgcctgtccttcaggatgtccatggagcagaactggcaggtgccccaggacaccctgagcctgctgctgggccccctgggggagctgaagagccacggctttgacaccctgctgcagaacctgcacgaggacctgaagcccctcttcaagcgcttcacccacacccgctgggccgcccctgtggagaccctggagaacatcatcgccaccgtggacacccggctgcctgagttcagcgagctgcagggctgcttccgggaggagctgatggaggccctgcacctgcacctggtgaaggagtacatcatccagctgagcaagggccgcctggtgctgaagacagctgagcagcagcagcagctggccggctacatcctggccaatgctgacaccatccagcacttctgcacccagcacggcagccctgccacctggctgcagcctgccctgcccaccctggccgagatcatccggctgcaggaccccagcgccatcaagattgaggtggccacctacgccacctgctacccagacttcagcaagggccacctgagcgccatcctggccatcaagggcaacctgagcaacagcgaggtgaagaggatccgcagcatcctggatgtgtccatgggcgcccaggagcccagccggcccctcttcagcctcatcaaggtgggctag

SEQ ID NO: 174877 - DNA, 600 bp, synthetic construct
  misc_feature 1..600: note = Description of Artificial Sequence: Synthetic coding sequence
  source 1..600: mol_type = other DNA
atggaggccctgcacctgcacctggtgaaggagtacatcatccagctgagcaagggccgcctggtgctgaagacagctgagcagcagcagcagctggccggctacatcctggccaatgctgacaccatccagcacttctgcacccagcacggcagccctgccacctggctgcagcctgccctgcccaccctggccgagatcatccggctgcaggaccccagcgccatcaagattgaggtggccacctacgccacctgctacccagacttcagcaagggccacctgagcgccatcctggccatcaagggcaacctgagcaacagcgaggtgaagaggatccgcagcatcctggatgtgtccatgggcgcccaggagcccagccggcccctcttcagcctcatcaagcccagggctgctgtgtctggcatccagcagtggtggaatggccggcagaactggaagaggaagaaggagaagatgagcagccggctggccggggccttccgggtgctgtggagggctgtgtccacagccagcatcagaagacacatccaggtggccccccggcccctgcaggccggccctgccatgggcccctag

SEQ ID NO: 174878 - DNA, 120 bp, synthetic construct
  misc_feature 1..120: note = Description of Artificial Sequence: Synthetic coding sequence
  source 1..120: mol_type = other DNA
atgtctgaggccagcagcgaggacctggtgccccccctggaggccggggccgccccctaccgggaggaggaggaggccgccaagaagaagaaggagaagaagaagaagagcaagggctag

SEQ ID NO: 174879 - DNA, 1965 bp, synthetic construct; identical to SEQ ID NO: 174875
  misc_feature 1..1965: note = Description of Artificial Sequence: Synthetic coding sequence
  source 1..1965: mol_type = other DNA

SEQ ID NO: 174880 - DNA, 2373 bp, synthetic construct
  misc_feature 1..2373: note = Description of Artificial Sequence: Synthetic coding sequence
  source 1..2373: mol_type = other DNA
atggccgagcaggtgctgccccaggccctgtacctgagcaacatgaggaaggctgtgaagatccgggagaggaccccagaggacatcttcaagcccaccaacggcatcatccaccacttcaagaccatgcaccgctacaccctggagatgttccgcacctgccagttctgcccccagttccgggagatcatccacaaggccctgattgacaggaacatccaggccaccctggagagccagaagaagctgaactggtgccgggaggtgaggaagctggtggccctgaagaccaatggagatggcaactgcctgatgcacgccaccagccagtacatgtggggcgtgcaggacacagacctggtgctgaggaaggccctcttcagcaccctgaaggagacagacaccaggaacttcaagttccgctggcagctggagagcctgaagagccaggagtttgtggagaccggcctgtgctatgacaccaggaactggaatgatgagtgggacaacctgatcaagatggccagcacagacacccccatggcccggagcggcctgcagtacaacagcctggaggagatccacatctttgtgctgtgcaacatcctgcggcggcccatcatcgtcatcagtgacaagatgctgcggagcctggagagcggcagcaactttgcccccctgaaggtgggcggcatctacctgcccctgcactggccagcccaggagtgctaccgctaccccatcgtgctgggctatgacagccaccactttgtgcccctggtgaccctgaaggacagcggccctgagatccgggctgtgcccctggtgaacagagaccggggccgctttgaggacctgaaggtgcacttcctgacagatcctgaaaatgagatgaaggagaagctgctgaaggagtacctgatggtgattgagatccctgtgcagggctgggaccacggcaccacccacctgatcaatgctgccaagctggatgaggccaacctgcccaaggagatcaacctggtggatgactactttgagctggtgcagcacgagtacaagaagtggcaggagaacagcgagcagggccggcgggagggccacgcccagaaccccatggagcccagcgtgccccagctgagcctgatggatgtgaagtgtgagacccccaactgccccttcttcatgtctgtgaacacccagcccctgtgccacgagtgcagcgagcggcggcagaagaaccagaacaagctgcccaagctgaacagcaagccaggccctgagggcctgcccggcatggccctgggcgccagcagaggagaggcctatgagcccctggcctggaaccctgaggagagcactggaggcccccacagcgccccacccacagcccccagccccttcctgttcagcgagaccacagccatgaagtgccgcagccctggctgccccttcaccctgaatgtgcagcacaacggcttctgtgagcgctgccacaatgcccggcagctgcacgccagccacgccccagaccacaccaggcacctggaccccgggaagtgccaggcctgcctgcaggatgtgaccaggaccttcaacggcatctgcagcacctgcttcaagaggaccacagctgaggccagcagcagcctgagcaccagcctgccccccagctgccaccagaggagcaagagtgaccccagccggctggtgcgcagccccagcccccacagctgccacagagctggaaatgatgccccagctggctgcctgagccaggccgcccggacccctggggacagaacaggcaccagcaagtgcaggaaggccggctgtgtgtacttcggcaccccagaaaataaaggcttctgcaccctgtgcttcatcgagtaccgggagaacaagcactttgctgctgccagcggcaaggtgagccccacagccagccgcttccagaacaccatcccctgcctgggcagagaatgtggcaccctgggcagcaccatgtttgagggctactgccagaagtgcttcatcgaggcccagaaccagcgcttccacgaggccaagaggacagaggagcagctgcggagcagccagaggagagatgtgcccaggaccacccagagcaccagccggcccaagtgtgcccgggccagctgcaagaacatcctggcctgccgctctgaggagctgtgcatggagtgccagcaccccaaccagaggatgggccctggggcccacagaggagagcccgccccagaagatcctcccaagcagcgctgccgggccccagcctgtgaccactttggaaatgccaagtgcaatggctactgcaatgaatgcttccagttcaagcagatgtatggatag

SEQ ID NO: 174881 - DNA, 489 bp, synthetic construct
  misc_feature 1..489: note = Description of Artificial Sequence: Synthetic coding sequence
  source 1..489: mol_type = other DNA
atggccgagcaggtgctgccccaggccctgtacctgagcaacatgaggaaggctgtgaagatccgggagaggaccccagaggacatcttcaagcccaccaacggcatcatccaccacttcaagaccatgcaccgctacaccctggagatgttccgcacctgccagttctgcccccagttccgggagatcatccacaaggccctgattgacaggaacatccaggccaccctggagagccagaagaagctgaactggtgccgggaggtgaggaagctggtggccctgaagaccaatggagatggcaactgcctgatgcacgccaccagccagtacatgtggggcgtgcaggacacagacctggtgctgaggaaggccctcttcagcaccctgaaggagacagacaccaggaacttcaagttccgctggcagctggagagcctgaagagccaggagtttgtggagaccggcctgtgctatgacaccaggtag

SEQ ID NO: 174882 - DNA, 81 bp, synthetic construct
  misc_feature 1..81: note = Description of Artificial Sequence: Synthetic coding sequence
  source 1..81: mol_type = other DNA
atggccgagcaggtgctgccccaggccctgtacctgagcaacatgaggaaggctgtgaagatccgggagaggaccccctag

SEQ ID NO: 174883 - DNA, 297 bp, synthetic construct
  misc_feature 1..297: note = Description of Artificial Sequence: Synthetic coding sequence
  source 1..297: mol_type = other DNA
atggccgagcaggtgctgccccaggccctgtacctgagcaacatgaggaaggctgtgaagatccgggagaggaccccagaggacatcttcaagcccaccaacggcatcatccaccacttcaagaccatgcaccgctacaccctggagatgttccgcacctgccagttctgcccccagttccgggagatcatccacaaggccctgattgacaggaacatccaggccaccctggagagccagaagaagctgaactggtgccgggaggtgaggaagctggtggccctgaagaccaactag

SEQ ID NO: 174884 - DNA, 813 bp, synthetic construct
  misc_feature 1..813: note = Description of Artificial Sequence: Synthetic coding sequence
  source 1..813: mol_type = other DNA
atggccgagcaggtgctgccccaggccctgtacctgagcaacatgaggaaggctgtgaagatccgggagaggaccccagaggacatcttcaagcccaccaacggcatcatccaccacttcaagaccatgcaccgctacaccctggagatgttccgcacctgccagttctgcccccagttccgggagatcatccacaaggccctgattgacaggaacatccaggccaccctggagagccagaagaagctgaactggtgccgggaggtgaggaagctggtggccctgaagaccaatggagatggcaactgcctgatgcacgccaccagccagtacatgtggggcgtgcaggacacagacctggtgctgaggaaggccctcttcagcaccctgaaggagacagacaccaggaacttcaagttccgctggcagctggagagcctgaagagccaggagtttgtggagaccggcctgtgctatgacaccaggaactggaatgatgagtgggacaacctgatcaagatggccagcacagacacccccatggcccggagcggcctgcagtacaacagcctggaggagatccacatctttgtgctgtgcaacatcctgcggcggcccatcatcgtcatcagtgacaagatgctgcggagcctggagagcggcagcaactttgcccccctgaaggtgggcggcatctacctgcccctgcactggccagcccaggagtgctaccgctaccccatcgtgctgggctatgacagccaccactttgtgcccctggtgaccctgaaggacagcggccctgacatctag

SEQ ID NO: 174885 - DNA, 2250 bp, synthetic construct
  misc_feature 1..2250: note = Description of Artificial Sequence: Synthetic coding sequence
  source 1..2250: mol_type = other DNA
atggccgagcaggtgctgccccaggccctgtacctgagcaacatgaggaaggctgtgaagatccgggagaggaccccagaggacatcttcaagcccaccaacggcatcatccaccacttcaagaccatgcaccgctacaccctggagatgttccgcacctgccagttctgcccccagttccgggagatcatccacaaggccctgattgacaggaacatccaggccaccctggagagccagaagaagctgaactggtgccgggaggtgaggaagctggtggccctgaagaccaatggagatggcaactgcctgatgcacgccaccagccagtacatgtggggcgtgcaggacacagacctggtgctgaggaaggccctcttcagcaccctgaaggagacagacaccaggaacttcaagttccgctggcagctggagagcctgaagagccaggagtttgtggagaccggcctgtgctatgacaccaggaactggaatgatgagtgggacaacctgatcaagatggccagcacagacacccccatggcccggagcggcctgcagtacaacagcctggaggagatccacatctttgtgctgtgcaacatcctgcggcggcccatcatcgtcatcagtgacaagatgctgcggagcctggagagcggcagcaactttgcccccctgaaggtgggcggcatctacctgcccctgcactggccagcccaggagtgctaccgctaccccatcgtgctgggctatgacagccaccactttgtgcccctggtgaccctgaaggacagcggccctgagatccgggctgtgcccctggtgaacagagaccggggccgctttgaggacctgaaggtgcacttcctgacagatcctgaaaatgagatgaaggagaagctgctgaaggagtacctgatggtgattgagatccctgtgcagggctgggaccacggcaccacccacctgatcaatgctgccaagctggatgaggccaacctgcccaaggagatcaacctggtggatgactactttgagctggtgcagcacgagtacaagaagtggcaggagaacagcgagcagggccggcgggagggccacgcccagaaccccatggagcccagcgtgccccagctgagcctgatggatgtgaagtgtgagacccccaactgccccttcttcatgtctgtgaacacccagcccctgtgccacgagtgcagcgagcggcggcagaagaaccagaacaagctgcccaagctgaacagcaagccaggccctgagggcctgcccggcatggccctgggcgccagcagaggagaggcctatgagcccctggcctggaaccctgaggagagcactggaggcccccacagcgccccacccacagcccccagccccttcctgttcagcgagaccacagccatgaagtgccgcagccctggctgccccttcaccctgaatgtgcagcacaacggcttctgtgagcgctgccacaatgcccggcagctgcacgccagccacgccccagaccacaccaggcacctggaccccgggaagtgccaggcctgcctgcaggatgtgaccaggaccttcaacggcatctgcagcacctgcttcaagaggaccacagctgaggccagcagcagcctgagcaccagcctgccccccagctgccaccagaggagcaagagtgaccccagccggctggtgcgcagccccagcccccacagctgccacagagctggaaatgatgccccagctggctgcctgagccaggccgcccggacccctggggacagaacaggcaccagcaagtgcaggaaggccggctgtgtgtacttcggcaccccagaaaataaaggcttctgcaccctgtgcttcatcgagtaccgggagaacaagcactttgctgctgccagcggcaaggtgagccccacagccagccgcttccagaacaccatcccctgcctgggcagagaatgtggcaccctgggcagcaccatgtttgagggctactgccagaagtgcttcatcgaggcccagaaccagcgcttccacgaggccaagaggacagaggagcagctgcggagcagccagaggagagatgtgcccaggaccacccagagcaccagccggcccaagtgtgcccgggccagctgcaagaacatcctggcctgccgctctgaggagctgtgcatggagtgccagcaccagccagaagatggcccctggggccccccaggatag

SEQ ID NO: 174886 - DNA, 459 bp, synthetic construct
  misc_feature 1..459: note = Description of Artificial Sequence: Synthetic coding sequence
  source 1..459: mol_type = other DNA
atggccgagcaggtgctgccccaggccctgtacctgagcaacatgaggaaggctgtgaagatccgggagaggaccccagaggacatcttcaagcccaccaacggcatcatccaccacttcaagaccatgcaccgctacaccctggagatgttccgcacctgccagttctgcccccagttccgggagatcatccacaaggccctgattgacaggaacatccaggccaccctggagagccagaagaagctgaactggtgccgggaggtgaggaagctggtggccctgaagaccaatggagatggcaactgcctgatgcacgccaccagccagtacatgtggggcgtgcaggacacagacctggtgctgaggaaggccctcttcagcaccctgaaggagacagacaccaggaacttcaagttccgctggcagctggagagccagatcagcggcatctgctag

SEQ ID NO: 174887 - DNA, 645 bp, synthetic construct
  misc_feature 1..645: note = Description of Artificial Sequence: Synthetic coding sequence
  source 1..645: mol_type = other DNA
atggccgagcaggtgctgccccaggccctgtacctgagcaacatgaggaaggctgtgaagatccgggagaggaccccagaggacatcttcaagcccaccaacggcatcatccaccacttcaagaccatgcaccgctacaccctggagatgttccgcacctgccagttctgcccccagttccgggagatcatccacaaggccctgattgacaggaacatccaggccaccctggagagccagaagaagctgaactggtgccgggaggtgaggaagctggtggccctgaagaccaatggagatggcaactgcctgatgcacgccaccagccagtacatgtggggcgtgcaggacacagacctggtgctgaggaaggccctcttcagcaccctgaaggagacagacaccaggaacttcaagttccgctggcagctggagagcctgaagagccaggagtttgtggagaccggcctgtgctatgacaccaggaactggaatgatgagtgggacaacctgatcaagtggctgccccagacccacccctggccagaggtggacttcagcaccacccactggaagaagtacacctacctgagctttgccaccagcagcgagggccagagcctgtccttccagaccaagtgctag

SEQ ID NO: 174888 - DNA, 2010 bp, synthetic construct
  misc_feature 1..2010: note = Description of Artificial Sequence: Synthetic coding sequence
  source 1..2010: mol_type = other DNA
atggccgagcaggtgctgccccaggccctgtacctgagcaacatgaggaaggctgtgaagatccgggagaggaccccagaggacatcttcaagcccaccaacggcatcatccaccacttcaagaccatgcaccgctacaccctggagatgttccgcacctgccagttctgcccccagttccgggagatcatccacaaggccctgattgacaggaacatccaggccaccctggagagccagaagaagctgaactggtgccgggaggtgaggaagctggtggccctgaagaccaatggagatggcaactgcctgatgcacgccaccagccagtacatgtggggcgtgcaggacacagacctggtgctgaggaaggccctcttcagcaccctgaaggagacagacaccaggaacttcaagttccgctggcagctggagagcctgaagagccaggagtttgtggagaccggcctgtgctatgacaccaggaactggaatgatgagtgggacaacctgatcaagatggccagcacagacacccccatggcccggagcggcctgcagtacaacagcctggaggagatccacatctttgtgctgtgcaacatcctgcggcggcccatcatcgtcatcagtgacaagatgctgcggagcctggagagcggcagcaactttgcccccctgaaggtgggcggcatctacctgcccctgcactggccagcccaggagtgctaccgctaccccatcgtgctgggctatgacagccaccactttgtgcccctggtgaccctgaaggacagcggccctgagatccgggctgtgcccctggtgaacagagaccggggccgctttgaggacctgaaggtgcacttcctgacagatcctgaaaatgagatgaaggagaagctgctgaaggagtacctgatggtgattgagatccctgtgcagggctgggaccacggcaccacccacctgatcaatgctgccaagctggatgaggccaacctgcccaaggagatcaacctggtggatgactactttgagctggtgcagcacgagtacaagaagtggcaggagaacagcgagcagggccggcgggagggccacgcccagaaccccatggagcccagcgtgccccagctgagcctgatggatgtgaagtgtgagacccccaactgccccttcttcatgtctgtgaacacccagcccctgtgccacgagtgcagcgagcggcggcagaagaaccagaacaagctgcccaagctgaacagcaagccaggccctgagggcctgcccggcatggccctgggcgccagcagaggagaggcctatgagcccctggcctggaaccctgaggagagcactggaggcccccacagcgccccacccacagcccccagccccttcctgttcagcgagaccacagccatgaagtgccgcagccctggctgccccttcaccctgaatgtgcagcacaacggcttctgtgagcgctgccacaatgcccggcagctgcacgccagccacgccccagaccacaccaggcacctggaccccgggaagtgccaggcctgcctgcaggatgtgaccaggaccttcaacggcatctgcagcacctgcttcaagaggaccacagctgaggccagcagcagcctgagcaccagcctgccccccagctgccaccagaggagcaagagtgaccccagccggctggtgcgcagccccagcccccacagctgccacagagctggaaatgatgccccagctggctgcctgagccaggccgcccggacccctggggacagaacaggcaccagcaagtgcaggaaggccggctgtgtgtacttcggcaccccagaaaataaaggcttctgcaccctcttccaccgggtgcagaggaagcagaccttctgctgctgcctgcgggagagccagagccacagcgtgcaggtgcctgagcaccacagcgtgcctggagagggcatgaggcacccctggaagcaccacgtgtag

SEQ ID NO: 174889 - DNA, 834 bp, synthetic construct
  misc_feature 1..834: note = Description of Artificial Sequence: Synthetic coding sequence
  source 1..834: mol_type = other DNA
atgatcatcctgatctacctgttcctgctgctgtgggaggacacccagggctggggcttcaaggatggcatcttccacaacagcatctggctggagagagctgctggggtgtaccaccgggaggcccggagcggcaagtacaagctgacctacgccgaggccaaggctgtgtgtgaatttgagggcggccacctggccacctacaagcagctggaggccgccaggaagattggcttccacgtgtgtgccgccggctggatggccaagggccgggtgggctaccccatcgtgaagccaggccccaactgtggctttgggaagacaggcatcattgattatggcatccggctgaacagaagtgagcgctgggatgcctactgctacaacccccacgccaaggaatgtggcggcgtcttcacagaccccaagcagatcttcaagagccctggcttccccaatgaatatgaggacaaccagatctgctactggcacatccggctgaagtatggccagaggatccacctgtccttcctggactttgacctggaggatgaccccggctgcctggccgactatgtggagatctatgacagctatgatgatgtgcacggctttgtgggccgctactgtggagatgagctgcctgatgacatcatcagcactggaaatgtgatgaccctgaagttcctgagtgatgcctctgtgacagctgggggcttccagatcaagtatgtggccatggaccctgtgtccaagagcagccagggcaagaacaccagcaccaccagcacaggcaacaagaacttcctggccggccgcttcagccacctgtag

SEQ ID NO: 174890 - DNA, 567 bp, synthetic construct
  misc_feature 1..567: note = Description of Artificial Sequence: Synthetic coding sequence
  source 1..567: mol_type = other DNA
atggccacagatgtgttcaacagcaagaacctggccgtgcaggcccagaagaagatcctgggcaagatggtgtccaagagcatcgccaccaccctgattgatgacaccagcagcgaggtgctggatgagctgtacagagtgacccgggagtacacccagaacaagaaggaggccgagaagatcatcaagaacctgatcaagacagtcatcaagctggccatcctgtacagaaacaaccagttcaaccaggatgagctggccctgatggagaagttcaagaagaaggtgcaccagctggccatgacagtggtgtccttccaccaggtggactacacctttgacagaaatgtgctgagccggctgctgaatgaatgtcgggagatgctgcaccagatcatccagaggcacctgacagccaagagccacggccgggtgaacaacgtgtttgaccacttcagtgactgtgagttcctggccgccctgtacaacccctttggaaacttcaagccccacctgcagaagctgtgtgatggcatcaacaagatgctggatgaggagaacatctag

SEQ ID NO: 174891 - DNA, 597 bp, synthetic construct
  misc_feature 1..597: note = Description of Artificial Sequence: Synthetic coding sequence
  source 1..597: mol_type = other DNA
atgcacagcgaggccgaggagagcaaggaggtggccacagatgtgttcaacagcaagaacctggccgtgcaggcccagaagaagatcctgggcaagatggtgtccaagagcatcgccaccaccctgattgatgacaccagcagcgaggtgctggatgagctgtacagagtgacccgggagtacacccagaacaagaaggaggccgagaagatcatcaagaacctgatcaagacagtcatcaagctggccatcctgtacagaaacaaccagttcaaccaggatgagctggccctgatggagaagttcaagaagaaggtgcaccagctggccatgacagtggtgtccttccaccaggtggactacacctttgacagaaatgtgctgagccggctgctgaatgaatgtcgggagatgctgcaccagatcatccagaggcacctgacagccaagagccacggccgggtgaacaacgtgtttgaccacttcagtgactgtgagttcctggccgccctgtacaacccctttggaaacttcaagccccacctgcagaagctgtgtgatggcatcaacaagatgctggatgaggagaacatctag

SEQ ID NO: 174892 - DNA, 597 bp, synthetic construct; identical to SEQ ID NO: 174891
  misc_feature 1..597: note = Description of Artificial Sequence: Synthetic coding sequence
  source 1..597: mol_type = other DNA

SEQ ID NO: 174893 - DNA, 555 bp, synthetic construct
  misc_feature 1..555: note = Description of Artificial Sequence: Synthetic coding sequence
  source 1..555: mol_type = other DNA
atggagagcttcagcagcaagagcctggccctgcaggccgagaagaagctgctgagcaagatggccggccgctctgtggcccacctgttcattgatgagaccagcagcgaggtgctggatgagctgtacagagtgtccaaggagtacacccacagccggccccaggcccagagggtcatcaaggacctgatcaaggtggccatcaaggtggccgtgctgcacagaaatggcagctttggccccagcgagctggccctggccacccgcttccggcagaagctgcggcagggcgccatgacagccctgagctttggagaggtggacttcacctttgaagctgctgtgctggccggcctgctgacagagtgcagagatgtgctgctggagctggtggagcaccacctgacccccaagagccacggccgcatcagacatgtgtttgaccacttcagtgaccccggcctgctgacagccctgtatggccctgacttcacccagcacctgggcaagatctgtgatggcctgaggaagctgctggatgagggcaagctgtag

SEQ ID NO: 174894 - DNA, 1296 bp, synthetic construct
  misc_feature 1..1296: note = Description of Artificial Sequence: Synthetic coding sequence
  source 1..1296: mol_type = other DNA
atgtaccgcaccaaggtgggcctgaaggaccggcagcagctgtacaagctgatcatcagccagctgctgtatgatggctacatcagcatcgccaacggcctcatcaatgagatcaagccccagagcgtgtgtgcccccagcgagcagctgctgcacctgatcaagctgggcatggagaatgatgacacagctgtgcagtatgccatcggccgcagtgacacagtggcccctggcactggaattgacctggagtttgatgctgatgtgcagaccatgagccctgaggcctctgaatatgagacctgctacgtgaccagccacaagggcccctgccgggtggccacctacagcagagatggccagctgattgccactggatctgcagatgccagcatcaagatcctggacacagagaggatgctggccaagagcgccatgcccatcgaggtgatgatgaatgaaacagcccagcagaacatggagaaccaccctgtgatccgcaccctgtatgaccacgtggatgaggtgacctgcctggccttccaccccacagagcagatcctggccagcggcagccgggactacaccctgaagctgtttgactacagcaagcccagcgccaagagggccttcaagtacatccaggaggccgagatgctgcggagcatctccttccaccccagcggggacttcatcctggtgggcacccagcaccccaccctgcggctgtatgacatcaacaccttccagtgctttgtgtcctgcaacccccaggaccagcacacagatgccatctgcagcgtgaactacaacagcagcgccaacatgtatgtgacaggcagcaaggatggctgcatcaagctgtgggatggagtgagcaaccgctgcatcaccacctttgagaaggcccatgatggagctgaggtgtgcagcgccatcttcagcaagaacagcaagtacatcctgagcagcggcaaggacagcgtggccaagctgtgggagatcagcactggaagaaccctggtgcgctacacaggagctggcctgagcggccggcaggtgcacaggacccaggccgtgttcaaccacacagaagattatgtgctgctgcctgatgagaggaccatcagcctgtgctgctgggacagcaggacagctgagaggaggaacctgctgagcctgggccacaacaacatcgtgcgctgcatcgtgcacagccccaccaaccctggcttcatgacctgcagtgatgacttccgggcccgcttctggtaccgccgcagcaccacagactag

SEQ ID NO: 174895 - DNA, 621 bp, synthetic construct
  misc_feature 1..621: note = Description of Artificial Sequence: Synthetic coding sequence
  source 1..621: mol_type = other DNA
atggattctgctggccaggacatcaacctgaacagccccaacaagggcctgctgagtgacagcatgacagatgtgcctgtggacacaggagtggccgcccggaccccagctgtggagggcctgacagaggccgaggaggaggagctgcgggcagagctgaccaaggtggaggaggagatcgtgaccctgcggcaggtgctggccgccaaggagcggcactgtggggagctgaagaggcggctgggcctgagcaccctgggggagctgaagcagaacctgagccgctcctggcatgatgtgcaggtgagcagcgcctacgtgaagaccagcgagaagctgggggagtggaatgagaaggtgacccagagcgacctgtacaagaagacccaggagaccctgagccaggccggccagaagaccagcgctgccctgagcacagtgggcagcgccatcagcaggaagctgggggacatgagaaattctgccaccttcaagagctttgaggacagagtgggcaccatcaagagcaaggtggtgggggacagagaaaatggaagtgacaacctgcccagcagcgctggcagcggggacaagcccctgagtgaccctgcccccttctag

SEQ ID NO: 174896 - DNA, 561 bp, synthetic construct
  misc_feature 1..561: note = Description of Artificial Sequence: Synthetic coding sequence
  source 1..561: mol_type = other DNA
atggattctgctggccaggacatcaacctgaacagccccaacaagggcctgctgagtgacagcatgacagatgtgcctgtggacacaggagtggccgcccggaccccagctgtggagggcctgacagaggccgaggaggaggagctgcgggcagagctgaccaaggtggaggaggagatcgtgaccctgcggcaggtgctggccgccaaggagcggcactgtggggagctgaagaggcggctgggcctgagcaccctgggggagctgaagcagaacctgagccgctcctggcatgatgtgcaggtgagcagcgcctacaagaagacccaggagaccctgagccaggccggccagaagaccagcgctgccctgagcacagtgggcagcgccatcagcaggaagctgggggacatgagaaattctgccaccttcaagagctttgaggacagagtgggcaccatcaagagcaaggtggtgggggacagagaaaatggaagtgacaacctgcccagcagcgctggcagcggggacaagcccctgagtgaccctgcccccttctag

SEQ ID NO: 174897 - DNA, 630 bp, synthetic construct
  misc_feature 1..630: note = Description of Artificial Sequence: Synthetic coding sequence
  source 1..630: mol_type = other DNA
atggattctgctggccaggacatcaacctgaacagccccaacaagggcctgctgagtgacagcatgacagatgtgcctgtggacacaggagtggccgcccggaccccagctgtggagggcctgacagaggccgaggaggaggagctgcgggcagagctgaccaaggtggaggaggagatcgtgaccctgcggcaggtgctggccgccaaggagcggcactgtggggagctgaagaggcggctgggcctgagcaccctgggggagctgaagcagaacctgagccgctcctggcatgatgtgcaggtgagcagcgcctacaagaagacccaggagaccctgagccaggccggccagaagaccagcgctgccctgagcacagtgggcagcgccatcagcaggaagctgggggacatgagggcccaccccttcagccacagcttcagcagctacagcatccgccacagcatctccatgcctgccatgaggaacagcgccaccttcaagagctttgaagatagagtgggcaccatcaagagcaaggtggtgggggaccgggagaatggaagtgacaacctgcccagcagcgctggcagcggggacaagcccctgagtgaccctgcccccttctag

SEQ ID NO: 174898 - DNA, 663 bp, synthetic construct
  misc_feature 1..663: note = Description of Artificial Sequence: Synthetic coding sequence
  source 1..663: mol_type = other DNA
atggattctgctggccaggacatcaacctgaacagccccaacaagggcctgctgagtgacagcatgacagatgtgcctgtggacacaggagtggccgcccggaccccagctgtggagggcctgacagaggccgaggaggaggagctgcgggcagagctgaccaaggtggaggaggagatcgtgaccctgcggcaggtgctggccgccaaggagcggcactgtggggagctgaagaggcggctgggcctgagcaccctgggggagctgaagcagaacctgagccgctcctggcatgatgtgcaggtgagcagcgcctacgtgaagaccagcgagaagctgggggagtggaatgagaaggtgacccagagcgacctgtacaagaagacccaggagaccctgagccaggccggccagaagaccagcgctgccctgagcacagtgggcagcgccatcagcaggaagctgggggacatgagcagctacagcatccgccacagcatctccatgcctgccatgagaaattctgccaccttcaagagctttgaggacagagtgggcaccatcaagagcaaggtggtgggggacagagaaaatggaagtgacaacctgcccagcagcgctggcagcggggacaagcccctgagtgaccctgcccccttctag

SEQ ID NO: 174899 - DNA, 603 bp, synthetic construct
  misc_feature 1..603: note = Description of Artificial Sequence: Synthetic coding sequence
  source 1..603: mol_type = other DNA
atggattctgctggccaggacatcaacctgaacagccccaacaagggcctgctgagtgacagcatgacagatgtgcctgtggacacaggagtggccgcccggaccccagctgtggagggcctgacagaggccgaggaggaggagctgcgggcagagctgaccaaggtggaggaggagatcgtgaccctgcggcaggtgctggccgccaaggagcggcactgtggggagctgaagaggcggctgggcctgagcaccctgggggagctgaagcagaacctgagccgctcctggcatgatgtgcaggtgagcagcgcctacaagaagacccaggagaccctgagccaggccggccagaagaccagcgctgccctgagcacagtgggcagcgccatcagcaggaagctgggggacatgagcagctacagcatccgccacagcatctccatgcctgccatgagaaattctgccaccttcaagagctttgaggacagagtgggcaccatcaagagcaaggtggtgggggacagagaaaatggaagtgacaacctgcccagcagcgctggcagcggggacaagcccctgagtgaccctgcccccttctag

SEQ ID NO: 174900 - DNA, 492 bp, synthetic construct
  misc_feature 1..492: note = Description of Artificial Sequence: Synthetic coding sequence
  source 1..492: mol_type = other DNA
atggattctgctggccagggcgtggccgcccggaccccagctgtggagggcctgacagaagctgaggaggaggagctgcgggcagagctgaccaaggtggaggaggagatcgtgaccctgcggcaggtgctggccgccaaggagcggcactgtggggagctgaagaggcggctgggcctgagcaccctgggggagctgaagcagaacctgagccgctcctggcatgatgtgcaggtgtcctctgcctacaagaagacccaggagaccctgagccaggccggccagaagaccagcgctgccctgagcacagtgggcagcgccatcagcaggaagctgggggacatgaggaacagcgccaccttcaagagctttgaagatagagtgggcaccatcaagagcaaggtggtgggggaccgggagaatggaagtgacaacctgcccagcagcgctggcagcggggacaagcccctgagtgaccctgcccccttctag

SEQ ID NO: 174901 - DNA, 3405 bp, synthetic construct
  misc_feature 1..3405: note = Description of Artificial Sequence: Synthetic coding sequence
  source 1..3405: mol_type = other DNA
atgagatttggcagcaagatgatgcccatgttcctgactgtgtacctgagcaacaatgagcagcacttcacagaggtgcctgtgaccccagagaccatctgcagagatgtggtggacctgtgcaaggagcccggggagagtgactgccacctggccgaggtgtggtgtggcagcgagaggcctgtggccgacaatgaaagaatgtttgatgtgctgcagagatttggcagccagagaaatgaggtgcgcttcttcctgcggcatgagaggcctcctggccgggacatcgtgtctggccccaggagccaggaccccagcctgaagagaaatggagtgaaggtgcctggagagtacagaagaaaagaaaatggagtgaacagccccaggatggacctgaccctggccgagctgcaggagatggccagccggcagcagcagcagatcgaggcccagcagcagctgctggccaccaaggagcagaggctgaagttcctgaagcagcaggaccagaggcagcagcagcaggtggccgagcaggagaagctgaagaggctgaaggagattgctgagaaccaggaggccaagctgaagaaggtgcgggccctgaagggccacgtggagcagaagaggctgagcaatggcaagctggtggaggagattgagcagatgaacaacctcttccagcagaagcagcgggagctggtgctggccgtgtccaaggtggaggagctgacccggcagctggagatgctgaagaatggaagaattgacagccaccacgacaaccagagcgctgtggccgagctggaccggctgtacaaggagctgcagctgaggaacaagctgaaccaggagcagaatgccaagctgcagcagcagagagaatgtctgaacaagaggaacagcgaggtggccgtgatggacaagagggtgaatgagctgcgggaccggctgtggaagaagaaggccgccctgcagcagaaggagaacctgcctgtgtccagtgatggcaacctgccccagcaggccgccagcgcccccagccgggtggccgctgtgggcccctacatccagagcagcaccatgcccaggatgcccagcaggcctgagctgctggtgaagccagccctgcctgatggcagcctggtgatccaggccagcgagggccccatgaagatccagaccctgcccaacatgaggtctggagctgccagccagaccaagggcagcaagatccaccctgtgggccctgactggagccccagcaatgctgacctcttccccagccagggcagcgcctctgtgccccagagcactggaaatgccctggaccaggtggatgatggagaggtgcccctgcgggagaaggagaagaaggtgcggcccttctccatgtttgatgctgtggaccagagcaatgcccctccttcctttggcaccctgaggaagaaccagagcagcgaggacatcctgagagatgcccaggtggccaacaagaatgtggccaaggtgcccccacctgtgcccaccaagcccaagcagatcaacctgccctacttcggccagaccaaccagccccccagcgacatcaagccagatggcagcagccagcagctgagcacagtggtgcccagcatgggcaccaagcccaagccagctggccagcagccccgggtgctgctgagccccagcatccccagcgtgggccaggaccagaccctgagccctggcagcaagcaggagagccccccagctgctgctgtgcggcccttcaccccccagcccagcaaggacaccctgctgccccccttcaggaagccccagacagtggccgccagcagcatctacagcatgtacacccagcagcaggcccctgggaagaacttccagcaggccgtgcagagcgccctgaccaagacccacacccggggcccccacttcagctctgtgtatggcaagcctgtgattgctgctgcccagaaccagcagcagcaccctgagaacatctacagcaacagccagggcaagccaggcagccctgagcctgagacagagcctgtgtcctctgtgcaggagaaccatgaaaatgaaagaatcccccggcccctgagccccaccaagctgctgcccttcctgagcaacccctacagaaaccagagtgatgctgacctggaggccctgaggaagaagctgagcaatgccccccggcccctgaagaagaggagcagcatcacagagcctgagggccccaacggccccaacatccagaagctgctgtaccagaggaccaccatcgccgccatggagaccatctctgtgcccagctaccccagcaagagcgcctctgtgacagccagcagcgagagccctgtggagatccagaacccctacctgcacgtggagcctgagaaggaggtggtgtccctggtgcctgagagcctgagcccagaagatgtgggcaatgccagcacagaaaattctgacatgcctgcccccagccctggcctggactatgagcctgagggcgtgcctgacaacagccccaacctgcagaacaaccctgaggagcccaaccctgaggcccctcatgtgctggatgtgtacctggaggagtacccaccctacccacctccaccctaccccagcggggagcctgagggccctggagaggacagcgtgtccatgaggcctcctgagatcaccggccaggtgtccctgcccccaggcaagaggaccaacctgaggaagacaggcagcgagcgcatcgcccacggcatgagggtgaagttcaaccccctggccctgctgctggacagcagcctggagggggagtttgacctggtgcagaggatcatctatgaggtggatgaccccagcctgcccaatgatgagggcatcacagccctgcacaatgctgtgtgtgccggccacacagagatcgtgaagttcctggtgcagtttggagtgaatgtgaatgctgctgacagtgatggctggacccccctgcactgtgccgccagctgcaacaacgtgcaggtgtgcaagttcctggtggagagcggggctgctgtgtttgccatgacctacagcgacatgcagacagctgctgacaagtgtgaggagatggaggagggctacacccagtgcagccagttcctgtatggagtgcaggagaagatgggcatcatgaacaagggcgtcatctatgccctgtgggactatgagccccagaatgatgatgagctgcccatgaaggagggggactgcatgaccatcatccaccgggaggatgaagatgaaattgagtggtggtgggcccggctgaatgacaaggagggctacgtgcccaggaacctgctgggcctgtacccccgcatcaagccccggcagaggagcctggcctag

SEQ ID NO: 174902 - DNA, 3018 bp, synthetic construct
  misc_feature 1..3018: note = Description of Artificial Sequence: Synthetic coding sequence
  source 1..3018: mol_type = other DNA
atggacctgaccctggccgagctgcaggagatggccagccggcagcagcagcagatcgaggcccagcagcagctgctggccaccaaggagcagaggctgaagttcctgaagcagcaggaccagaggcagcagcagcaggtggccgagcaggagaagctgaagaggctgaaggagattgctgagaaccaggaggccaagctgaagaaggtgcgggccctgaagggccacgtggagcagaagaggctgagcaatggcaagctggtggaggagattgagcagatgaacaacctcttccagcagaagcagcgggagctggtgctggccgtgtccaaggtggaggagctgacccggcagctggagatgctgaagaatggaagaattgacagccaccacgacaaccagagcgctgtggccgagctggaccggctgtacaaggagctgcagctgaggaacaagctgaaccaggagcagaatgccaagctgcagcagcagcgggagtgcctgaacaagagaaattctgaggtggccgtgatggacaagagggtgaatgagctgcgggaccggctgtggaagaagaaggccgccctgcagcagaaggagaacctgcctgtgtccagtgatggcaacctgccccagcaggccgccagcgcccccagccgggtggccgctgtgggcccctacatccagagcagcaccatgcccaggatgcccagcaggcctgagctgctggtgaagccagccctgcctgatggcagcctggtgatccaggccagcgagggccccatgaagatccagaccctgcccaacatgaggtctggggccgccagccagaccaagggcagcaagatccaccctgtgggccctgactggagccccagcaatgctgacctcttccccagccagggcagcgcctctgtgccccagagcactggaaatgccctggaccaggtggatgatggagaggtgcccctgcgggagaaggagaagaaggtgcggcccttctccatgtttgatgctgtggaccagagcaatgccccacccagctttggcaccctgaggaagaaccagagcagcgaggacatcctgagagatgcccaggtggccaacaagaatgtggccaaggtgcccccacctgtgcccaccaagcccaagcagatcaacctgccctacttcggccagaccaaccagcccccaagtgacatcaagccagatggcagcagccagcagctgagcacagtggtgcccagcatgggcaccaagcccaagccagctggccagcagccccgggtgctgctgagccccagcatccccagcgtgggccaggaccagaccctgagccctggcagcaagcaggagagccccccagctgctgctgtgcggcccttcaccccccagcccagcaaggacaccctgctgccccccttcaggaagccccagacagtggccgccagcagcatctacagcatgtacacccagcagcaggcccctgggaagaacttccagcaggccgtgcagagcgccctgaccaagacccacacccggggcccccacttcagctctgtgtatggcaagcctgtgattgctgctgcccagaaccagcagcagcaccctgagaacatctacagcaacagccagggcaagccaggcagccctgagcctgagacagagcctgtgtcctctgtgcaggagaaccatgaaaatgaaagaatcccccggcccctgagccccaccaagctgctgcccttcctgagcaacccctacagaaaccagagtgatgctgacctggaggccctgaggaagaagctgagcaatgccccccggcccctgaagaagaggagcagcatcacagagcctgagggccccaacggccccaacatccagaagctgctgtaccagaggaccaccatcgccgccatggagaccatctctgtgcccagctaccccagcaagagcgcctctgtgacagccagcagcgagagccctgtggagatccagaacccctacctgcacgtggagcctgagaaggaggtggtgtccctggtgcctgagagcctgagcccagaagatgtgggcaatgccagcacagagaacagcgacatgcctgcccccagccctggcctggactatgagcctgagggcgtgcctgacaacagccccaacctgcagaacaaccctgaggagcccaaccctgaggccccccacgtgctggatgtgtacctggaggagtacccaccctacccacctccaccctaccccagcggggagcctgagggccctggagaagattctgtgtccatgaggcctcctgagatcaccggccaggtgtccctgcccccaggcaagaggaccaacctgaggaagacaggcagcgagagaattgcccacggcatgagggtgaagttcaaccccctggccctgctgctggacagcagcctggagggggagtttgacctggtgcagaggatcatctatgaggtggatgaccccagcctgcccaatgatgagggcatcacagccctgcacaatgctgtgtgtgccggccacacagaaattgtgaagttcctggtgcagtttggagtgaatgtgaatgctgctgacagtgatggctggacccccctgcactgtgccgccagctgcaacaacgtgcaggtgtgcaagttcctggtggagagcggggctgctgtgtttgccatgacctacagcgacatgcagacagctgctgacaagtgtgaggagatggaggagggctacacccagtgcagccagttcctgtatggagtgcaggagaagatgggcatcatgaacaagggcgtcatctatgccctgtgggactatgagccccagaatgatgatgagctgcccatgaaggagggggactgcatgaccatcatccacagagaagatgaagatgaaattgagtggtggtgggcccggctgaatgacaaggagggctacgtgcccaggaacctgctgggcctgtacccccgcatcaagccccggcagaggagcctggcctag

SEQ ID NO: 174903 - DNA, 1104 bp, synthetic construct
  misc_feature 1..1104: note = Description of Artificial Sequence: Synthetic coding sequence
  source 1..1104: mol_type = other DNA
atggagaccatctctgtgcccagctaccccagcaagagcgcctctgtgacagccagcagcgagagccctgtggagatccagaacccctacctgcacgtggagcctgagaaggaggtggtgtccctggtgcctgagagcctgagcccagaagatgtgggcaatgccagcacagagaacagcgacatgcctgcccccagccctggcctggactatgagcctgagggcgtgcctgacaacagccccaacctgcagaacaaccctgaggagcccaaccctgaggccccccacgtgctggatgtgtacctggaggagtacccaccctacccacctccaccctaccccagcggggagcctgagggccctggagaagattctgtgtccatgaggcctcctgagatcaccggccaggtgtccctgcccccaggcaagaggaccaacctgaggaagacaggcagcgagagaattgcccacggcatgagggtgaagttcaaccccctggccctgctgctggacagcagcctggagggggagtttgacctggtgcagaggatcatctatgaggtggatgaccccagcctgcccaatgatgagggcatcacagccctgcacaatgctgtgtgtgccggccacacagaaattgtgaagttcctggtgcagtttggagtgaatgtgaatgctgctgacagtgatggctggacccccctgcactgtgccgccagctgcaacaacgtgcaggtgtgcaagttcctggtggagagcggggctgctgtgtttgccatgacctacagcgacatgcagacagctgctgacaagtgtgaggagatggaggagggctacacccagtgcagccagttcctgtatggagtgcaggagaagatgggcatcatgaacaagggcgtcatctatgccctgtgggactatgagccccagaatgatgatgagctgcccatgaaggagggggactgcatgaccatcatccacagagaagatgaagatgaaattgagtggtggtgggcccggctgaatgacaaggagggctacgtgcccaggaacctgctgggcctgtacccccgcatcaagccccggcagaggagcctggcctag

SEQ ID NO: 174904 - DNA, 2043 bp, synthetic construct
  misc_feature 1..2043: note = Description of Artificial Sequence: Synthetic coding sequence
  source 1..2043: mol_type = other DNA
atgaactttgagaccagccgctgtgccaccctgcagtactgcccagacccctacatccagagatttgtggagaccccagcccacttctcctggaaggagagctactaccgcagcaccatgagccagagcacccagaccaatgagttcctgagccctgaggtgttccagcacatctgggacttcctggagcagcccatctgcagcgtgcagcccatcgacctgaactttgtggatgagcccagtgaagatggagccaccaacaagattgagatctccatggactgcatccgcatgcaggacagcgacctgagtgaccccatgtggccccagtacaccaacctgggcctgctgaacagcatggaccagcagatccagaatggcagcagcagcaccagcccctacaacacagaccacgcccagaacagcgtgacagcccccagcccctatgcccagcccagcagcacctttgatgccctgagccccagccctgccatccccagcaacacagactacccaggcccccacagctttgatgtgtccttccagcagagcagcacagccaagagcgccacctggacctacagcacagagctgaagaagctgtactgccagatcgccaagacctgccccatccagatcaaggtgatgaccccaccaccccagggcgctgtgatccgggccatgcctgtgtacaagaaggccgagcacgtgacagaggtggtgaagcgctgccccaaccacgagctgagccgggagttcaatgaaggccagatcgccccacccagccacctgatccgggtggagggcaacagccacgcccagtatgtggaggaccccatcaccggccggcagagcgtgctggtgccctatgagcccccccaggtgggcacagagttcaccaccgtgctgtacaacttcatgtgcaacagcagctgtgtgggcggcatgaacagaagacccatcctgatcatcgtgaccctggagaccagagatggccaggtgctgggccgccgctgctttgaggcccgcatctgtgcctgccccggccgggacaggaaggcagatgaggacagcatcaggaagcagcaggtgtctgacagcaccaagaatggagatggcaccaagaggcccttccggcagaacacccacggcatccagatgaccagcatcaagaagagaagaagcccagatgatgagctgctgtacctgcctgtgcggggccgggagacctatgagatgctgctgaagatcaaggagagcctggagctgatgcagtacctgccccagcacaccatcgagacctaccggcagcagcagcagcagcagcaccagcacctgctgcagaagcagaccagcatccagagccccagcagctatggcaacagcagcccccccctgaacaagatgaacagcatgaacaagctgcccagcgtgtcccagctgatcaacccccagcagagaaatgccctgacccccaccaccatcccagatggcatgggcgccaacatccccatgatgggcacccacatgcccatggccggggacatgaatggcctgagccccacccaggccctgcccccacccctgtccatgcccagcaccagccactgcaccccacctccaccctaccccacagactgcagcatcgtgtccttcctggcccggctgggctgcagcagctgcctggactacttcaccacccagggcctgaccaccatctaccagatcgagcactacagcatggatgacctggccagcctgaagatccctgagcagttcagacatgccatctggaagggcatcctggaccaccggcagctgcacgagttcagcagccccagccacctgctgcggacccccagcagcgccagcacagtgtctgtgggcagcagcgagaccagaggagagcgggtgattgatgctgtgcgcttcaccctgcggcagaccatctccttccccccaagagatgagtggaatgacttcaactttgacatggatgcccggaggaacaagcagcagaggatcaaggaggagggggagtag

SEQ ID NO: 174905 - DNA, 1533 bp, synthetic construct
  misc_feature 1..1533: note = Description of Artificial Sequence: Synthetic coding sequence
  source 1..1533: mol_type = other DNA
atgaactttgagaccagccgctgtgccaccctgcagtactgcccagacccctacatccagagatttgtggagaccccagcccacttctcctggaaggagagctactaccgcagcaccatgagccagagcacccagaccaatgagttcctgagccctgaggtgttccagcacatctgggacttcctggagcagcccatctgcagcgtgcagcccatcgacctgaactttgtggatgagcccagtgaagatggagccaccaacaagattgagatctccatggactgcatccgcatgcaggacagcgacctgagtgaccccatgtggccccagtacaccaacctgggcctgctgaacagcatggaccagcagatccagaatggcagcagcagcaccagcccctacaacacagaccacgcccagaacagcgtgacagcccccagcccctatgcccagcccagcagcacctttgatgccctgagccccagccctgccatccccagcaacacagactacccaggcccccacagctttgatgtgtccttccagcagagcagcacagccaagagcgccacctggacctacagcacagagctgaagaagctgtactgccagatcgccaagacctgccccatccagatcaaggtgatgaccccaccaccccagggcgctgtgatccgggccatgcctgtgtacaagaaggccgagcacgtgacagaggtggtgaagcgctgccccaaccacgagctgagccgggagttcaatgaaggccagatcgccccacccagccacctgatccgggtggagggcaacagccacgcccagtatgtggaggaccccatcaccggccggcagagcgtgctggtgccctatgagcccccccaggtgggcacagagttcaccaccgtgctgtacaacttcatgtgcaacagcagctgtgtgggcggcatgaacagaagacccatcctgatcatcgtgaccctggagaccagagatggccaggtgctgggccgccgctgctttgaggcccgcatctgtgcctgccccggccgggacaggaaggcagatgaggacagcatcaggaagcagcaggtgtctgacagcaccaagaatggagatggcaccaagaggcccttccggcagaacacccacggcatccagatgaccagcatcaagaagagaagaagcccagatgatgagctgctgtacctgcctgtgcggggccgggagacctatgagatgctgctgaagatcaaggagagcctggagctgatgcagtacctgccccagcacaccatcgagacctaccggcagcagcagcagcagcagcaccagcacctgctgcagaagcagaccagcatccagagccccagcagctatggcaacagcagcccccccctgaacaagatgaacagcatgaacaagctgcccagcgtgtcccagctgatcaacccccagcagagaaatgccctgacccccaccaccatcccagatggcatgggcgccaacagaagtggcaagtctgagaacccctag

SEQ ID NO: 174906 - DNA, 1761 bp, synthetic construct
  misc_feature 1..1761: note = Description of Artificial Sequence: Synthetic coding sequence
  source 1..1761: mol_type = other DNA
atgctgtacctggagaacaatgcccagacccagttcagcgagccccagtacaccaacctgggcctgctgaacagcatggaccagcagatccagaatggcagcagcagcaccagcccctacaacacagaccacgcccagaacagcgtgacagcccccagcccctatgcccagcccagcagcacctttgatgccctgagccccagccctgccatccccagcaacacagactacccaggcccccacagctttgatgtgtccttccagcagagcagcacagccaagagcgccacctggacctacagcacagagctgaagaagctgtactgccagatcgccaagacctgccccatccagatcaaggtgatgaccccaccaccccagggcgctgtgatccgggccatgcctgtgtacaagaaggccgagcacgtgacagaggtggtgaagcgctgccccaaccacgagctgagccgggagttcaatgaaggccagatcgccccacccagccacctgatccgggtggagggcaacagccacgcccagtatgtggaggaccccatcaccggccggcagagcgtgctggtgccctatgagcccccccaggtgggcacagagttcaccaccgtgctgtacaacttcatgtgcaacagcagctgtgtgggcggcatgaacagaagacccatcctgatcatcgtgaccctggagaccagagatggccaggtgctgggccgccgctgctttgaggcccgcatctgtgcctgccccggccgggacaggaaggcagatgaggacagcatcaggaagcagcaggtgtctgacagcaccaagaatggagatggcaccaagaggcccttccggcagaacacccacggcatccagatgaccagcatcaagaagagaagaagcccagatgatgagctgctgtacctgcctgtgcggggccgggagacctatgagatgctgctgaagatcaaggagagcctggagctgatgcagtacctgccccagcacaccatcgagacctaccggcagcagcagcagcagcagcaccagcacctgctgcagaagcagaccagcatccagagccccagcagctatggcaacagcagcccccccctgaacaagatgaacagcatgaacaagctgcccagcgtgtcccagctgatcaacccccagcagagaaatgccctgacccccaccaccatcccagatggcatgggcgccaacatccccatgatgggcacccacatgcccatggccggggacatgaatggcctgagccccacccaggccctgcccccacccctgtccatgcccagcaccagccactgcaccccacctccaccctaccccacagactgcagcatcgtgtccttcctggcccggctgggctgcagcagctgcctggactacttcaccacccagggcctgaccaccatctaccagatcgagcactacagcatggatgacctggccagcctgaagatccctgagcagttcagacatgccatctggaagggcatcctggaccaccggcagctgcacgagttcagcagccccagccacctgctgcggacccccagcagcgccagcacagtgtctgtgggcagcagcgagaccagaggagagcgggtgattgatgctgtgcgcttcaccctgcggcagaccatctccttccccccaagagatgagtggaatgacttcaactttgacatggatgcccggaggaacaagcagcagaggatcaaggaggagggggagtag

SEQ ID NO: 174907 - DNA, 1788 bp, synthetic construct
  misc_feature 1..1788: note = Description of Artificial Sequence: Synthetic coding sequence
  source 1..1788: mol_type = other DNA
atgaactttgagaccagccgctgtgccaccctgcagtactgcccagacccctacatccagagatttgtggagaccccagcccacttctcctggaaggagagctactaccgcagcaccatgagccagagcacccagaccaatgagttcctgagccctgaggtgttccagcacatctgggacttcctggagcagcccatctgcagcgtgcagcccatcgacctgaactttgtggatgagcccagtgaagatggagccaccaacaagattgagatctccatggactgcatccgcatgcaggacagcgacctgagtgaccccatgtggtacagcacagagctgaagaagctgtactgccagatcgccaagacctgccccatccagatcaaggtgatgaccccaccaccccagggcgccgtcatccgggccatgcctgtgtacaagaaggccgagcacgtgacagaggtggtgaagcgctgccccaaccacgagctgagccgggagttcaatgaaggccagatcgccccacccagccacctgatccgggtggagggcaacagccacgcccagtatgtggaggaccccatcaccggccggcagagcgtgctggtgccctatgagcccccccaggtgggcacagagttcaccaccgtgctgtacaacttcatgtgcaacagcagctgtgtgggcggcatgaacagaagacccatcctgatcatcgtgaccctggagaccagagatggccaggtgctgggccgccgctgctttgaggcccgcatctgtgcctgccccggccgggacaggaaggcagatgaagattccatcaggaagcagcaggtgtctgacagcaccaagaatggagatggcaccaagaggcccttccggcagaacacccacggcatccagatgaccagcatcaagaagaggaggagcccagatgatgagctgctgtacctgcctgtgcggggccgggagacctatgagatgctgctgaagatcaaggagagcctggagctgatgcagtacctgccccagcacaccatcgagacctaccggcagcagcagcagcagcagcaccagcacctgctgcagaagcagaccagcatccagagccccagcagctatggcaacagcagcccccccctgaacaagatgaacagcatgaacaagctgcccagcgtgtcccagctgatcaacccccagcagagaaatgccctgacccccaccaccatcccagatggcatgggcgccaacatccccatgatgggcacccacatgcccatggccggggacatgaatggcctgagccccacccaggccctgcccccacccctgtccatgcccagcaccagccactgcaccccacctccaccctaccccacagactgcagcatcgtgtccttcctggcccggctgggctgcagcagctgcctggactacttcaccacccagggcctgaccaccatctaccagatcgagcactacagcatggatgacctggccagcctgaagatccctgagcagttcagacatgccatctggaagggcatcctggaccaccggcagctgcacgagttcagcagccccagccacctgctgcggacccccagcagcgccagcacagtgtctgtgggcagcagcgagaccagaggagagcgggtgattgatgctgtgcgcttcaccctgcggcagaccatctccttccccccaagagatgagtggaatgacttcaactttgacatggatgcccggaggaacaagcagcagaggatcaaggaggagggggagtag

SEQ ID NO: 174908 - DNA, 1668 bp, synthetic construct
  misc_feature 1..1668: note = Description of Artificial Sequence: Synthetic coding sequence
  source 1..1668: mol_type = other DNA
atgaactttgagaccagccgctgtgccaccctgcagtactgcccagacccctacatccagagatttgtggagaccccagcccacttctcctggaaggagagctactaccgcagcaccatgagccagagcacccagaccaatgagttcctgagccctgaggtgttccagcacatctgggacttcctggagcagcccatctgcagcgtgcagcccatcgacctgaactttgtggatgagcccagtgaagatggagccaccaacaagattgagatctccatggactgcatccgcatgcaggacagcgacctgagtgaccccatgtggccccagtacaccaacctgggcctgctgaacagcatggaccagcagatccagaatggcagcagcagcaccagcccctacaacacagaccacgcccagaacagcgtgacagcccccagcccctatgcccagcccagcagcacctttgatgccctgagccccagccctgccatccccagcaacacagactacccaggcccccacagctttgatgtgtccttccagcagagcagcacagccaagagcgccacctggacctacagcacagagctgaagaagctgtactgccagatcgccaagacctgccccatccagatcaaggtgatgaccccaccaccccagggcgctgtgatccgggccatgcctgtgtacaagaaggccgagcacgtgacagaggtggtgaagcgctgccccaaccacgagctgagccgggagttcaatgaaggccagatcgccccacccagccacctgatccgggtggagggcaacagccacgcccagtatgtggaggaccccatcaccggccggcagagcgtgctggtgccctatgagcccccccaggtgggcacagagttcaccaccgtgctgtacaacttcatgtgcaacagcagctgtgtgggcggcatgaacagaagacccatcctgatcatcgtgaccctggagaccagagatggccaggtgctgggccgccgctgctttgaggcccgcatctgtgcctgccccggccgggacaggaaggcagatgaggacagcatcaggaagcagcaggtgtctgacagcaccaagaatggagatggcaccaagaggcccttccggcagaacacccacggcatccagatgaccagcatcaagaagagaagaagcccagatgatgagctgctgtacctgcctgtgcggggccgggagacctatgagatgctgctgaagatcaaggagagcctggagctgatgcagtacctgccccagcacaccatcgagacctaccggcagcagcagcagcagcagcaccagcacctgctgcagaagcagaccagcatccagagccccagcagctatggcaacagcagcccccccctgaacaagatgaacagcatgaacaagctgcccagcgtgtcccagctgatcaacccccagcagagaaatgccctgacccccaccaccatcccagatggcatgggcgccaacatccccatgatgggcacccacatgcccatggccggggacatgaatggcctgagccccacccaggccctgcccccacccctgtccatgcccagcaccagccactgcaccccacctccaccctaccccacagactgcagcatcgtgcgcatctggcaggtgtag

SEQ ID NO: 174909 - DNA, 1251 bp, synthetic construct
  misc_feature 1..1251: note = Description of Artificial Sequence: Synthetic coding sequence
  source 1..1251: mol_type = other DNA
atgctgtacctggagaacaatgcccagacccagttcagcgagccccagtacaccaacctgggcctgctgaacagcatggaccagcagatccagaatggcagcagcagcaccagcccctacaacacagaccacgcccagaacagcgtgacagcccccagcccctatgcccagcccagcagcacctttgatgccctgagccccagccctgccatccccagcaacacagactacccaggcccccacagctttgatgtgtccttccagcagagcagcacagccaagagcgccacctggacctacagcacagagctgaagaagctgtactgccagatcgccaagacctgccccatccagatcaaggtgatgaccccaccaccccagggcgctgtgatccgggccatgcctgtgtacaagaaggccgagcacgtgacagaggtggtgaagcgctgccccaaccacgagctgagccgggagttcaatgaaggccagatcgccccacccagccacctgatccgggtggagggcaacagccacgcccagtatgtggaggaccccatcaccggccggcagagcgtgctggtgccctatgagcccccccaggtgggcacagagttcaccaccgtgctgtacaacttcatgtgcaacagcagctgtgtgggcggcatgaacagaagacccatcctgatcatcgtgaccctggagaccagagatggccaggtgctgggccgccgctgctttgaggcccgcatctgtgcctgccccggccgggacaggaaggcagatgaggacagcatcaggaagcagcaggtgtctgacagcaccaagaatggagatggcaccaagaggcccttccggcagaacacccacggcatccagatgaccagcatcaagaagagaagaagcccagatgatgagctgctgtacctgcctgtgcggggccgggagacctatgagatgctgctgaagatcaaggagagcctggagctgatgcagtacctgccccagcacaccatcgagacctaccggcagcagcagcagcagcagcaccagcacctgctgcagaagcagaccagcatccagagccccagcagctatggcaacagcagcccccccctgaacaagatgaacagcatgaacaagctgcccagcgtgtcccagctgatcaacccccagcagagaaatgccctgacccccaccaccatcccagatggcatgggcgccaacagaagtggcaagtctgagaacccctag

SEQ ID NO: 174910 - DNA, 1386 bp, synthetic construct
  misc_feature 1..1386: note = Description of Artificial Sequence: Synthetic coding sequence
  source 1..1386: mol_type = other DNA
atgctgtacctggagaacaatgcccagacccagttcagcgagccccagtacaccaacctgggcctgctgaacagcatggaccagcagatccagaatggcagcagcagcaccagcccctacaacacagaccacgcccagaacagcgtgacagcccccagcccctatgcccagcccagcagcacctttgatgccctgagccccagccctgccatccccagcaacacagactacccaggcccccacagctttgatgtgtccttccagcagagcagcacagccaagagcgccacctggacctacagcacagagctgaagaagctgtactgccagatcgccaagacctgccccatccagatcaaggtgatgaccccaccaccccagggcgctgtgatccgggccatgcctgtgtacaagaaggccgagcacgtgacagaggtggtgaagcgctgccccaaccacgagctgagccgggagttcaatgaaggccagatcgccccacccagccacctgatccgggtggagggcaacagccacgcccagtatgtggaggaccccatcaccggccggcagagcgtgctggtgccctatgagcccccccaggtgggcacagagttcaccaccgtgctgtacaacttcatgtgcaacagcagctgtgtgggcggcatgaacagaagacccatcctgatcatcgtgaccctggagaccagagatggccaggtgctgggccgccgctgctttgaggcccgcatctgtgcctgccccggccgggacaggaaggcagatgaggacagcatcaggaagcagcaggtgtctgacagcaccaagaatggagatggcaccaagaggcccttccggcagaacacccacggcatccagatgaccagcatcaagaagagaagaagcccagatgatgagctgctgtacctgcctgtgcggggccgggagacctatgagatgctgctgaagatcaaggagagcctggagctgatgcagtacctgccccagcacaccatcgagacctaccggcagcagcagcagcagcagcaccagcacctgctgcagaagcagaccagcatccagagccccagcagctatggcaacagcagcccccccctgaacaagatgaacagcatgaacaagctgcccagcgtgtcccagctgatcaacccccagcagagaaatgccctgacccccaccaccatcccagatggcatgggcgccaacatccccatgatgggcacccacatgcccatggccggggacatgaatggcctgagccccacccaggccctgcccccacccctgtccatgcccagcaccagccactgcaccccacctccaccctaccccacagactgcagcatcgtgcgcatctggcaggtgtag

SEQ ID NO: 174911 - DNA, 1464 bp, synthetic construct
  misc_feature 1..1464: note = Description of Artificial Sequence: Synthetic coding sequence
  source 1..1464: mol_type = other DNA
atgaactttgagaccagccgctgtgccaccctgcagtactgcccagacccctacatccagagatttgtggagaccccagcccacttctcctggaaggagagctactaccgcagcaccatgagccagagcacccagaccaatgagttcctgagccctgaggtgttccagcacatctgggacttcctggagcagcccatctgcagcgtgcagcccatcgacctgaactttgtggatgagcccagtgaagatggagccaccaacaagattgagatctccatggactgcatccgcatgcaggacagcgacctgagtgaccccatgtggccccagtacaccaacctgggcctgctgaacagcatggaccagcagatccagaatggcagcagcagcaccagcccctacaacacagaccacgcccagaacagcgtgacagcccccagcccctatgcccagcccagcagcacctttgatgccctgagccccagccctgccatccccagcaacacagactacccaggcccccacagctttgatgtgtccttccagcagagcagcacagccaagagcgccacctggacctacagcacagagctgaagaagctgtactgccagatcgccaagacctgccccatccagatcaaggtgatgaccccaccaccccagggcgctgtgatccgggccatgcctgtgtacaagaaggccgagcacgtgacagaggtggtgaagcgctgccccaaccacgagctgagccgggagttcaatgaaggccagatcgccccacccagccacctgatccgggtggagggcaacagccacgcccagtatgtggaggaccccatcaccggccggcagagcgtgctggtgccctatgagcccccccaggtgggcacagagttcaccaccgtgctgtacaacttcatgtgcaacagcagctgtgtgggcggcatgaacagaagacccatcctgatcatcgtgaccctggagaccagagatggccaggtgctgggccgccgctgctttgaggcccgcatctgtgcctgccccggccgggacaggaaggcagatgaggacagcatcaggaagcagcaggtgtctgacagcaccaagaatggagatggcaccaagaggcccttccggcagaacacccacggcatccagatgaccagcatcaagaagagaagaagcccagatgatgagctgctgtacctgcctgtgcggggccgggagacctatgagatgctgctgaagatcaaggagagcctggagctgatgcagtacctgccccagcacaccatcgagacctaccggcagcagcagcagcagcagcaccagcacctgctgcagaagcacctgctgagcgcctgcttcagaaatgagctggtggagccccggcgggagacccccaagcagagtgatgtgttcttccgccacagcaagccacccaacagatctgtgtacccctag

SEQ ID NO: 174912 - DNA, 1182 bp, synthetic construct
  misc_feature 1..1182: note = Description of Artificial Sequence: Synthetic coding sequence
  source 1..1182: mol_type = other DNA
atgctgtacctggagaacaatgcccagacccagttcagcgagccccagtacaccaacctgggcctgctgaacagcatggaccagcagatccagaatggcagcagcagcaccagcccctacaacacagaccacgcccagaacagcgtgacagcccccagcccctatgcccagcccagcagcacctttgatgccctgagccccagccctgccatccccagcaacacagactacccaggcccccacagctttgatgtgtccttccagcagagcagcacagccaagagcgccacctggacctacagcacagagctgaagaagctgtactgccagatcgccaagacctgccccatccagatcaaggtgatgaccccaccaccccagggcgctgtgatccgggccatgcctgtgtacaagaaggccgagcacgtgacagaggtggtgaagcgctgccccaaccacgagctgagccgggagttcaatgaaggccagatcgccccacccagccacctgatccgggtggagggcaacagccacgcccagtatgtggaggaccccatcaccggccggcagagcgtgctggtgccctatgagcccccccaggtgggcacagagttcaccaccgtgctgtacaacttcatgtgcaacagcagctgtgtgggcggcatgaacagaagacccatcctgatcatcgtgaccctggagaccagagatggccaggtgctgggccgccgctgctttgaggcccgcatctgtgcctgccccggccgggacaggaaggcagatgaggacagcatcaggaagcagcaggtgtctgacagcaccaagaatggagatggcaccaagaggcccttccggcagaacacccacggcatccagatgaccagcatcaagaagagaagaagcccagatgatgagctgctgtacctgcctgtgcggggccgggagacctatgagatgctgctgaagatcaaggagagcctggagctgatgcagtacctgccccagcacaccatcgagacctaccggcagcagcagcagcagcagcaccagcacctgctgcagaagcacctgctgagcgcctgcttcagaaatgagctggtggagccccggcgggagacccccaagcagagtgatgtgttcttccgccacagcaagccacccaacagatctgtgtacccctag

SEQ ID NO: 174913 - DNA, 2031 bp, synthetic construct
  misc_feature 1..2031: note = Description of Artificial Sequence: Synthetic coding sequence
  source 1..2031: mol_type = other DNA
atgaactttgagaccagccgctgtgccaccctgcagtactgcccagacccctacatccagagatttgtggagaccccagcccacttctcctggaaggagagctactaccgcagcaccatgagccagagcacccagaccaatgagttcctgagccctgaggtgttccagcacatctgggacttcctggagcagcccatctgcagcgtgcagcccatcgacctgaactttgtggatgagcccagtgaagatggagccaccaacaagattgagatctccatggactgcatccgcatgcaggacagcgacctgagtgaccccatgtggccccagtacaccaacctgggcctgctgaacagcatggaccagcagatccagaatggcagcagcagcaccagcccctacaacacagaccacgcccagaacagcgtgacagcccccagcccctatgcccagcccagcagcacctttgatgccctgagccccagccctgccatccccagcaacacagactacccaggcccccacagctttgatgtgtccttccagcagagcagcacagccaagagcgccacctggacctacagcacagagctgaagaagctgtactgccagatcgccaagacctgccccatccagatcaaggtgatgaccccaccaccccagggcgctgtgatccgggccatgcctgtgtacaagaaggccgagcacgtgacagaggtggtgaagcgctgccccaaccacgagctgagccgggagttcaatgaaggccagatcgccccacccagccacctgatccgggtggagggcaacagccacgcccagtatgtggaggaccccatcaccggccggcagagcgtgctggtgccctatgagcccccccaggtgggcacagagttcaccaccgtgctgtacaacttcatgtgcaacagcagctgtgtgggcggcatgaacagaagacccatcctgatcatcgtgaccctggagaccagagatggccaggtgctgggccgccgctgctttgaggcccgcatctgtgcctgccccggccgggacaggaaggcagatgaggacagcatcaggaagcagcaggtgtctgacagcaccaagaatggagatgccttccggcagaacacccacggcatccagatgaccagcatcaagaagagaagaagcccagatgatgagctgctgtacctgcctgtgcggggccgggagacctatgagatgctgctgaagatcaaggagagcctggagctgatgcagtacctgccccagcacaccatcgagacctaccggcagcagcagcagcagcagcaccagcacctgctgcagaagcagaccagcatccagagccccagcagctatggcaacagcagcccccccctgaacaagatgaacagcatgaacaagctgcccagcgtgtcccagctgatcaacccccagcagagaaatgccctgacccccaccaccatcccagatggcatgggcgccaacatccccatgatgggcacccacatgcccatggccggggacatgaatggcctgagccccacccaggccctgcccccacccctgtccatgcccagcaccagccactgcaccccacctccaccctaccccacagactgcagcatcgtgtccttcctggcccggctgggctgcagcagctgcctggactacttcaccacccagggcctgaccaccatctaccagatcgagcactacagcatggatgacctggccagcctgaagatccctgagcagttcagacatgccatctggaagggcatcctggaccaccggcagctgcacgagttcagcagccccagccacctgctgcggacccccagcagcgccagcacagtgtctgtgggcagcagcgagaccagaggagagcgggtgattgatgctgtgcgcttcaccctgcggcagaccatctccttccccccaagagatgagtggaatgacttcaactttgacatggatgcccggaggaacaagcagcagaggatcaaggaggagggggagtag

SEQ ID NO: 174914 - DNA, 1506 bp, synthetic construct
  misc_feature 1..1506: note = Description of Artificial Sequence: Synthetic coding sequence
  source 1..1506: mol_type = other DNA
atgctgtacctggagaacaatgcccagacccagttcagcgagtacagcacagagctgaagaagctgtactgccagatcgccaagacctgccccatccagatcaaggtgatgaccccaccaccccagggcgccgtcatccgggccatgcctgtgtacaagaaggccgagcacgtgacagaggtggtgaagcgctgccccaaccacgagctgagccgggagttcaatgaaggccagatcgccccacccagccacctgatccgggtggagggcaacagccacgcccagtatgtggaggaccccatcaccggccggcagagcgtgctggtgccctatgagcccccccaggtgggcacagagttcaccaccgtgctgtacaacttcatgtgcaacagcagctgtgtgggcggcatgaacagaagacccatcctgatcatcgtgaccctggagaccagagatggccaggtgctgggccgccgctgctttgaggcccgcatctgtgcctgccccggccgggacaggaaggcagatgaagattccatcaggaagcagcaggtgtctgacagcaccaagaatggagatggcaccaagaggcccttccggcagaacacccacggcatccagatgaccagcatcaagaagaggaggagcccagatgatgagctgctgtacctgcctgtgcggggccgggagacctatgagatgctgctgaagatcaaggagagcctggagctgatgcagtacctgccccagcacaccatcgagacctaccggcagcagcagcagcagcagcaccagcacctgctgcagaagcagaccagcatccagagccccagcagctatggcaacagcagcccccccctgaacaagatgaacagcatgaacaagctgcccagcgtgtcccagctgatcaacccccagcagagaaatgccctgacccccaccaccatcccagatggcatgggcgccaacatccccatgatgggcacccacatgcccatggccggggacatgaatggcctgagccccacccaggccctgcccccacccctgtccatgcccagcaccagccactgcaccccacctccaccctaccccacagactgcagcatcgtgtccttcctggcccggctgggctgcagcagctgcctggactacttcaccacccagggcctgaccaccatctaccagatcgagcactacagcatggatgacctggccagcctgaagatccctgagcagttcagacatgccatctggaagggcatcctggaccaccggcagctgcacgagttcagcagccccagccacctgctgcggacccccagcagcgccagcacagtgtctgtgggcagcagcgagaccagaggagagcgggtgattgatgctgtgcgcttcaccctgcggcagaccatctccttccccccaagagatgagtggaatgacttcaactttgacatggatgcccggaggaacaagcagcagaggatcaaggaggagggggagtag

SEQ ID NO: 174915 - DNA, 1749 bp, synthetic construct
  misc_feature 1..1749: note = Description of Artificial Sequence: Synthetic coding sequence
  source 1..1749: mol_type = other DNA
atgctgtacctggagaacaatgcccagacccagttcagcgagccccagtacaccaacctgggcctgctgaacagcatggaccagcagatccagaatggcagcagcagcaccagcccctacaacacagaccacgcccagaacagcgtgacagcccccagcccctatgcccagcccagcagcacctttgatgccctgagccccagccctgccatccccagcaacacagactacccaggcccccacagctttgatgtgtccttccagcagagcagcacagccaagagcgccacctggacctacagcacagagctgaagaagctgtactgccagatcgccaagacctgccccatccagatcaaggtgatgaccccaccaccccagggcgctgtgatccgggccatgcctgtgtacaagaaggccgagcacgtgacagaggtggtgaagcgctgccccaaccacgagctgagccgggagttcaatgaaggccagatcgccccacccagccacctgatccgggtggagggcaacagccacgcccagtatgtggaggaccccatcaccggccggcagagcgtgctggtgccctatgagcccccccaggtgggcacagagttcaccaccgtgctgtacaacttcatgtgcaacagcagctgtgtgggcggcatgaacagaagacccatcctgatcatcgtgaccctggagaccagagatggccaggtgctgggccgccgctgctttgaggcccgcatctgtgcctgccccggccgggacaggaaggcagatgaggacagcatcaggaagcagcaggtgtctgacagcaccaagaatggagatgccttccggcagaacacccacggcatccagatgaccagcatcaagaagagaagaagcccagatgatgagctgctgtacctgcctgtgcggggccgggagacctatgagatgctgctgaagatcaaggagagcctggagctgatgcagtacctgccccagcacaccatcgagacctaccggcagcagcagcagcagcagcaccagcacctgctgcagaagcagaccagcatccagagccccagcagctatggcaacagcagcccccccctgaacaagatgaacagcatgaacaagctgcccagcgtgtcccagctgatcaacccccagcagagaaatgccctgacccccaccaccatcccagatggcatgggcgccaacatccccatgatgggcacccacatgcccatggccggggacatgaatggcctgagccccacccaggccctgcccccacccctgtccatgcccagcaccagccactgcaccccacctccaccctaccccacagactgcagcatcgtgtccttcctggcccggctgggctgcagcagctgcctggactacttcaccacccagggcctgaccaccatctaccagatcgagcactacagcatggatgacctggccagcctgaagatccctgagcagttcagacatgccatctggaagggcatcctggaccaccggcagctgcacgagttcagcagccccagccacctgctgcggacccccagcagcgccagcacagtgtctgtgggcagcagcgagaccagaggagagcgggtgattgatgctgtgcgcttcaccctgcggcagaccatctccttccccccaagagatgagtggaatgacttcaactttgacatggatgcccggaggaacaagcagcagaggatcaaggaggagggggagtag

SEQ ID NO: 174916 - DNA, 567 bp, synthetic construct
  misc_feature 1..567: note = Description of Artificial Sequence: Synthetic coding sequence
  source 1..567: mol_type = other DNA
atgatcatctacagagacctgatcagccatgatgagatgttcagtgacatctacaagatccgggagattgctgatggcctgtgcctggaggtggagggcaagatggtgtccaggacagagggcaacattgatgacagcctcatcggcggcaatgccagcgctgagggccctgagggggagggcacagagagcaccgtcatcaccggggtggacatcgtgatgaaccaccacctgcaggagaccagcttcaccaaggaggcctacaagaagtacatcaaggactacatgaagagcatcaagggcaagctggaggagcagaggcctgagcgggtgaagcccttcatgaccggggctgctgagcagatcaagcacatcctggccaacttcaagaactaccagttcttcatcggggagaacatgaacccagatggcatggtggccctgctggactacagagaagatggagtgaccccctacatgatcttcttcaaggatggcctggagatggagaagtgtgtgtccaccaggaagtgggtgaagatcaacaacgtgaagaagaccttctag

SEQ ID NO: 174917 - DNA, 417 bp, synthetic construct
  misc_feature 1..417: note = Description of Artificial Sequence: Synthetic coding sequence
  source 1..417: mol_type = other DNA
atggtgtccaggacagagggcaacattgatgacagcctcatcggcggcaatgccagcgctgagggccctgagggggagggcacagagagcaccgtcatcaccggggtggacatcgtgatgaaccaccacctgcaggagaccagcttcaccaaggaggcctacaagaagtacatcaaggactacatgaagagcatcaagggcaagctggaggagcagaggcctgagcgggtgaagcccttcatgaccggggctgctgagcagatcaagcacatcctggccaacttcaagaactaccagttcttcatcggggagaacatgaacccagatggcatggtggccctgctggactacagagaagatggagtgaccccctacatgatcttcttcaaggatggcctggagatggagaagtgctag

SEQ ID NO: 174918 - DNA, 417 bp, synthetic construct; identical to SEQ ID NO: 174917
  misc_feature 1..417: note = Description of Artificial Sequence: Synthetic coding sequence
  source 1..417: mol_type = other DNA

SEQ ID NO: 174919 - DNA, 483 bp, synthetic construct
  misc_feature 1..483: note = Description of Artificial Sequence: Synthetic coding sequence
  source 1..483: mol_type = other DNA
atgttcagtgacatctacaagatccgggagattgctgatggcctgtgcctggaggtggagggcaagatggtgtccaggacagagggcaacattgatgacagcctcatcggcggcaatgccagcgctgagggccctgagggggagggcacagagagcaccgtcatcaccggggtggacatcgtgatgaaccaccacctgcaggagaccagcttcaccaaggaggcctacaagaagtacatcaaggactacatgaagagcatcaagggcaagctggaggagcagaggcctgagcgggtgaagcccttcatgaccggggctgctgagcagatcaagcacatcctggccaacttcaagaactaccagttcttcatcggggagaacatgaacccagatggcatggtggccctgctggactacagagaagatggagtgaccccctacatgatcttcttcaaggatggcctggagatggagaagtgctag

SEQ ID NO: 174920 - DNA, 519 bp, synthetic construct
  misc_feature 1..519: note = Description of Artificial Sequence: Synthetic coding sequence
  source 1..519: mol_type = other DNA
atgatcatctacagagacctgatcagccatgatgagatgttcagtgacatctacaagatccgggagattgctgatggcctgtgcctggaggtggagggcaagatggtgtccaggacagagggcaacattgatgacagcctcatcggcggcaatgccagcgctgagggccctgagggggagggcacagagagcaccgtcatcaccggggtggacatcgtgatgaaccaccacctgcaggagaccagcttcaccaaggaggcctacaagaagtacatcaaggactacatgaagagcatcaagggcaagctggaggagcagaggcctgagcgggtgaagcccttcatgaccggggctgctgagcagatcaagcacatcctggccaacttcaagaactaccagttcttcatcggggagaacatgaacccagatggcatggtggccctgctggactacagagaagatggagtgaccccctacatgatcttcttcaaggatggcctggagatggagaagtgctag

SEQ ID NO: 174921 - DNA, 1164 bp, synthetic construct
  misc_feature 1..1164: note = Description of Artificial Sequence: Synthetic coding sequence
  source 1..1164: mol_type = other DNA
atggaggatgatgcccctgtgatctacggcctggagttccaggcccgggccctgaccccccagacagctgagacagatgccatccgcttcctggtgggcacccagagcctgaagtatgacaaccagatccacatcatcgactttgatgatgagaacaacatcatcaacaagaatgtgctgctgcaccaggccggggagatctggcacatcagcgccagccctgctgaccggggcgtgctgaccacctgctacaacagaacaagtgacagcaaggtgctgacctgtgccgctgtgtggaggatgcccaaggagctggagagcggcagccatgagagcccagatgacagcagcagcacagcccagaccctggagctgctgtgccacctggacaacacagcccacggcaacatggcctgtgtggtgtgggagcccatgggagatggcaagaagatcatcagcctggccgacaaccacatcctgctgtgggacctgcaggagagcagcagccaggccgtgctggccagcagcgccagcctggagggcaagggccagctgaagttcaccagcggccgctggagcccccaccacaactgcacccaggtggccacagccaatgacaccaccctgcggggctgggacaccaggtccatgagccagatctactgcattgaaaatgcccacggccagctggtgcgggacctggacttcaaccccaacaagcagtactacctggccagctgtggagatgactgcaaggtgaagttctgggacaccagaaatgtgacagagcctgtgaagaccctggaggagcacagccactgggtgtggaatgtgcgctacaaccacagccatgaccagctggtgctgaccggcagcagtgacagcagggtcatcctgagcaacatggtgtccatcagcagcgagcccttcggccacctggtggatgatgatgacatcagtgaccaggaggaccacaggtctgaggagaagagcaaggagcccctgcaggacaacgtcatcgccacctatgaggagcatgaagattctgtgtatgctgtggactggagcagcgctgacccctggctgtttgccagcctgtcctatgatggccgcctggtgatcaacagagtgccccgggccctgaagtaccacatcctgctgtag

SEQ ID NO: 174922 - DNA, 990 bp, synthetic construct
  misc_feature 1..990: note = Description of Artificial Sequence: Synthetic coding sequence
  source 1..990: mol_type = other DNA
atggccgaggccggcaccggggagcccagccccagcgtggagggggagcacggcacagaatatgacaccctgcccagcgacacagtgtccctgagtgacagcgacagcgacctgagcctgcctggaggagctgaggtggaggccctgagccccatgggcctgcctggagaggaggacagcggcccagatgagccccccagcccccccagcggcctgctgcctgccaccgtgcagcccttccacctgcggggcatgagcagcaccttcagccagaggagccgggacatctttgactgcctggagggcgccgcccggcgggcccccagctctgtggcccacacctccatgtctgacaatggaggcttcaagaggcccctggcccccagcggccgcagccctgtggagggcctgggccgggcccacaggagccctgccagcccccgggtgccccctgtgcctgactatgtggcccaccctgagcgctggaccaagtacagcctggaggatgtgacagaggtgtctgagcagagcaaccaggccacagccctggccttcctgggcagccagagcctggccgcccccacagactgtgtgagcagcttcaaccaggaccccagcagctgtggggagggccgggtcatcttcaccaagcctgtgcggggcgtggaggcccggcatgagaggaagagggtgctgggcaaggtgggggagcccggccggggcggcctgggcaacccagccacagacagaggagagggccctgtggagctggcccacctggccggccctggcagccctgaggccgaggagtggggcagccaccacggcggcctgcaggaggtggaggccctgagcggctctgtgcacagcggctctgtgcccggcctgccccctgtggagaccgtgggcttccacggcagcaggaagaggagccgggaccacttcaggaacaagagcagcagcccagaagatcctggagctgaggtgtag

SEQ ID NO: 174923 - DNA, 798 bp, synthetic construct
  misc_feature 1..798: note = Description of Artificial Sequence: Synthetic coding sequence
  source 1..798: mol_type = other DNA
atggccgaggccggcaccggcctgctgcctgccaccgtgcagcccttccacctgcggggcatgagcagcaccttcagccagaggagccgggacatctttgactgcctggagggcgccgcccggcgggcccccagctctgtggcccacacctccatgtctgacaatggaggcttcaagaggcccctggcccccagcggccgcagccctgtggagggcctgggccgggcccacaggagccctgccagcccccgggtgccccctgtgcctgactatgtggcccaccctgagcgctggaccaagtacagcctggaggatgtgacagaggtgtctgagcagagcaaccaggccacagccctggccttcctgggcagccagagcctggccgcccccacagactgtgtgagcagcttcaaccaggaccccagcagctgtggggagggccgggtcatcttcaccaagcctgtgcggggcgtggaggcccggcatgagaggaagagggtgctgggcaaggtgggggagcccggccggggcggcctgggcaacccagccacagacagaggagagggccctgtggagctggcccacctggccggccctggcagccctgaggccgaggagtggggcagccaccacggcggcctgcaggaggtggaggccctgagcggctctgtgcacagcggctctgtgcccggcctgccccctgtggagaccgtgggcttccacggcagcaggaagaggagccgggaccacttcaggaacaagagcagcagcccagaagatcctggagctgaggtgtag

SEQ ID NO: 174924 - DNA, 339 bp, synthetic construct
  misc_feature 1..339: note = Description of Artificial Sequence: Synthetic coding sequence
  source 1..339: mol_type = other DNA
atggccgaggccggcaccggggagcccagccccagcgtggagggggagcacggcacagaatatgacaccctgcccagcgacacagtgtccctgagtgacagcgacagcgacctgagcctgcctggaggagctgaggtggaggccctgagccccatgggcctgcctggagaggaggacagcggcccagatgagccccccagcccccccagcggcctgctgcctgccaccgtgcagcccttccacctgcggggcatgagcagcaccttcagccagaggagccgggacatctttgactgcctggagggcgccgcccggcgggcccccagctctgtggcctag

SEQ ID NO: 174925 - DNA, 612 bp, synthetic construct
  misc_feature 1..612: note = Description of Artificial Sequence: Synthetic coding sequence
  source 1..612: mol_type = other DNA
atggccgaggccggcaccggggagcccagccccagcgtggagggggagcacggcacagaatatgacaccctgcccagcgacacagtgtccctgagtgacagcgacagcgacctgagcctgcctggaggagctgaggtggaggccctgagccccatgggcctgcctggagaggaggacagcggcccagatgagccccccagcccccccagcggcctgctgcctgccaccgtgcagcccttccacctgcggggcatgagcagcaccttcagccagaggagccgggacatctttgactgcctggagggcgccgcccggcgggcccccagctctgtggcccacacctccatgtctgacaatggaggcttcaagaggcccctggcccccagcggccgcagccctgtggagggcctgggccgggcccacaggagccctgccagcccccgggtgccccctgtgcctgactatgtggcccaccctgagcgctggaccaagtacagcctggaggatgtgacagaggtgtctgagcagagcaaccaggccacagccctggccttcctgggcagccagagcctggccgcccccacagactgtgtgagcagcttcaaccagtag

SEQ ID NO: 174926 - DNA, 627 bp, synthetic construct
  misc_feature 1..627: note = Description of Artificial Sequence: Synthetic coding sequence
  source 1..627: mol_type = other DNA
atggccgaggccggcaccggcctgctgcctgccaccgtgcagcccttccacctgcggggcatgagcagcaccttcagccagaggagccgggacatctttgactgcctggagggcgccgcccggcgggcccccagctctgtggcccacacctccatgtctgacaatggaggcttcaagaggcccctggcccccagcggccgcagccctgtggagggcctgggccgggcccacaggagccctgccagcccccgggtgccccctgtgcctgactatgtggcccaccctgagcgctggaccaagtacagcctggaggatgtgacagaggtgtctgagcagagcaaccaggccacagccctggccttcctgggcagccagagcctggccgcccccacagactgtgtgagcagcttcaaccaggaccccagcagctgtggggagggccgggtcatcttcaccaagcctgtgcggggcgtggaggcccggcatgagaggaagagggtgctgggcaaggtgggggagcccggccggggcggcctgggcaacccagccacagacagaggagagggccctgtggagctggcccacctggccggccctggcagccctgaggccgaggagtggggctag

SEQ ID NO: 174927 - DNA, 990 bp, synthetic construct; identical to SEQ ID NO: 174922
  misc_feature 1..990: note = Description of Artificial Sequence: Synthetic coding sequence
  source 1..990: mol_type = other DNA

SEQ ID NO: 174928 - DNA, 333 bp, synthetic construct
  misc_feature 1..333: note = Description of Artificial Sequence: Synthetic coding sequence
  source 1..333: mol_type = other DNA
atggccgaggccggcaccggggagcccagccccagcgtggagggggagcacggcacagaatatgacaccctgcccagcgacacagtgtccctgagtgacagcgacagcgacctgagcctgcctggaggagctgaggtggaggccctgagccccatgggcctgcctggagaggaggacagcggcccagatgagccccccagcccccccagcggcctgctgcctgccaccgtgcagcccttccacctgcggggcatgagcagcaccttcagccagaggagccgggacatctttgactgcctggagggcgccgcccggcgggcccccagcagctag

SEQ ID NO: 174929 - DNA, 576 bp, synthetic construct
  misc_feature 1..576: note = Description of Artificial Sequence: Synthetic coding sequence
  source 1..576: mol_type = other DNA
atggccgaggccggcaccggggagcccagccccagcgtggagggggagcacggcacagaatatgacaccctgcccagcgacacagtgtccctgagtgacagcgacagcgacctgagcctgcctggaggagctgaggtggaggccctgagccccatgggcctgcctggagaggaggacagcggcccagatgagccccccagcccccccagcggcctgctgcctgccaccgtgcagcccttccacctgcggggcatgagcagcaccttcagccagaggagccgggacatctttgactgcctggagggcgccgcccggcgggcccccagctctgtggcccacacctccatgtctgacaatggaggcttcaagaggcccctggcccccagcggccgcagccctgtggagggcctgggccgggcccacaggagccctgccagcccccgggtgccccctgtgcctgactatgtggcccaccctgagcgctggaccaagtacagcctggaggatgtgacagaggtgtctgagcagagcaaccaggccacagccctggccttcctgggcagccagagcctgtag

SEQ ID NO: 174930 - DNA, 639 bp, synthetic construct
  misc_feature 1..639: note = Description of Artificial Sequence: Synthetic coding sequence
  source 1..639: mol_type = other DNA
atgggccccatgtggaggatgagaggaggagccacccggcggggcagctgctgcggaggagatggagctgctgatggccggggccctggccgcagcggccgggcccggggcggcggcagccccagcggcggcggcggcggcgtgggctggaggggccgggcagatggagcccggcagcagctggaggagagatttgctgacctggccgccagccacctggaggccatccgggccagagatgagtgggaccggcagaatgcccggctgcggcaggagaatgcccggctgcggctggagaacagaaggctgaagcgggagaacagaagcctcttccggcaggccctgcggctgcccggggagggcggcaatggcaccccagctgaggcccggcgggtgcctgaggaggccagcaccaacagaagagcccgggacagcggccgggaggatgagcccggcagcccccgggccctgcgggcccggctggagaagctggaggccatgtacagaagagccctgctgcagctgcacctggagcagaggggcccccggcccagcggggacaaggaggagcagcccctgcaggagccagacagcggcctgcggagccgggacagcgagcccagcggcccctggctgtag

SEQ ID NO: 174931 - DNA, 1047 bp, synthetic construct
  misc_feature 1..1047: note = Description of Artificial Sequence: Synthetic coding sequence
  source 1..1047: mol_type = other DNA
atgggcgcccggggggcccccagcagaagacggcaggccggccgccgcctgcgctacctgcccaccggcagcttccccttcctgctgctgctgctgctgctgtgcatccagctgggcggcggccagaagaagaaggagaacctgctggccgagaaggtggagcagctgatggagtggagcagccgccgcagcatcttcaggatgaatggagacaagttcaggaagttcatcaaggccccacccaggaactacagcatgattgtgatgttcaccgccctgcagccccagaggcagtgcagcgtgtgccggcaggccaatgaggagtaccagatcctggccaacagctggagatacagcagcgccttctgcaacaagctgttcttctccatggtggactatgatgagggcacagatgtgttccagcagctgaacatgaacagcgcccccaccttcatgcacttcccccccaagggccggcccaagagagctgacacctttgacctgcagagaattggatttgctgctgagcagctggccaagtggattgctgacagaacagatgtgcacatccgggtcttccggccccccaactacagcggcaccatcgccctggccctgctggtgtccctggtgggcggcctgctgtacctgcggaggaacaacctggagttcatctacaacaagacaggctgggccatggtgtccctgtgcatcgtgtttgccatgaccagcggccagatgtggaaccacatccggggccccccctatgcccacaagaacccccacaacggccaggtgtcctacatccacggcagcagccaggcccagtttgtggccgagagccacatcatcctggtgctgaatgctgccatcaccatgggcatggtgctgctgaatgaagctgccaccagcaaaggagatgtgggcaagaggcgcatcatctgcctggtgggcctgggcctggtggtgttcttcttctccttcctgctgagcatcttccgcagcaagtaccacggctacccctacagcgacctggactttgaatag

SEQ ID NO: 174932 - DNA, 1044 bp, synthetic construct
  misc_feature 1..1044: note = Description of Artificial Sequence: Synthetic coding sequence
  source 1..1044: mol_type = other DNA
atgggcgcccggggggcccccagcagaagacggcaggccggccgccgcctgcgctacctgcccaccggcagcttccccttcctgctgctgctgctgctgctgtgcatccagctgggcggcggccagaagaagaaggagaacctgctggccgagaaggtggagcagctgatggagtggagcagccgccgcagcatcttcaggatgaatggagacaagttcaggaagttcatcaaggccccacccaggaactacagcatgattgtgatgttcaccgccctgcagccccagaggcagtgcagcgtgtgccggcaggccaatgaggagtaccagatcctggccaacagctggagatacagcagcgccttctgcaacaagctgttcttctccatggtggactatgatgagggcacagatgtgttccagcagctgaacatgaacagcgcccccaccttcatgcacttcccccccaagggccggcccaagagagctgacacctttgacctgcagagaattggatttgctgctgagcagctggccaagtggattgctgacagaacagatgtgcacatccgggtcttccggccccccaactacagcggcaccatcgccctggccctgctggtgtccctggtgggcggcctgctgtacctgcggaggaacaacctggagttcatctacaacaagacaggctgggccatggtgtccctgtgcatcgtgtttgccatgaccagcggccagatgtggaaccacatccggggccccccctatgcccacaagaacccccacaacggccaggtgtcctacatccacggcagcagccaggcccagtttgtggccgagagccacatcatcctggtgctgaatgctgccatcaccatgggcatggtgctgctgaatgaagctgccaccagcaaaggagatgtgggcaagaggcgcatcatctgcctggtgggcctgggcctggtggtgttcttcttctccttcctgctgagcatcttccgcagcaagtaccacggctacccctacagcttcctgatcaagtag

SEQ ID NO: 174933 - DNA, 1047 bp, synthetic construct; identical to SEQ ID NO: 174931
  misc_feature 1..1047: note = Description of Artificial Sequence: Synthetic coding sequence
  source 1..1047: mol_type = other DNA

SEQ ID NO: 174934 - DNA, 1047 bp, synthetic construct; identical to SEQ ID NO: 174931
  misc_feature 1..1047: note = Description of Artificial Sequence: Synthetic coding sequence
  source 1..1047: mol_type = other DNA

SEQ ID NO: 174935 - DNA, 534 bp, synthetic construct
  misc_feature 1..534: note = Description of Artificial Sequence: Synthetic coding sequence
  source 1..534: mol_type = other DNA
atggcccaccctgtgcagagcgagttccccagcgcccaggagcccggcagcgctgccttcctggacctgcctgagatggagatcctgctgaccaaggccgagaacaaggatgacaagaccctgaacctgagcaagaccctgagcggccccctggacctggagcagaacagccagggcctgcccttcaaggccatcagcgagggccacctggaggcccccctgcccaggagccccagccgggccagcagccggcgggccagcagcatcgccaccaccagctatgcccaggaccaggaggccccccgggactacctgatcctggccgtggtggcctgcttctgccctgtgtggcccctgaacctgatccccctcatcatcagcatcatgagccgcagctccatgcagcagggcaatgtggatggagcccggcggctgggccgcctggcccggctgctgagcatcaccctcatcatcatgggcatcgtcatcatcatggtggccgtgacagtgaacttcaccgtgcagaagaagtag

SEQ ID NO: 174936 - DNA, 1173 bp, synthetic construct
  misc_feature 1..1173: note = Description of Artificial Sequence: Synthetic coding sequence
  source 1..1173: mol_type = other DNA
atggctgtgtctgagagccagctgaagaagatggtgtccaagtacaagtacagagacctgactgtgcgggagaccgtgaatgtcatcaccctgtacaaggacctgaagcctgtgctggacagctatgtgttcaatgatggcagcagccgggagctgatgaacctgaccggcaccatccctgtgccctaccggggcaacacctacaacatccccatctgcctgtggctgctggacacctacccctacaacccccccatctgctttgtgaagcccaccagctccatgaccatcaagacaggcaagcacgtggatgccaacgggaagatctacctgccctacctgcacgagtggaagcacccccagagcgacctgctgggcctcatccaggtgatgattgtggtgtttggagatgagccccctgtgttcagccggcccatcagcgccagctacccaccctaccaggccaccggcccccccaacaccagctacatgcctggcatgcctgggggcatcagcccctaccccagcggctacccacccaaccccagcggctacccaggctgcccctacccacctgggggcccctacccagccaccaccagcagccagtaccccagccagccccctgtgaccaccgtgggccccagcagagatggcaccatcagcgaggacaccatccgggccagcctcatctctgctgtgtctgacaagctgcgctggaggatgaaggaggagatggaccgggcccaggccgagctgaatgccctgaagaggacagaggaggacctgaagaagggccaccagaagctggaggagatggtgacccggctggaccaggaggtggccgaggtggacaagaacatcgagctgctgaagaagaaggatgaggagctgagcagcgccctggagaagatggagaaccagagcgagaacaatgacattgatgaagtcatcatccccacagcccccctgtacaagcagatcctgaacctgtatgcagaagaaaatgccatcgaggacaccatcttctacctgggggaggccctgcggcggggcgtcatcgacctggatgtgttcctgaagcacgtgcggctgctgagcaggaagcagttccagctgcgggccctgatgcagaaggccaggaagacagctggcctgagtgacctgtactag

SEQ ID NO: 174937 - DNA, 858 bp, synthetic construct
  misc_feature 1..858: note = Description of Artificial Sequence: Synthetic coding sequence
  source 1..858: mol_type = other DNA
atggctgtgtctgagagccagctgaagaagatggtgtccaagccccagagcgacctgctgggcctcatccaggtgatgattgtggtgtttggagatgagccccctgtgttcagccggcccatcagcgccagctacccaccctaccaggccactggaccacccaacaccagctacatgcctggcatgcctgggggcatcagcccctaccccagcggctacccacccaaccccagcggctacccaggctgcccctacccacctgggggcccctacccagccaccaccagcagccagtaccccagccagccccctgtgaccaccgtgggccccagcagagatggcaccatcagcgaggacaccatccgggccagcctcatctctgctgtgtctgacaagctgcgctggaggatgaaggaggagatggaccgggcccaggccgagctgaatgccctgaagaggacagaggaggacctgaagaagggccaccagaagctggaggagatggtgacccggctggaccaggaggtggccgaggtggacaagaacatcgagctgctgaagaagaaggatgaggagctgagcagcgccctggagaagatggagaaccagagtgaaaataatgacattgatgaggtgatcatccccacagcccccctgtacaagcagatcctgaacctgtatgcagaggagaatgccatcgaggacaccatcttctacctgggggaggccctgcggcggggcgtgattgacctggatgtgttcctgaagcacgtgcggctgctgagcaggaagcagttccagctgcgggccctgatgcagaaggccaggaagacagctggcctgagtgacctgtactag

SEQ ID NO: 174938 - DNA, 972 bp, synthetic construct
  misc_feature 1..972: note = Description of Artificial Sequence: Synthetic coding sequence
  source 1..972: mol_type = other DNA
atggcccggggccctggcctggcccccccacccctgcggctgcccctgctgctgctggtgctggccgctgtgacaggccacacagctgcccaggacaactgcacctgccccaccaacaagatgacagtgtgcagcccagatggccctgggggccgctgccagtgccgggccctgggcagcggcatggctgtggactgcagcaccctgaccagcaagtgcctgctgctgaaggccaggatgtctgcccccaagaatgcccggaccctggtgcggcccagcgagcacgccctggtggacaatgatggcctgtatgaccctgactgtgaccctgagggccgcttcaaggcccggcagtgcaaccagacctctgtgtgctggtgtgtgaacagcgtgggcgtgcggaggacagacaagggggacctgagcctgcgctgtgatgagctggtgaggacccaccacatcctgattgacctgcggcaccggcccacagctggggccttcaaccacagcgacctggatgctgagctgcggcggctcttccgggagcgctaccgcctgcaccccaagtttgtggccgctgtgcactatgagcagcccaccatccagatcgagctgcggcagaacaccagccagaaggctgctggagatgtggacattggagatgctgcctactactttgagcgggacatcaagggggagagcctcttccagggccggggcggcctggacctgcgggtgcggggggagcccctgcaggtggagaggaccctcatctactacctggatgagatcccccccaagttctccatgaagaggctgacagctggcctgattgctgtgattgtggtggtggtggtggccctggtggccggcatggctgtgctggtgatcaccaacagaaggaagagcggcaagtacaagaaggtggagatcaaggagctgggggagctgaggaaggagcccagcctgtag

SEQ ID NO: 174939 - DNA, 1353 bp, synthetic construct
  misc_feature 1..1353: note = Description of Artificial Sequence: Synthetic coding sequence
  source 1..1353: mol_type = other DNA
atgggcgcccctcctggctaccggcccagcgcctgggtgcacctgctgcaccagctgcccagggctgacttccagctgcggcctgtgcccagcgtgtttgccccccaggagcaggagtaccagcaggccctgctgctggtggccgccctggccggcctgggcctgggcctgagcctcatcttcatcgctgtgtacctgatccgcttctgctgctgccggcccccagagcccccaggcagcaagatccccagccctgggggcggctgtgtgacctggagctgcatcgtggccctgctggccggctgcacaggaattggaattggcttctacggcaacagcgagaccagtgatggagtgtcccagctgagcagcgccctgctgcacgccaaccacaccctgagcaccatcgaccacctggtgctggagaccgtggagcggctgggggaggccgtgaggacagagctgaccaccctggaggaggtgctggagcccaggacagagctggtggccgccgcccggggggcccggcggcaggccgaggccgccgcccagcagctgcagggcctggccttctggcagggcgtgcccctgagccccctgcaggtggccgagaatgtgtcctttgtggaggagtaccgctggctggcctacgtgctgctgctgctgctggagctgctggtgtgcctcttcaccctgctgggcctggccaagcagagcaagtggctggtgattgtgatgacagtgatgagcctgctggtgctggtgctgtcctggggctccatgggcctggaggccgccacagctgtgggcctgagtgacttctgcagcaacccagacccctacgtgctgaacctgacccaggaggagaccggcctgagcagtgacatcctgagctactacctgctgtgcaacagagctgtgagcaaccccttccagcagaggctgaccctgagccagagggccctggccaacatccacagccagctgctgggcctggagcgggaggccgtgccccagttccccagcgcccagaagcccctgctgagcctggaggagaccctgaatgtgacagagggcaacttccaccagctggtggccctgctgcactgccgcagcctgcacaaggactatggagctgccctgcggggcctgtgtgaagatgccctggagggcctgctcttcctgctgctcttcagcctgctgtctgctggggccctggccacagccctgtgcagcctgccccgggcctgggccctcttccccccatctgatgattatgatgacacagatgatgatgaccccttcaacccccaggagagcaagagatttgtgcagtggcagagcagcatctag

SEQ ID NO: 174940 - DNA, 1383 bp, synthetic construct
  misc_feature 1..1383: note = Description of Artificial Sequence: Synthetic coding sequence
  source 1..1383: mol_type = other DNA
atgggcgcccctcctggctaccggcccagcgcctgggtgcacctgctgcaccagctgcccagggctgacttccagctgcggcctgtgcccagcgtgtttgccccccaggagcaggagtaccagcaggccctgctgctggtggccgccctggccggcctgggcctgggcctgagcctcatcttcatcgctgtgtacctgatccgcttctgctgctgccggcccccagagcccccaggcagcaagatccccagccctgggggcggctgtgtgacctggagctgcatcgtggccctgctggccggctgcacaggaattggaattggcttctacggcaacagcgagaccagtgatggagtgtcccagctgagcagcgccctgctgcacgccaaccacaccctgagcaccatcgaccacctggtgctggagaccgtggagcggctgggggaggccgtgaggacagagctgaccaccctggaggaggtgctggagcccaggacagagctggtggccgccgcccggggggcccggcggcaggccgaggccgccgcccagcagctgcagggcctggccttctggcagggcgtgcccctgagccccctgcaggtggccgagaatgtgtcctttgtggaggagtaccgctggctggcctacgtgctgctgctgctgctggagctgctggtgtgcctcttcaccctgctgggcctggccaagcagagcaagtggctggtgattgtgatgacagtgatgagcctgctggtgctggtgctgtcctggggctccatgggcctggaggccgccacagctgtgggcctgagtgacttctgcagcaacccagacccctacgtgctgaacctgacccaggaggagaccggcctgagcagtgacatcctgagctactacctgctgtgcaacagagctgtgagcaaccccttccagcagaggctgaccctgagccagagggccctggccaacatccacagccagctgctgggcctggagcgggaggccgtgccccagttccccagcgcccagaagcccctgctgagcctggaggagaccctgaatgtgacagagggcaacttccaccagctggtggccctgctgcactgccgcagcctgcacaaggactatggagctgccctgcggggcctgtgtgaagatgccctggagggcctgctcttcctgctgctcttcagcctgctgtctgctggggccctggccacagccctgtgcagcctgccccgggcctgggccctcttccccccaagaaaccccagcgccctgtgcagcggcagccggctgtctgagcccctgctgcctgctggcctggagcccggcagccccctgcgctccttccctggctgcagaagaagaccccactag

SEQ ID NO: 174941 - DNA, 1362 bp, synthetic construct
  misc_feature 1..1362: note = Description of Artificial Sequence: Synthetic coding sequence
  source 1..1362: mol_type = other DNA
atgggcgcccctcctggctaccggcccagcgcctgggtgcacctgctgcaccagctgcccagggctgacttccagctgcggcctgtgcccagcgtgtttgccccccaggagcaggagtaccagcaggaccagagcagcctggccgtgacccagaggcccccacccaccacccccctgcaccggctgcggccccggccccggctgaccccagccctggcccggcggcccccagaggccgcccggggggacccccggccccagagccccccagaggccctgctgctggtggccgccctggccggcctgggcctgggcctgagcctcatcttcatcgctgtgtacctgatccgcttctgctgctgcaggcctcctgagcccccaggcagcaagatccccagccctgggggcggctgtgtgacctggagctgcatcgtggccctgctggccggctgcaccggcatcggcatcggcttctacggcaacagcgagaccagtgatggagtgtcccagctgagcagcgccctgctgcacgccaaccacaccctgagcaccatcgaccacctggtgctggagaccgtggagcggctgggggaggccgtgaggacagagctgaccaccctggaggaggtgctggagcccaggacagagctggtggccgccgcccggggggcccggcggcaggccgaggccgccgcccagcagctgcagggcctggccttctggcagggcgtgcccctgagccccctgcaggtggctgaaaatgtgtcctttgtggaggagtaccgctggctggcctacgtgctgctgctgctgctggagctgctggtgtgcctcttcaccctgctgggcctggccaagcagagcaagtggctggtgattgtgatgacagtgatgagcctgctggtgctggtgctgtcctggggctccatgggcctggaggccgccacagctgtgggcctgagtgacttctgcagcaacccagacccctacgtgctgaacctgacccaggaggagaccggcctgagcagcgaggccgacagcgtgcctgccagcagcggccagcaccccctgcctgctgctggccctggggcccggagctgtgcctctgtgcccttctctgctgaggccagcgctgtgctgggcggggacagtgaatgtgacaggaggaagttcccccctgtgggcggcacagccaccctgccccagcctgcccagggcctgtggtgcagccctgctggccctgtgagaagaagacctggccggcctgccctgcctgccaccctgctgcctgctgtgtgccgctctgctggccactgccccctgcagcctgcccccagcctgggccccctgcccacccagtag

SEQ ID NO: 174942 - DNA, 1356 bp, synthetic construct
  misc_feature 1..1356: note = Description of Artificial Sequence: Synthetic coding sequence
  source 1..1356: mol_type = other DNA
atgggcgcccctcctggctaccggcccagcgcctgggtgcacctgctgcaccagctgcccagggctgacttccagctgcggcctgtgcccagcgtgtttgccccccaggagcaggagtaccagcaggccctgctgctggtggccgccctggccggcctgggcctgggcctgagcctcatcttcatcgctgtgtacctgatccgcttctgctgctgccggcccccagagcccccaggcagcaagatccccagccctgggggcggctgtgtgacctggagctgcatcgtggccctgctggccggctgcacaggaattggaattggcttctacggcaacagcgagaccagtgatggagtgtcccagctgagcagcgccctgctgcacgccaaccacaccctgagcaccatcgaccacctggtgctggagaccgtggagcggctgggggaggccgtgaggacagagctgaccaccctggaggaggtgctggagcccaggacagagctggtggccgccgcccggggggcccggcggcaggccgaggccgccgcccagcagctgcagggcctggccttctggcagggcgtgcccctgagccccctgcaggtggccgagaatgtgtcctttgtggaggagtaccgctggctggcctacgtgctgctgctgctgctggagctgctggtgtgcctcttcaccctgctgggcctggccaagcagagcaagtggctggtgattgtgatgacagtgatgagcctgctggtgctggtgctgtcctggggctccatgggcctggaggccgccacagctgtgggcctgagtgacttctgcagcaacccagacccctacgtgctgaacctgacccaggaggagaccggcctgagcagtgacatcctgagctactacctgctgtgcaacagagctgtgagcaaccccttccagcagaggctgaccctgagccagagggccctggccaacatccacagccagctgctgggcctggagcgggaggccgtgccccagttccccagcgcccagaagcccctgctgagcctggaggagaccctgaatgtgacagagggcaacttccaccagctggtggccctgctgcactgccgcagcctgcacaaggactatggagctgccctgcggggcctgtgtgaagatgccctggagggcctgctcttcctgctgctcttcagcctgctgtctgctggggccctggccacagccctgtgcagcctgccccgggcctgggccctcttccccccatctgatgattatgatgacacagatgatgatgaccccttcaacccccagcaggagagcaagagatttgtgcagtggcagagcagcatctag

SEQ ID NO: 174943 - DNA, 1155 bp, synthetic construct
  misc_feature 1..1155: note = Description of Artificial Sequence: Synthetic coding sequence
  source 1..1155: mol_type = other DNA
atgacccggcggggcagaagaagaagcagccacttcctgggccccccagctggagctgctggctgcacccagaggaggagccgggagctggccgctgctgccatgagccaccagacaggcatccaggcctctgaagatgtgaaggagatctttgcccgggccagaaatggcaagtaccgcctgctgaagatcagcattgaaaatgagcagctggtgattggcagctacagccagcccagcgacagctgggacaaggactatgacagctttgtgctgcccctgctggaggacaagcagccctgctacatcctcttccggctggacagccagaatgcccagggctatgagtggatcttcatcgcctggagcccagaccacagccacgtgcggcagaagatgctgtatgctgccacccgggccaccctgaagaaggagtttggaggcggccacatcaaggatgaggtgtttggcaccgtgaaggaggatgtgtccctgcacggctacaagaagtacctgctgagccagagcagccctgcccccctgacagctgctgaggaggagctgcggcagatcaagatcaatgaggtgcagacagatgtgggcgtggacaccaagcaccagaccctgcagggcgtggccttccccatcagccgggaggccttccaggccctggagaagctgaacaaccggcagctgaactacgtgcagctggagattgacatcaagaatgagatcatcatcctggccaacaccaccaacacagagctgaaggacctgcccaagaggatccccaaggacagcgcccgctaccacttcttcctgtacaagcacagccatgaaggagactacctggagagcatcgtgttcatctacagcatgcctggctacacctgcagcatccgggagaggatgctgtacagcagctgcaagagccggctgctggagatcgtggagcggcagctgcagatggatgtgatcaggaagattgaaattgacaatggagatgagctgacagctgacttcctgtatgaggaggtgcaccccaagcagcacgcccacaagcagagctttgccaagcccaagggccctgctgggaagaggggcatccggcggctcatccggggccctgctgagacagaggccaccacagactag

SEQ ID NO: 174944 - DNA, 1053 bp, synthetic construct
  misc_feature 1..1053: note = Description of Artificial Sequence: Synthetic coding sequence
  source 1..1053: mol_type = other DNA
atgagccaccagacaggcatccaggcctctgaagatgtgaaggagatctttgcccgggccagaaatggcaagtaccgcctgctgaagatcagcattgaaaatgagcagctggtgattggcagctacagccagcccagcgacagctgggacaaggactatgacagctttgtgctgcccctgctggaggacaagcagccctgctacatcctcttccggctggacagccagaatgcccagggctatgagtggatcttcatcgcctggagcccagaccacagccacgtgcggcagaagatgctgtatgctgccacccgggccaccctgaagaaggagtttggaggcggccacatcaaggatgaggtgtttggcaccgtgaaggaggatgtgtccctgcacggctacaagaagtacctgctgagccagagcagccctgcccccctgacagctgctgaggaggagctgcggcagatcaagatcaatgaggtgcagacagatgtgggcgtggacaccaagcaccagaccctgcagggcgtggccttccccatcagccgggaggccttccaggccctggagaagctgaacaaccggcagctgaactacgtgcagctggagattgacatcaagaatgagatcatcatcctggccaacaccaccaacacagagctgaaggacctgcccaagaggatccccaaggacagcgcccgctaccacttcttcctgtacaagcacagccatgaaggagactacctggagagcatcgtgttcatctacagcatgcctggctacacctgcagcatccgggagaggatgctgtacagcagctgcaagagccggctgctggagatcgtggagcggcagctgcagatggatgtgatcaggaagattgaaattgacaatggagatgagctgacagctgacttcctgtatgaggaggtgcaccccaagcagcacgcccacaagcagagctttgccaagcccaagggccctgctgggaagaggggcatccggcggctcatccggggccctgctgagacagaggccaccacagactag

SEQ ID NO: 174945 - DNA, 1074 bp, synthetic construct
  misc_feature 1..1074: note = Description of Artificial Sequence: Synthetic coding sequence
  source 1..1074: mol_type = other DNA
atgagccaccagacaggcatccaggcctctgaagatgtgaaggagatctttgcccgggccagaaatggcaagtaccgcctgctgaagatcagcattgaaaatgagcagctggtgattggcagctacagccagcccagcgacagctgggacaaggactatgacagctttgtgctgcccctgctggaggacaagcagccctgctacatcctcttccggctggacagccagaatgcccagggctatgagtggatcttcatcgcctggagcccagaccacagccacgtgcggcagaagatgctgtatgctgccacccgggccaccctgaagaaggagtttggaggcggccacatcaaggatgaggtgtttggcaccgtgaaggaggatgtgtccctgcacggctacaagaagtacctgctgagccagagcagccctgcccccctgacagctgctgaggaggagctgcggcagatcaagatcaatgaaagccctgaggaccacatcggcgtgcagacagatgtgggcgtggacaccaagcaccagaccctgcagggcgtggccttccccatcagccgggaggccttccaggccctggagaagctgaacaaccggcagctgaactacgtgcagctggagattgacatcaagaatgagatcatcatcctggccaacaccaccaacacagagctgaaggacctgcccaagaggatccccaaggacagcgcccgctaccacttcttcctgtacaagcacagccatgaaggagactacctggagagcatcgtgttcatctacagcatgcctggctacacctgcagcatccgggagaggatgctgtacagcagctgcaagagccggctgctggagatcgtggagcggcagctgcagatggatgtgatcaggaagattgaaattgacaatggagatgagctgacagctgacttcctgtatgaggaggtgcaccccaagcagcacgcccacaagcagagctttgccaagcccaagggccctgctgggaagaggggcatcagaagactcatccggggccctgctgagacagaggccaccacagactag

SEQ ID NO: 174946 - DNA, 1050 bp, synthetic construct
  misc_feature 1..1050: note = Description of Artificial Sequence: Synthetic coding sequence
  source 1..1050: mol_type = other DNA
atggcccaccagacaggcatccacgccacagaggagctgaaggagttctttgccaaggcccgggccggctctgtgcggctcatcaaggtggtgattgaagatgagcagctggtgctgggcgccagccaggagcctgtgggccgctgggaccaggactatgacagagctgtgctgcccctgctggatgcccagcagccctgctacctgctgtaccgcctggacagccagaatgcccagggctttgagtggctgttcctggcctggagcccagacaacagccctgtgcggctgaagatgctgtatgctgccacccgggccaccgtgaagaaggagtttggaggcggccacatcaaggatgagctgtttggcaccgtgaaggatgacctgagctttgctggctaccagaagcacctgagcagctgtgccgccccagcccccctgaccagcgctgagcgggagctgcagcagatccgcatcaatgaggtgaagacagagatctctgtggagagcaagcaccagaccctgcagggcctggccttccccctgcagcctgaggcccagagggccctgcagcagctgaagcagaagatggtgaactacatccagatgaagctggacctggagcgggagaccatcgagctggtgcacacagagcccacagatgtggcccagctgcccagccgggtgcccagagatgctgcccgctaccacttcttcctgtacaagcacacccatgaaggagaccccctggagagcgtggtgttcatctacagcatgcctggctacaagtgcagcatcaaggagaggatgctgtacagcagctgcaagagccggctgctggacagcgtggagcaggacttccacctggagatcgccaagaagattgaaattggagatggagctgagctgacagctgagttcctgtatgatgaggtgcaccccaagcagcacgccttcaagcaggcctttgccaagcccaagggccctgggggcaagaggggccacaagaggctcatccggggccctggagaaaatggagatgacagctag

SEQ ID NO: 174947 - DNA, 483 bp, synthetic construct
  misc_feature 1..483: note = Description of Artificial Sequence: Synthetic coding sequence
  source 1..483: mol_type = other DNA
atggaggagggcagcagcagccctgtgtcccctgtggacagcctgggcaccagcgaggaggagctggagcggcagcccaagagatttggaaggaagaggcgctacagcaagaagagcagtgaagatggcagccccaccccaggcaagaggggcaagaagggcagccccagcgcccagagctttgaggagctgcagagccagaggatcctggccaacgtgcgggagcggcagaggacccagagcctgaatgaggcctttgctgccctgaggaagatcatccccaccctgcccagcgacaagctgagcaagatccagaccctgaagctggccgcccgctacatcgacttcctgtaccaggtgctgcagagtgatgagatggacaacaagatgaccagctgcagctatgtggcccacgagcggctgtcctatgccttctctgtgtggaggatggagggcgcctggagcatgtctgccagccactag

SEQ ID NO: 174948 - DNA, 1476 bp, synthetic construct
  misc_feature 1..1476: note = Description of Artificial Sequence: Synthetic coding sequence
  source 1..1476: mol_type = other DNA
atgaacccagctgctgaggccgagttcaacatcctgctggccacagacagctacaaggtgacccactacaagcagtacccacccaacaccagcaaggtgtacagctactttgagtgccgggagaagaagacagagaacagcaagctgaggaaggtgaagtatgaggagaccgtcttctacggcctgcagtacatcctgaacaagtacctgaagggcaaggtggtgaccaaggagaagatccaggaggccaaggatgtgtacaaggagcacttccaggatgatgtgttcaatgagaagggctggaactacatcctggagaagtatgatggccacctgcccatcgagatcaaggctgtgcctgagggctttgtgatccccagaggaaatgtgctcttcaccgtggagaacacagatcctgagtgctactggctgaccaactggattgagaccatcctggtgcagagctggtaccccatcaccgtggccaccaacagccgggagcagaagaagatcctggccaagtacctgctggagaccagcggcaacctggatggcctggagtacaagctgcatgactttggctacagaggagtgagcagccaggagacagctggcatcggggccagcgcccacctggtgaacttcaagggcacagacacagtggccggcctggccctgatcaagaagtactacggcaccaaggaccctgtgcccggctacagcgtgcctgctgctgagcacagcaccatcacagcctggggcaaggaccacgagaaggatgcctttgagcacatcgtgacccagttcagctctgtgcctgtgtctgtggtgtctgacagctatgacatctacaatgcctgtgagaagatctggggcgaggacctgcggcacctgattgtgagccgcagcacccaggcccccctcatcatccggccagacagcggcaaccccctggacacagtgctgaaggtgctggagatcctgggcaagaagtttcctgtgacagagaacagcaagggctacaagctgctgcccccctacctgcgggtcatccagggagatggagtggacatcaacaccctgcaggagatcgtggagggcatgaagcagaagatgtggagcattgagaacatcgccttcggcagcggcggcggcctgctgcagaagctgacccgggacctgctgaactgcagcttcaagtgcagctatgtggtgaccaacggcctgggcatcaacgtgttcaaggaccctgtggccgaccccaacaagaggagcaagaagggccgcctgagcctgcacaggaccccagctggcaactttgtgaccctggaggagggcaaaggagacctggaggagtatggccaggacctgctgcacacagtgttcaagaatggcaaggtgaccaagagctacagctttgatgagatcaggaagaatgcccagctgaacatcgagctggaggccgcccaccactag

SEQ ID NO: 174949 - DNA, 672 bp, synthetic construct
  misc_feature 1..672: note = Description of Artificial Sequence: Synthetic coding sequence
  source 1..672: mol_type = other DNA
atgaagctgcactacgtggccgtgctgaccctggccatcctgatgttcctgacctggctgcctgagagcctgagctgcaacaaggccctgtgtgccagtgatgtgtccaaatgtctcatccaggagctgtgccagtgcaggcctggagagggcaactgcagctgctgcaaggagtgcatgctgtgcctgggcgccctgtgggatgagtgctgtgactgtgtgggcatgtgcaaccccaggaactacagcgacaccccacccaccagcaagagcacagtggaggagctgcacgagcccatccccagcctcttccgggccctgacagaaggagacacccagctgaactggaacatcgtgtccttccctgtggccgaggagctgagccaccacgagaacctggtgtccttcctggagaccgtgaaccagccccaccaccagaatgtgtctgtgcccagcaacaacgtgcacgccccctacagcagtgacaaggagcacatgtgcaccgtggtgtactttgatgactgcatgagcatccaccagtgcaagatcagctgtgagagcatgggcgccagcaagtaccgctggttccacaatgcctgctgtgagtgcatcggcccagaatgtattgattatggcagcaagacagtgaagtgcatgaactgcatgttttag

SEQ ID NO: 174950 - DNA, 2451 bp, synthetic construct
  misc_feature 1..2451: note = Description of Artificial Sequence: Synthetic coding sequence
  source 1..2451: mol_type = other DNA
atggctgtgtccctggatgatgatgtgcccctcatcctgaccctggatgagggcggcagcgcccccctggcccccagcaatggcctgggccaggaggagctgcccagcaagaatggaggcagctatgccatccatgacagccaggcccccagcctgagcagcggcggggagagcagccccagcagccctgcccacaactgggagatgaactaccaggaggccgccatctacctgcaggagggggagaacaatgacaagttcttcacccaccccaaggatgccaaggccctggccgcctacctgtttgcccacaaccacctgttctacctgatggagctggccacagccctgctgctgctgctgctgagcctgtgtgaggccccagctgtgcctgccctgcggctgggcatctacgtgcacgccaccctggagctgtttgccctgatggtggtggtgtttgagctgtgcatgaagctgcgctggctgggcctgcacaccttcatccgccacaagaggaccatggtgaagacctctgtgctggtggtgcagtttgtggaggccatcgtggtgctggtgcggcagatgagccacgtgcgggtgacccgggccctgcgctgcatcttcctggtggactgccgctactgcggcggcgtgagaagaaacctgcggcagatcttccagagcctgccccccttcatggacatcctgctgctgctgctcttcttcatgatcatctttgccatcctgggcttctacctgttcagccccaaccccagcgacccctacttcagcaccctggagaacagcatcgtgtccctgtttgtgctgctgaccacagccaacttcccagatgtgatgatgcccagctacagcaggaacccctggagctgtgtgttcttcatcgtgtacctgagcattgagctgtacttcatcatgaacctgctgctggccgtggtgtttgacaccttcaatgacatcgagaagaggaagttcaagagcctgctgctgcacaagaggacagccatccagcacgcctaccgcctgctgatcagccagaggaggcctgctggcatctcctaccggcagtttgagggcctgatgaggttctacaagcccaggatgtctgcccgggagcgctacctgaccttcaaggccctgaaccagaacaacacccccctgctgagcctgaaggacttctatgacatctatgaggtggccgccctgaagtggaaggccaagaagaaccgggagcactggtttgatgagctgcccaggacagccctgctgatcttcaagggcatcaacatcctggtgaagagcaaggccttccagtacttcatgtacctggtggtggccgtgaatggagtgtggatcctggtggagaccttcatgctgaagggcggcaacttcttcagcaagcacgtgccctggagctacctggtgttcctgaccatctacggcgtggagctgttcctgaaggtggccggcctgggccctgtggagtacctgagcagcggctggaacctgtttgacttctctgtgacagtgtttgccttcctgggcctgctggccctggccctgaacatggagcccttctacttcatcgtggtgctgcggcccctgcagctgctgcggctcttcaagctgaaggagcgctacagaaatgtgctggacaccatgtttgagctgctgcccaggatggccagcctgggcctgaccctgctgatcttctactacagctttgccatcgtgggcatggagttcttctgtggcatcgtgttccccaactgctgcaacaccagcacagtggctgatgcctaccgctggaggaaccacacagtgggcaacagaacagtggtggaggagggctactactacctgaacaactttgacaacatcctgaacagctttgtgaccctgtttgagctgactgtggtgaacaactggtacatcatcatggagggcgtgaccagccagaccagccactggagccggctgtacttcatgaccttctacatcgtgaccatggtggtgatgaccatcatcgtggccttcatcctggaggcctttgtgttcaggatgaactacagcaggaagaaccaggacagcgaggtggatggcggcatcaccctggagaaggagatcagcaaggaggagctggtggccgtgctggagctgtaccgggaggcccggggggccagcagtgatgtgacccggctgctggagaccctgagccagatggagcgctaccagcagcacagcatggtgttcctgggccgccgcagcaggaccaagagtgacctgagcctgaagatgtaccaggaggagatccaggagtggtatgaggagcacgcccgggagcaggagcagcagaggcagctgagcagcagcgctgccccagctgcccagcagcccccaggcagccggcagaggagccagacagtgacctag

SEQ ID NO: 174951 - DNA, 2247 bp, synthetic construct
  misc_feature 1..2247: note = Description of Artificial Sequence: Synthetic coding sequence
  source 1..2247: mol_type = other DNA
atgaactaccaggaggccgccatctacctgcaggagggggagaacaatgacaagttcttcacccaccccaaggatgccaaggccctggccgcctacctgtttgcccacaaccacctgttctacctgatggagctggccacagccctgctgctgctgctgctgagcctgtgtgaggccccagctgtgcctgccctgcggctgggcatctacgtgcacgccaccctggagctgtttgccctgatggtggtggtgtttgagctgtgcatgaagctgcgctggctgggcctgcacaccttcatccgccacaagaggaccatggtgaagacctctgtgctggtggtgcagtttgtggaggccatcgtggtgctggtgcggcagatgagccacgtgcgggtgacccgggccctgcgctgcatcttcctggtggactgccgctactgcggcggcgtgagaagaaacctgcggcagatcttccagagcctgccccccttcatggacatcctgctgctgctgctcttcttcatgatcatctttgccatcctgggcttctacctgttcagccccaaccccagcgacccctacttcagcaccctggagaacagcatcgtgtccctgtttgtgctgctgaccacagccaacttcccagatgtgatgatgcccagctacagcaggaacccctggagctgtgtgttcttcatcgtgtacctgagcattgagctgtacttcatcatgaacctgctgctggccgtggtgtttgacaccttcaatgacatcgagaagaggaagttcaagagcctgctgctgcacaagaggacagccatccagcacgcctaccgcctgctgatcagccagaggaggcctgctggcatctcctaccggcagtttgagggcctgatgaggttctacaagcccaggatgtctgcccgggagcgctacctgaccttcaaggccctgaaccagaacaacacccccctgctgagcctgaaggacttctatgacatctatgaggtggccgccctgaagtggaaggccaagaagaaccgggagcactggtttgatgagctgcccaggacagccctgctgatcttcaagggcatcaacatcctggtgaagagcaaggccttccagtacttcatgtacctggtggtggccgtgaatggagtgtggatcctggtggagaccttcatgctgaagggcggcaacttcttcagcaagcacgtgccctggagctacctggtgttcctgaccatctacggcgtggagctgttcctgaaggtggccggcctgggccctgtggagtacctgagcagcggctggaacctgtttgacttctctgtgacagtgtttgccttcctgggcctgctggccctggccctgaacatggagcccttctacttcatcgtggtgctgcggcccctgcagctgctgcggctcttcaagctgaaggagcgctacagaaatgtgctggacaccatgtttgagctgctgcccaggatggccagcctgggcctgaccctgctgatcttctactacagctttgccatcgtgggcatggagttcttctgtggcatcgtgttccccaactgctgcaacaccagcacagtggctgatgcctaccgctggaggaaccacacagtgggcaacagaacagtggtggaggagggctactactacctgaacaactttgacaacatcctgaacagctttgtgaccctgtttgagctgactgtggtgaacaactggtacatcatcatggagggcgtgaccagccagaccagccactggagccggctgtacttcatgaccttctacatcgtgaccatggtggtgatgaccatcatcgtggccttcatcctggaggcctttgtgttcaggatgaactacagcaggaagaaccaggacagcgaggtggatggcggcatcaccctggagaaggagatcagcaaggaggagctggtggccgtgctggagctgtaccgggaggcccggggggccagcagtgatgtgacccggctgctggagaccctgagccagatggagcgctaccagcagcacagcatggtgttcctgggccgccgcagcaggaccaagagtgacctgagcctgaagatgtaccaggaggagatccaggagtggtatgaggagcacgcccgggagcaggagcagcagaggcagctgagcagcagcgctgccccagctgcccagcagcccccaggcagccggcagaggagccagacagtgacctag

SEQ ID NO: 174952 - DNA, 2667 bp, synthetic construct
  misc_feature 1..2667: note = Description of Artificial Sequence: Synthetic coding sequence
  source 1..2667: mol_type = other DNA
atggagagctgctacatcgcccaggccggcctggagctgctgggcagcagcagcagccccaccctgaccagccagagcgctgagatcacagaagatgccagcaatggaggagtgtctgagcagcacccctggcccagcggctttgagcgggagctgaagccagagaccatcagcagccctggctaccacatcctgcgggccaccggggaggagaacatggctgtgtccctggatgatgatgtgcccctcatcctgaccctggatgagggcggcagcgcccccctggcccccagcaatggcctgggccaggaggagctgcccagcaagaatggaggcagctatgccatccatgacagccaggcccccagcctgagcagcggcggggagagcagccccagcagccctgcccacaactgggagatgaactaccaggaggccgccatctacctgcaggagggggagaacaatgacaagttcttcacccaccccaaggatgccaaggccctggccgcctacctgtttgcccacaaccacctgttctacctgatggagctggccacagccctgctgctgctgctgctgagcctgtgtgaggccccagctgtgcctgccctgcggctgggcatctacgtgcacgccaccctggagctgtttgccctgatggtggtggtgtttgagctgtgcatgaagctgcgctggctgggcctgcacaccttcatccgccacaagaggaccatggtgaagacctctgtgctggtggtgcagtttgtggaggccatcgtggtgctggtgcggcagatgagccacgtgcgggtgacccgggccctgcgctgcatcttcctggtggactgccgctactgcggcggcgtgagaagaaacctgcggcagatcttccagagcctgccccccttcatggacatcctgctgctgctgctcttcttcatgatcatctttgccatcctgggcttctacctgttcagccccaaccccagcgacccctacttcagcaccctggagaacagcatcgtgtccctgtttgtgctgctgaccacagccaacttcccagatgtgatgatgcccagctacagcaggaacccctggagctgtgtgttcttcatcgtgtacctgagcattgagctgtacttcatcatgaacctgctgctggccgtggtgtttgacaccttcaatgacatcgagaagaggaagttcaagagcctgctgctgcacaagaggacagccatccagcacgcctaccgcctgctgatcagccagaggaggcctgctggcatctcctaccggcagtttgagggcctgatgaggttctacaagcccaggatgtctgcccgggagcgctacctgaccttcaaggccctgaaccagaacaacacccccctgctgagcctgaaggacttctatgacatctatgaggtggccgccctgaagtggaaggccaagaagaaccgggagcactggtttgatgagctgcccaggacagccctgctgatcttcaagggcatcaacatcctggtgaagagcaaggccttccagtacttcatgtacctggtggtggccgtgaatggagtgtggatcctggtggagaccttcatgctgaagggcggcaacttcttcagcaagcacgtgccctggagctacctggtgttcctgaccatctacggcgtggagctgttcctgaaggtggccggcctgggccctgtggagtacctgagcagcggctggaacctgtttgacttctctgtgacagtgtttgccttcctgggcctgctggccctggccctgaacatggagcccttctacttcatcgtggtgctgcggcccctgcagctgctgcggctcttcaagctgaaggagcgctacagaaatgtgctggacaccatgtttgagctgctgcccaggatggccagcctgggcctgaccctgctgatcttctactacagctttgccatcgtgggcatggagttcttctgtggcatcgtgttccccaactgctgcaacaccagcacagtggctgatgcctaccgctggaggaaccacacagtgggcaacagaacagtggtggaggagggctactactacctgaacaactttgacaacatcctgaacagctttgtgaccctgtttgagctgactgtggtgaacaactggtacatcatcatggagggcgtgaccagccagaccagccactggagccggctgtacttcatgaccttctacatcgtgaccatggtggtgatgaccatcatcgtggccttcatcctggaggcctttgtgttcaggatgaactacagcaggaagaaccaggacagcgaggtggatggcggcatcaccctggagaaggagatcagcaaggaggagctggtggccgtgctggagctgtaccgggaggcccggggggccagcagtgatgtgacccggctgctggagaccctgagccagatggagcgctaccagcagcacagcatggtgttcctgggccgccgcagcaggaccaagagtgacctgagcctgaagatgtaccaggaggagatccaggagtggtatgaggagcacgcccgggagcaggagcagcagaggcagctgagcagcagcgctgccccagctgcccagcagcccccaggcagccggcagaggagccagacagtgacctag

SEQ ID NO: 174953 - DNA, 2667 bp, synthetic construct; identical to SEQ ID NO: 174952
  misc_feature 1..2667: note = Description of Artificial Sequence: Synthetic coding sequence
  source 1..2667: mol_type = other DNA

SEQ ID NO: 174954 - DNA, 258 bp, synthetic construct
  misc_feature 1..258: note = Description of Artificial Sequence: Synthetic coding sequence
  source 1..258: mol_type = other DNA
atggctgtgtccctggatgatgatgtgcccctcatcctgaccctggatgagggcggcagcgcccccctggcccccagcaatggcctgggccaggaggagctgcccagcaagaatggaggcagctatgccatccatgacagccaggcccccagcctgagcagcggcggggagagcagccccagcagccctgcccacaactgggagatgaactaccaggaggccgccatctacctgcaggagggggagaacaatgactag

SEQ ID NO: 174955 - DNA, 303 bp, synthetic construct
  misc_feature 1..303: note = Description of Artificial Sequence: Synthetic coding sequence
  source 1..303: mol_type = other DNA
atggctgtgtccctggatgatgatgtgcccctcatcctgaccctggatgagggcggcagcgcccccctggcccccagcaatggcctgggccaggaggagctgcccagcaagaggcgctgctgcatgctgtgcagcagcaagcagaagccctggatcccctgcagggtcatcagtgatgtggcctgcaaggccgccagctgctttgagggcgccagcggcccctgtgacatctccatgtgggagtgctacagagtgtgcaagcagatggctgctgccatgcccagcaccaccccccggccctag

SEQ ID NO: 174956 - DNA, 2259 bp, synthetic construct
  misc_feature 1..2259: note = Description of Artificial Sequence: Synthetic coding sequence
  source 1..2259: mol_type = other DNA
atggccgagccccaggccgagagcgagcccctgctgggcggggcccggggcggcggcggggactggccagctggcctgaccacctaccgcagcatccaggtgggccctggagctgctgcccgctgggacctgtgcatcgaccaggccgtggtgttcattgaagatgccatccagtaccgcagcatcaaccaccgggtggatgccagctccatgtggctgtaccgccgctactacagcaatgtgtgccagaggaccctgtccttcaccatcttcctgatcctcttcctggccttcatcgagacccccagcagcctgaccagcacagcagatgtgcgctacagagctgccccctgggagcccccctgtggcctgacagaatctgtggaggtgctgtgcctgctggtgtttgctgctgacctgtctgtgaagggctacctgtttggctgggcccacttccagaagaacctgtggctgctgggctacctggtggtgctggtggtgtccctggtggactggacagtgtccctgagcctggtgtgccacgagcccctgcgcatccggcggctgctgcggcccttcttcctgctgcagaacagctccatgatgaagaagaccctgaagtgcatccgctggagcctgcctgagatggcctctgtgggcctgctgctggccatccacctgtgcctcttcaccatgtttggcatgctgctgtttgctgggggcaagcaggatgatggccaggaccgggagcggctgacctacttccagaacctgcctgagagcctgaccagcctgctggtgctgctgaccacagccaacaacccagatgtgatgatcccagcctacagcaagaacagagcctatgccatcttcttcatcgtgttcaccgtcatcggcagcctcttcctgatgaacctgctgacagccatcatctacagccagttccggggctacctgatgaagagcctgcagaccagcctcttcagaagaaggctgggcacccgggccgcctttgaggtgctgagctccatggtgggggagggcggggccttcccccaggccgtgggcgtgaagccccagaacctgctgcaggtgctgcagaaggtgcagctggacagcagccacaagcaggccatgatggagaaggtgcgctcctatggctctgtgctgctgtctgctgaggagttccagaagctgttcaatgagctggacagatctgtggtgaaggagcacccccccaggcctgagtaccagagccccttcctgcagagcgcccagttcctgtttggccactactactttgactacctgggcaacctgattgccctggccaacctggtgtccatctgtgtgttcctggtgctggatgctgatgtgctgcctgctgagagagatgacttcatcctgggcatcctgaactgtgtgttcatcgtgtactacctgctggagatgctgctgaaggtgtttgccctgggcctgcggggctacctgagctaccccagcaatgtgtttgatggcctgctgactgtggtgctgctggtgctggagatcagcaccctggccgtgtaccgcctgccccaccctggctggaggcctgagatggtgggcctgctgagcctgtgggacatgaccaggatgctgaacatgctgattgtgttccgcttcctgcgcatcatccccagcatgaagctgatggctgtggtggccagcacagtgctgggcctggtgcagaacatgagggccttcggcggcatcctggtggtggtgtactacgtgtttgccatcatcggcatcaacctcttccggggcgtgattgtggccctgcccggcaacagcagcctggccccagccaacggcagcgccccctgtggcagctttgagcagctggagtactgggccaacaactttgatgactttgctgctgccctggtgaccctgtggaacctgatggtggtgaacaactggcaggtgttcctggatgcctaccgccgctacagcggcccctggagcaagatctactttgtgctgtggtggctggtgagcagcgtcatctgggtgaacctcttcctggccctgatcctggagaacttcctgcacaagtgggaccccaggagccacctgcagcccctggccggcaccccagaggccacctaccagatgacagtggagctgctcttccgggacatcctggaggagcctggagaagatgagctgacagagcggctgagccagcacccccacctgtggctgtgcaggtag

SEQ ID NO: 174957 - DNA, 1407 bp, synthetic construct
  misc_feature 1..1407: note = Description of Artificial Sequence: Synthetic coding sequence
  source 1..1407: mol_type = other DNA
atgtggctgtaccgccgctactacagcaatgtgtgccagaggaccctgtccttcaccatcttcctgatcctcttcctggccttcatcgagacccccagcagcctgaccagcacagcagatgtgcgctacagagctgccccctgggagcccccctgtggcctgacagaatctgtggaggtgctgtgcctgctggtgtttgctgctgacctgtctgtgaagggctacctgtttggctgggcccacttccagaagaacctgtggctgctgggctacctggtggtgctggtggtgtccctggtggactggacagtgtccctgagcctggtgtgccacgagcccctgcgcatccggcggctgctgcggcccttcttcctgctgcagaacagctccatgatgaagaagaccctgaagtgcatccgctggagcctgcctgagatggcctctgtgggcctgctgctggccatccacctgtgcctcttcaccatgtttggcatgctgctgtttgctgggggcaagcaggatgatggccaggaccgggagcggctgacctacttccagaacctgcctgagagcctgaccagcctgctggtgctgctgaccacagccaacaacccagatgtgatgatcccagcctacagcaagaacagagcctatgccatcttcttcatcgtgttcaccgtcatcggcagcctcttcctgatgaacctgctgacagccatcatctacagccagttccggggctacctgatgaagagcctgcagaccagcctcttcagaagaaggctgggcacccgggccgcctttgaggtgctgagctccatggtgggggagggcggggccttcccccaggccacccggcggggccccagcaccagcctgcgcttctgccgggcccccagcagcagcagcgccaccaccaccctgaccacctggggcaccagcagcccctggcagacctggtgcccctttgcctgctcctggtgctggatgcagatgtgctgcctgctgtctgtgatgaccagctcctggggcttcagcacagccagcagcctgtgcaccacctgctggcgctgctgcagccgcagcctgccctgggcctgtgagggcacctgccccaccccagccacctgcctgaccggcagcagccccctgagctgctggaggcctgagatggtgggcctgctgagcctgtgggacatgaccaggatgctgaacatgctgattgtgttccgcttcctgcgcatcatccccagcatgaagctgatggctgtggtggccagcacagtgctgggcctggtgcagaacatgagggcctttggaggcatcctggtgcccggcccctgccagtggctgggcgccctgtgggagctgcgggccgccggcgtgctgggccagcagctgaggtag

SEQ ID NO: 174958 - DNA, 1584 bp, synthetic construct
  misc_feature 1..1584: note = Description of Artificial Sequence: Synthetic coding sequence
  source 1..1584: mol_type = other DNA
atgatcctgagcagctacaacaccatccagagcgtcttctgctgctgctgctgctgcagcgtgcagaagaggcagatgaggacccagatcagcctgagcacagatgaggagctgcctgagaagtacacccagaggcggcggccctggctgagccagctgagcaacaagaagcagagcaacacaggccgggtgcagcccagcaagaggaagcccctgccccccctgccccccagcgaggtggccgaggagaagatccaggtgaaggccctgtatgacttcctgccccgggagccctgcaacctggccctgcggcgggcagaggagtacctgatcctggagaagtacaacccccactggtggaaggcccgggaccggctgggcaatgaaggcctcatccccagcaactacgtgacagagaacaagatcaccaacctggagatctatgagtggtaccacaggaacatcaccaggaaccaggccgagcacctgctgcggcaggagagcaaggagggcgccttcatcgtgcgggacagccgccacctgggcagctacaccatctctgtgttcatgggcgcccggcgcagcacagaggccgccatcaagcactaccagatcaagaagaatgacagcggccagtggtacgtggccgagagacatgccttccagagcatccctgagctgatctggtaccaccagcacaatgctgctggcctgatgacccggctgcgctaccctgtgggcctgatgggcagctgcctgcctgccacagctggcttctcctatgagaagtgggagattgaccccagcgagctggccttcatcaaggagatcggcagcggccagtttggagtggtgcacctgggggagtggaggagccacatccaggtggccatcaaggccatcaatgaaggctccatgtctgaggaggacttcatcgaggaggccaaggtgatgatgaagctgagccacagcaagctggtgcagctgtatggagtgtgcatccagaggaagcccctgtacatcgtgacagagttcatggagaatggctgcctgctgaactacctgagagaaaataaaggcaagctgaggaaggagatgctgctgtctgtgtgccaggacatctgtgagggcatggagtacctggagagaaatggctacatccaccgggacctggccgccaggaactgcctggtgagcagcacctgcatcgtgaagatcagtgactttggcatgacccgctacgtgctggatgatgaatatgtgtcctcctttggagccaagttccccatcaagtggagccccccagaggtgttcctgttcaacaagtacagcagcaagagtgatgtgtggagctttggagtgctgatgtgggaggtgttcacagagggcaagatgccctttgagaacaagagcaacctgcaggtggtggaggccatcagcgagggcttccggctgtaccggccccacctggcccccatgagcatctatgaggtgatgtacagctgctggcatgagaagccagagggccggcccacctttgctgagctgctgcgggctgtgacagaaattgctgagacctggtag

SEQ ID NO: 174959 - DNA, 342 bp, synthetic construct
  misc_feature 1..342: note = Description of Artificial Sequence: Synthetic coding sequence
  source 1..342: mol_type = other DNA
atgggcggcctggagccctgcagccggctgctgctgctgcccctgctgctggccgtgtctggcctgcggcctgtgcaggcccaggcccagagcgactgcagctgcagcacagtgtcccctggggtgctggccggcatcgtgatgggagacctggtgctgactgtgctgattgccctggccgtgtacttcctgggccgcctggtgccccggggccgcggggctgctgaggccgccaccaggaagcagaggatcacagaaacagagagcccctaccaggagctgcagggccagaggagtgatgtgtacagcgacctgaacacccagaggccctactacaagtag

SEQ ID NO: 174960 - DNA, 339 bp, synthetic construct
  misc_feature 1..339: note = Description of Artificial Sequence: Synthetic coding sequence
  source 1..339: mol_type = other DNA
atgggcggcctggagccctgcagccggctgctgctgctgcccctgctgctggccgtgtctggcctgcggcctgtgcaggcccaggcccagagcgactgcagctgcagcacagtgtcccctggggtgctggccggcatcgtgatgggagacctggtgctgactgtgctgattgccctggccgtgtacttcctgggccgcctggtgccccggggccgcggggctgctgaggccaccaggaagcagaggatcacagaaacagagagcccctaccaggagctgcagggccagaggagtgatgtgtacagcgacctgaacacccagaggccctactacaagtag

SEQ ID NO: 174961 - DNA, 309 bp, synthetic construct
  misc_feature 1..309: note = Description of Artificial Sequence: Synthetic coding sequence
  source 1..309: mol_type = other DNA
atgggcggcctggagccctgcagccggctgctgctgctgcccctgctgctggccgtgtctgactgcagctgcagcacagtgtccccaggagtgctggccggcatcgtgatgggagacctggtgctgactgtgctgattgccctggccgtgtacttcctgggccgcctggtgccccggggcagaggagctgctgaggccgccaccaggaagcagaggatcacagaaacagagagcccctaccaggagctgcagggccagaggagtgatgtgtacagcgacctgaacacccagaggccctactacaagtag

SEQ ID NO: 174962 - DNA, 339 bp, synthetic construct; identical to SEQ ID NO: 174960
  misc_feature 1..339: note = Description of Artificial Sequence: Synthetic coding sequence
  source 1..339: mol_type = other DNA

SEQ ID NO: 174963 - DNA, 2673 bp, synthetic construct
  misc_feature 1..2673: note = Description of Artificial Sequence: Synthetic coding sequence
  source 1..2673: mol_type = other DNA
atggccctgcggcgctccatgggccggcccggcctgccccccctgcccctgcccccaccaccccggctgggcctgctgctggccgccctggccagcctgctgctgcctgagagcgctgctgctggcctgaagctgatgggcgcccctgtgaagctgactgtgtcccagggccagcctgtgaagctgaactgcagcgtggagggcatggaggagccagacatccagtgggtgaaggatggagctgtggtgcagaacctggaccagctgtacatccctgtgtctgagcagcactggattggcttcctgagcctgaagtctgtggagaggagtgatgctggccgctactggtgccaggtggaggatggaggagaaacagagatcagccagcctgtgtggctgactgtggagggcgtgcccttcttcaccgtggagcccaaggacctggccgtgcccccaaatgcccccttccagctgagctgtgaggccgtgggccccccagagcctgtgaccatcgtgtggtggaggggcaccaccaagattggaggccctgcccccagccccagcgtgctgaatgtgactggagtgacccagagcaccatgttcagctgtgaggcccacaacctgaagggcctggccagcagcaggacagccaccgtgcacctgcaggccctgcctgctgcccccttcaacatcaccgtgaccaagctgagcagcagcaatgcctctgtggcctggatgcctggagcagatggccgggccctgctgcagagctgcaccgtgcaggtgacccaggcccctgggggctgggaggtgctggccgtggtggtgcctgtgccccccttcacctgcctgctgcgggacctggtgcctgccaccaactacagcctgcgggtgcgctgtgccaatgccctgggccccagcccctatgctgactgggtgcccttccagaccaagggcctggccccagccagcgccccccagaacctgcacgccatcagaacagacagcggcctcatcctggagtgggaggaggtgattcctgaggcccccctggagggccccctgggcccctacaagctgtcctgggtgcaggacaatggcacccaggatgagctgactgtggagggcacccgggccaacctgaccggctgggacccccagaaggacctgattgtgcgggtgtgtgtgtccaatgctgtgggctgcggcccctggagccagcccctggtggtgagcagccatgacagagctggccagcagggccccccccacagcaggacctcctgggtgcctgtggtgctgggcgtgctgacagccctggtgacagctgctgccctggccctgatcctgctgaggaagaggaggaaggagacccgcttcggccaggcctttgacagcgtgatggcccggggggagcctgctgtgcacttccgggccgcccggagcttcaaccgggagaggcctgagagaattgaggccaccctggacagcctgggcatcagtgatgagctgaaggagaagctggaggatgtgctgatccctgagcagcagttcaccctgggccgcatgctgggcaagggggagtttggatctgtgcgggaggcccagctgaagcaggaggatggcagctttgtgaaggtggccgtgaagatgctgaaggctgacatcatcgccagcagtgacatcgaggagttcctgcgggaggccgcctgcatgaaggagtttgaccacccccacgtggccaagctggtgggcgtgtccctgcggagccgggccaagggccgcctgcccatccccatggtgatcctgcccttcatgaagcacggggacctgcacgccttcctgctggccagccgcatcggggagaaccccttcaacctgcccctgcagaccctcatccgcttcatggtggacatcgcctgtggcatggagtacctgagcagcaggaacttcatccaccgggacctggccgccaggaactgcatgctggccgaggacatgacagtgtgtgtggccgactttggcctgagcaggaagatctacagcggggactactaccggcagggctgtgccagcaagctgcctgtgaagtggctggccctggagagcctggccgacaacctgtacacagtgcagagtgatgtgtgggccttcggcgtgaccatgtgggagatcatgacccggggccagaccccctatgccggcattgaaaatgctgagatctacaactacctgattggaggcaaccggctgaagcagcccccagagtgcatggaggatgtgtatgacctgatgtaccagtgctggagcgctgaccccaagcagaggcccagcttcacctgcctgaggatggagctggagaacatcctgggccagctgtctgtgctgagcgccagccaggaccccctgtacatcaacatcgagcgggcagaggagcccacagctgggggcagcctggagctgcccggccgggaccagccctacagcggggctggagatggcagcggcatgggcgctgtgggcggcacccccagcgactgccgctacatcctgaccccaggcggcctggccgagcagcccggccaggccgagcaccagcctgagagccccctgaatgagacccagaggctgctgctgctgcagcagggcctgctgccccacagcagctgctag

SEQ ID NO: 174964 - DNA, 2529 bp, synthetic construct
  misc_feature 1..2529: note = Description of Artificial Sequence: Synthetic coding sequence
  source 1..2529: mol_type = other DNA
atggaggagccagacatccagtgggtgaaggatggagctgtggtgcagaacctggaccagctgtacatccctgtgtctgagcagcactggattggcttcctgagcctgaagtctgtggagaggagtgatgctggccgctactggtgccaggtggaggatggaggagaaacagagatcagccagcctgtgtggctgactgtggagggcgtgcccttcttcaccgtggagcccaaggacctggccgtgcccccaaatgcccccttccagctgagctgtgaggccgtgggccccccagagcctgtgaccatcgtgtggtggaggggcaccaccaagattggaggccctgcccccagccccagcgtgctgaatgtgactggagtgacccagagcaccatgttcagctgtgaggcccacaacctgaagggcctggccagcagcaggacagccaccgtgcacctgcaggccctgcctgctgcccccttcaacatcaccgtgaccaagctgagcagcagcaatgcctctgtggcctggatgcctggagcagatggccgggccctgctgcagagctgcaccgtgcaggtgacccaggcccctgggggctgggaggtgctggccgtggtggtgcctgtgccccccttcacctgcctgctgcgggacctggtgcctgccaccaactacagcctgcgggtgcgctgtgccaatgccctgggccccagcccctatgctgactgggtgcccttccagaccaagggcctggccccagccagcgccccccagaacctgcacgccatcagaacagacagcggcctcatcctggagtgggaggaggtgattcctgaggcccccctggagggccccctgggcccctacaagctgtcctgggtgcaggacaatggcacccaggatgagctgactgtggagggcacccgggccaacctgaccggctgggacccccagaaggacctgattgtgcgggtgtgtgtgtccaatgctgtgggctgcggcccctggagccagcccctggtggtgagcagccatgacagagctggccagcagggccccccccacagcaggacctcctgggtgcctgtggtgctgggcgtgctgacagccctggtgacagctgctgccctggccctgatcctgctgaggaagaggaggaaggagacccgcttcggccaggcctttgacagcgtgatggcccggggggagcctgctgtgcacttccgggccgcccggagcttcaaccgggagaggcctgagagaattgaggccaccctggacagcctgggcatcagtgatgagctgaaggagaagctggaggatgtgctgatccctgagcagcagttcaccctgggccgcatgctgggcaagggggagtttggatctgtgcgggaggcccagctgaagcaggaggatggcagctttgtgaaggtggccgtgaagatgctgaaggctgacatcatcgccagcagtgacatcgaggagttcctgcgggaggccgcctgcatgaaggagtttgaccacccccacgtggccaagctggtgggcgtgtccctgcggagccgggccaagggccgcctgcccatccccatggtgatcctgcccttcatgaagcacggggacctgcacgccttcctgctggccagccgcatcggggagaaccccttcaacctgcccctgcagaccctcatccgcttcatggtggacatcgcctgtggcatggagtacctgagcagcaggaacttcatccaccgggacctggccgccaggaactgcatgctggccgaggacatgacagtgtgtgtggccgactttggcctgagcaggaagatctacagcggggactactaccggcagggctgtgccagcaagctgcctgtgaagtggctggccctggagagcctggccgacaacctgtacacagtgcagagtgatgtgtgggccttcggcgtgaccatgtgggagatcatgacccggggccagaccccctatgccggcattgaaaatgctgagatctacaactacctgattggaggcaaccggctgaagcagcccccagagtgcatggaggatgtgtatgacctgatgtaccagtgctggagcgctgaccccaagcagaggcccagcttcacctgcctgaggatggagctggagaacatcctgggccagctgtctgtgctgagcgccagccaggaccccctgtacatcaacatcgagcgggcagaggagcccacagctgggggcagcctggagctgcccggccgggaccagccctacagcggggctggagatggcagcggcatgggcgctgtgggcggcacccccagcgactgccgctacatcctgaccccaggcggcctggccgagcagcccggccaggccgagcaccagcctgagagccccctgaatgagacccagaggctgctgctgctgcagcagggcctgcacacagtggccgtgagcccccaggccgagggcatcggggccatctggccagccctggtggccacagagctggccgactag

SEQ ID NO: 174965 - DNA, 741 bp, synthetic construct
  misc_feature 1..741: note = Description of Artificial Sequence: Synthetic coding sequence
  source 1..741: mol_type = other DNA
atgaccatggacaagtctgagctggtgcagaaggccaagctggccgagcaggccgagagatatgatgacatggccgccgccatgaaggctgtgacagagcagggccacgagctgagcaatgaggagaggaacctgctgtctgtggcctacaagaatgtggtgggcgcccggcgcagctcctggagggtcatcagcagcattgagcagaagacagaaagaaatgagaagaagcagcagatgggcaaggagtaccgggagaagattgaggccgagctgcaggacatctgcaatgatgtgctggagctgctggacaagtacctgatccccaatgccacccagcctgagagcaaggtgttctacctgaagatgaagggggactacttccgctacctgtctgaggtggccagcggggacaacaagcagaccaccgtgagcaacagccagcaggcctaccaggaggcctttgagatcagcaagaaggagatgcagcccacccaccccatccggctgggcctggccctgaacttctctgtgttctactatgagatcctgaacagccctgagaaggcctgcagcctggccaagacagcctttgatgaggccatcgccgagctggacaccctgaatgaggagagctacaaggacagcaccctcatcatgcagctgctgcgggacaacctgaccctgtggaccagcgagaaccagggagatgaaggagatgctggggagggagaaaattag

SEQ ID NO: 174966 - DNA, 741 bp, synthetic construct; identical to SEQ ID NO: 174965
  misc_feature 1..741: note = Description of Artificial Sequence: Synthetic coding sequence
  source 1..741: mol_type = other DNA

SEQ ID NO: 174967 - DNA, 303 bp, synthetic construct
  misc_feature 1..303: note = Description of Artificial Sequence: Synthetic coding sequence
  source 1..303: mol_type = other DNA
atgaccatggacaagtctgagctggtgcagaaggccaagctggccgagcaggccgagagatatgatgacatggccgccgccatgaaggctgtgacagagcagggccacgagctgagcaatgaggagaggaacctgctgtctgtggcctacaagaatgtggtgggcgcccggcgcagctcctggagggtcatcagcagcattgagcagaagacagaaagaaatgagaagaagcagcagatgggcaaggagtaccgggagaagattgaggccgagctgcaggacatctgcaatgatgtgctgtag

SEQ ID NO: 174968 - DNA, 225 bp, synthetic construct
  misc_feature 1..225: note = Description of Artificial Sequence: Synthetic coding sequence
  source 1..225: mol_type = other DNA
atgaccatggacaagtctgagctggtgcagaaggccaagctggccgagcaggccgagagatatgatgacatggccgccgccatgaaggctgtgacagagcagggccacgagctgagcaatgaggagaggaacctgctgtctgtggcctacaagaatgtggtgggcgcccggcgcagctcctggagggtcatcagcagcattgagcagaagacagaaagaaattag

SEQ ID NO: 174969 - DNA, 768 bp, synthetic construct
  misc_feature 1..768: note = Description of Artificial Sequence: Synthetic coding sequence
  source 1..768: mol_type = other DNA
atggatgaccgggaggacctggtgtaccaggccaagctggccgagcaggccgagagatatgatgagatggtggagagcatgaagaaggtggccggcatggatgtggagctgactgtggaggagaggaacctgctgtctgtggcctacaagaatgtgattggagcccggcgggcctcctggaggatcatcagcagcattgagcagaaggaggagaacaagggcggggaggacaagctgaagatgatccgggagtaccggcagatggtggagacagagctgaagctgatctgctgtgacatcctggatgtgctggacaagcacctgatcccagctgccaacacaggagagagcaaggtgttctactacaagatgaagggggactaccaccgctacctggccgagtttgccactggaaatgacaggaaggaggccgctgagaacagcctggtggcctacaaggccgccagtgacatcgccatgacagagctgccccccacccaccccatccggctgggcctggccctgaacttcagcgtcttctactatgagatcctgaacagcccagaccgggcctgccgcctggccaaggccgcctttgatgatgccatcgccgagctggacaccctgtctgaggagagctacaaggacagcaccctcatcatgcagctgctgcgggacaacctgaccctgtggaccagtgacatgcagggagatggagaggagcagaacaaggaggccctgcaggatgtggaggatgagaaccagtag

SEQ ID NO: 174970 - DNA, 702 bp, synthetic construct
  misc_feature 1..702: note = Description of Artificial Sequence: Synthetic coding sequence
  source 1..702: mol_type = other DNA
atggtggagagcatgaagaaggtggccggcatggatgtggagctgactgtggaggagaggaacctgctgtctgtggcctacaagaatgtgattggagcccggcgggcctcctggaggatcatcagcagcattgagcagaaggaggagaacaagggcggggaggacaagctgaagatgatccgggagtaccggcagatggtggagacagagctgaagctgatctgctgtgacatcctggatgtgctggacaagcacctgatcccagctgccaacacaggagagagcaaggtgttctactacaagatgaagggggactaccaccgctacctggccgagtttgccactggaaatgacaggaaggaggccgctgagaacagcctggtggcctacaaggccgccagtgacatcgccatgacagagctgccccccacccaccccatccggctgggcctggccctgaacttcagcgtcttctactatgagatcctgaacagcccagaccgggcctgccgcctggccaaggccgcctttgatgatgccatcgccgagctggacaccctgtctgaggagagctacaaggacagcaccctcatcatgcagctgctgcgggacaacctgaccctgtggaccagtgacatgcagggagatggagaggagcagaacaaggaggccctgcaggatgtggaggatgagaaccagtag

SEQ ID NO: 174971 - DNA, 744 bp, synthetic construct
  misc_feature 1..744: note = Description of Artificial Sequence: Synthetic coding sequence
  source 1..744: mol_type = other DNA
atggtggaccgggagcagctggtgcagaaggcccggctggccgagcaggccgagagatatgatgacatggctgctgccatgaagaatgtgacagagctgaatgagcccctgagcaatgaggagaggaacctgctgtctgtggcctacaagaatgtggtgggcgcccggcgcagctcctggagggtcatcagcagcattgagcagaagaccagcgcagatggaaatgagaagaagattgagatggtgcgggcctaccgggagaagattgagaaggagctggaggccgtgtgccaggatgtgctgagcctgctggacaactacctgatcaagaactgcagcgagacccagtatgagagcaaggtgttctacctgaagatgaagggggactactaccgctacctggccgaggtggccactggagagaagagggccaccgtggtggagagcagcgagaaggcctacagcgaggcccacgagatcagcaaggagcacatgcagcccacccaccccatccggctgggcctggccctgaactacagcgtcttctactatgagatccagaatgcccctgagcaggcctgccacctggccaagacagcctttgatgatgccatcgccgagctggacaccctgaatgaagattcctacaaggacagcaccctcatcatgcagctgctgcgggacaacctgaccctgtggaccagtgaccagcaggatgatgatggaggagagggcaacaactag

SEQ ID NO: 174972 - DNA, 624 bp, synthetic construct
  misc_feature 1..624: note = Description of Artificial Sequence: Synthetic coding sequence
  source 1..624: mol_type = other DNA
atggtggaccgggagcagctggtgcagaaggcccggctggccgagcaggccgagagatatgatgacatggctgctgccatgaagaatgtgacagagctgaatgagcccctgagcaatgaggagaggaacctgctgtctgtggcctacaagaatgtggtgggcgcccggcgcagctcctggagggtcatcagcagcattgagcagaagaccagcgcagatggaaatgagaagaagattgagatggtgcgggcctaccgggagaagattgagaaggagctggaggccgaggtggccactggagagaagagggccaccgtggtggagagcagcgagaaggcctacagcgaggcccacgagatcagcaaggagcacatgcagcccacccaccccatccggctgggcctggccctgaactacagcgtcttctactatgagatccagaatgcccctgagcaggcctgccacctggccaagacagcctttgatgatgccatcgccgagctggacaccctgaatgaagattcctacaaggacagcaccctcatcatgcagctgctgcgggacaacctgaccctgtggaccagtgaccagcaggatgatgatggaggagagggcaacaactag

SEQ ID NO: 174973 - DNA, 678 bp, synthetic construct
  misc_feature 1..678: note = Description of Artificial Sequence: Synthetic coding sequence
  source 1..678: mol_type = other DNA
atggctgctgccatgaagaatgtgacagagctgaatgagcccctgagcaatgaggagaggaacctgctgtctgtggcctacaagaatgtggtgggcgcccggcgcagctcctggagggtcatcagcagcattgagcagaagaccagcgcagatggaaatgagaagaagattgagatggtgcgggcctaccgggagaagattgagaaggagctggaggccgtgtgccaggatgtgctgagcctgctggacaactacctgatcaagaactgcagcgagacccagtatgagagcaaggtgttctacctgaagatgaagggggactactaccgctacctggccgaggtggccactggagagaagagggccaccgtggtggagagcagcgagaaggcctacagcgaggcccacgagatcagcaaggagcacatgcagcccacccaccccatccggctgggcctggccctgaactacagcgtcttctactatgagatccagaatgcccctgagcaggcctgccacctggccaagacagcctttgatgatgccatcgccgagctggacaccctgaatgaagattcctacaaggacagcaccctcatcatgcagctgctgcgggacaacctgaccctgtggaccagtgaccagcaggatgatgatggaggagagggcaacaactag

SEQ ID NO: 174974 - DNA, 738 bp, synthetic construct
  misc_feature 1..738: note = Description of Artificial Sequence: Synthetic coding sequence
  source 1..738: mol_type = other DNA
atggacaagaatgagctggtgcagaaggccaagctggccgagcaggccgagagatatgatgacatggccgcctgcatgaagtctgtgacagagcagggcgctgagctgagcaatgaggagaggaacctgctgtctgtggcctacaagaatgtggtgggcgcccggcgcagctcctggagggtggtgagcagcattgagcagaagacagaaggagctgagaagaagcagcagatggcccgggagtaccgggagaagattgaaacagagctgcgggacatctgcaatgatgtgctgagcctgctggagaagttcctgatccccaatgccagccaggccgagagcaaggtgttctacctgaagatgaagggggactactaccgctacctggccgaggtggccgctggagatgacaagaagggcatcgtggaccagagccagcaggcctaccaggaggcctttgagatcagcaagaaggagatgcagcccacccaccccatccggctgggcctggccctgaacttctctgtgttctactatgagatcctgaacagccctgagaaggcctgcagcctggccaagacagcctttgatgaggccatcgccgagctggacaccctgtctgaggagagctacaaggacagcaccctcatcatgcagctgctgcgggacaacctgaccctgtggaccagtgacacccagggagatgaagctgaggccggggagggcggggagaactag

SEQ ID NO: 174975 - DNA, 507 bp, synthetic construct
  misc_feature 1..507: note = Description of Artificial Sequence: Synthetic coding sequence
  source 1..507: mol_type = other DNA
atggcccgggagtaccgggagaagattgaaacagagctgcgggacatctgcaatgatgtgctgagcctgctggagaagttcctgatccccaatgccagccaggccgagagcaaggtgttctacctgaagatgaagggggactactaccgctacctggccgaggtggccgctggagatgacaagaagggcatcgtggaccagagccagcaggcctaccaggaggcctttgagatcagcaagaaggagatgcagcccacccaccccatccggctgggcctggccctgaacttcagcgtcttctactatgagatcctgaacagccctgagaaggcctgcagcctggccaagacagcctttgatgaggccatcgccgagctggacaccctgtctgaggagagctacaaggacagcaccctcatcatgcagctgctgcgggacaacctgaccctgtggaccagtgacacccagggagatgaggccgaggccggggagggcggagaaaattag

SEQ ID NO: 174976 - DNA, 738 bp, synthetic construct; identical to SEQ ID NO: 174974
  misc_feature 1..738: note = Description of Artificial Sequence: Synthetic coding sequence
  source 1..738: mol_type = other DNA

SEQ ID NO: 174977 - DNA, 738 bp, synthetic construct; identical to SEQ ID NO: 174974
  misc_feature 1..738: note = Description of Artificial Sequence: Synthetic coding sequence
  source 1..738: mol_type = other DNA

SEQ ID NO: 174978 - DNA, 738 bp, synthetic construct; identical to SEQ ID NO: 174974
  misc_feature 1..738: note = Description of Artificial Sequence: Synthetic coding sequence
  source 1..738: mol_type = other DNA

SEQ ID NO: 174979 - DNA, 738 bp, synthetic construct; identical to SEQ ID NO: 174974
  misc_feature 1..738: note = Description of Artificial Sequence: Synthetic coding sequence
  source 1..738: mol_type = other DNA

SEQ ID NO: 174980 - DNA, 738 bp, synthetic construct; identical to SEQ ID NO: 174974
  misc_feature 1..738: note = Description of Artificial Sequence: Synthetic coding sequence
  source 1..738: mol_type = other DNA

SEQ ID NO: 174981 - DNA, 297 bp, synthetic construct
  misc_feature 1..297: note = Description of Artificial Sequence: Synthetic coding sequence
  source 1..297: mol_type = other DNA
atggacaagaatgagctggtgcagaaggccaagctggccgagcaggccgagagatatgatgacatggccgcctgcatgaagtctgtgacagagcagggcgctgagctgagcaatgaggagaggaacctgctgtctgtggcctacaagaatgtggtgggcgcccggcgcagctcctggagggtggtgagcagcattgagcagaagacagaaggagctgagaagaagcagcagatggcccgggagtaccgggagaagattgaaacagagctgcgggacatctgcaatgatgtgctgtag

SEQ ID NO: 174982 - DNA, 738 bp, synthetic construct; identical to SEQ ID NO: 174974
  misc_feature 1..738: note = Description of Artificial Sequence: Synthetic coding sequence
  source 1..738: mol_type = other DNA

SEQ ID NO: 174983 - DNA, 279 bp, synthetic construct
  misc_feature 1..279: note = Description of Artificial Sequence: Synthetic coding sequence
  source 1..279: mol_type = other DNA
atggacaagaatgagctggtgcagaaggccaagctggccgagcaggccgagagatatgatgacatggccgcctgcatgaagtctgtgacagagcagggcgctgagctgagcaatgaggagaggaacctgctgtctgtggcctacaagaatgtggtgggcgcccggcgcagctcctggagggtggtgagcagcattgagcagaagacagaaggagctgagaagaagcagcagatggcccgggagtaccgggagaagattgaaacagagctgcgggactag

SEQ ID NO: 174984 - DNA, 738 bp, synthetic construct; identical to SEQ ID NO: 174974
  misc_feature 1..738: note = Description of Artificial Sequence: Synthetic coding sequence
  source 1..738: mol_type = other DNA

SEQ ID NO: 174985 - DNA, 507 bp, synthetic construct; identical to SEQ ID NO: 174975
  misc_feature 1..507: note = Description of Artificial Sequence: Synthetic coding sequence
  source 1..507: mol_type = other DNA

SEQ ID NO: 174986 - DNA, 378 bp, synthetic construct
  misc_feature 1..378: note = Description of Artificial Sequence: Synthetic coding sequence
  source 1..378: mol_type = other DNA
atgaagggggactactaccgctacctggccgaggtggccgctggagatgacaagaagggcatcgtggaccagagccagcaggcctaccaggaggcctttgagatcagcaagaaggagatgcagcccacccaccccatccggctgggcctggccctgaacttctctgtgttctactatgagatcctgaacagccctgagaaggcctgcagcctggccaagacagcctttgatgaggccatcgccgagctggacaccctgtctgaggagagctacaaggacagcaccctcatcatgcagctgctgcgggacaacctgaccctgtggaccagtgacacccagggagatgaagctgaggccggggagggcggggagaactag

SEQ ID NO: 174987 - DNA, 414 bp, synthetic construct
  misc_feature 1..414: note = Description of Artificial Sequence: Synthetic coding sequence
  source 1..414: mol_type = other DNA
atggacaagaatgagctggtgcagaaggccaagctggccgagcaggccgagagatatgatgacatggccgcctgcatgaagtctgtgacagagcagggcgctgagctgagcaatgaggagaggaacctgctgtctgtggcctacaagaatgtggtgggcgcccggcgcagctcctggagggtggtgagcagcattgagcagaagacagaaggagctgagaagaagcagcagatggcccgggagtaccgggagaagattgaaacagagctgcgggacatctgcaatgatgtgctgagcctgctggagaagttcctgatccccaatgccagccaggccgagagcaaggtgttctacctgaagatgaagggggactactaccgctacctggccgaggtggccgctggagatgactag

SEQ ID NO: 174988 - DNA, 741 bp, synthetic construct
  misc_feature 1..741: note = Description of Artificial Sequence: Synthetic coding sequence
  source 1..741: mol_type = other DNA
atggacaagaatgagctggtgcagaaggccaagctggccgagcaggccgagagatatgatgacatggccgcctgcatgaagtctgtgacagagcagggcgctgagctgagcaatgaggagaggaacctgctgtctgtggcctacaagaatgtggtgggcgcccggcgcagctcctggagggtggtgagcagcattgagcagaagacagaaggagctgagaagaagcagcagatggcccgggagtaccgggagaagattgaaacagagctgcgggacatctgcaatgatgtgctgagcctgctggagaagttcctgatccccaatgccagccaggccgagagcaaggtgttctacctgaagatgaagggggactactaccgctacctggccgaggtggccgctggagatgacaagaaggtgcgcttcggcgtgtcctacccaggcatcgtggaccagagccagcaggcctaccaggaggcctttgagatcagcaagaaggagatgcagcccacccaccccatccggctgggcctggccctgaacttctctgtgttctactatgagatcctgaacagccctgagaaggcctgcagcctggccaagacagcctttgatgaggccatcgccgagctggacaccctgtctgaggagagctacaaggacagcaccctcatcatgcagctgctgcgggacaacctgaccctgtggaccagtgacacccagggagatgaagctgagtag

SEQ ID NO: 174989 - DNA, 513 bp, synthetic construct
  misc_feature 1..513: note = Description of Artificial Sequence: Synthetic coding sequence
  source 1..513: mol_type = other DNA
atgagccagccctgcaggaagctgtggaggcacaactatgagaccagcagctgcatcgagttcctgaagagcctgctggagaagttcctgatccccaatgccagccaggccgagagcaaggtgttctacctgaagatgaagggggactactaccgctacctggccgaggtggccgctggagatgacaagaagggcatcgtggaccagagccagcaggcctaccaggaggcctttgagatcagcaagaaggagatgcagcccacccaccccatccggctgggcctggccctgaacttcagcgtcttctactatgagatcctgaacagccctgagaaggcctgcagcctggccaagacagcctttgatgaggccatcgccgagctggacaccctgtctgaggagagctacaaggacagcaccctcatcatgcagctgctgcgggacaacctgaccctgtggaccagtgacacccagggagatgaggccgaggccggggagggcggagaaaattag

SEQ ID NO: 174990 - DNA, 378 bp, synthetic construct; identical to SEQ ID NO: 174986
  misc_feature 1..378: note = Description of Artificial Sequence: Synthetic coding sequence
  source 1..378: mol_type = other DNA

SEQ ID NO: 174991 - DNA, 228 bp, synthetic construct
  misc_feature 1..228: note = Description of Artificial Sequence: Synthetic coding sequence
  source 1..228: mol_type = other DNA
atggacaagaatgagctggtgcagaaggccaagctggccgagcaggccgagagatatgatgacatggccgcctgcatgaagtctgtgacagagcagggcgctgagctgagcaatgaggagaggaacctgctgtctgtggcctacaagaatgtggtgggcgcccggcgcagctcctggagggtggtgagcagcattgagcagaagacagaaggagctgagaagaagtag

SEQ ID NO: 174992 - DNA, 393 bp, synthetic construct
  misc_feature 1..393: note = Description of Artificial Sequence: Synthetic coding sequence
  source 1..393: mol_type = other DNA
gtcttctacctgaagatgaagggggactactaccgctacctggccgaggtggccgctggagatgacaagaagggcatcgtggaccagagccagcaggcctaccaggaggcctttgagatcagcaagaaggagatgcagcccacccaccccatccggctgggcctggccctgaacttcagcgtcttctactatgagatcctgaacagccctgagaaggcctgcagcctggccaagacagcctttgatgaggccatcgccgagctggacaccctgtctgaggagagctacaaggacagcaccctcatcatgcagctgctgcgggacaacctgaccctgtggaccagtgacacccagggagatgaggccgaggccggggagggcggagaaaattag

SEQ ID NO: 174993 - DNA, 159 bp, synthetic construct
  misc_feature 1..159: note = Description of Artificial Sequence: Synthetic coding sequence
  source 1..159: mol_type = other DNA
atggacaagaatgagctggtgcagaaggccaagctggccgagcaggccgagagatatgatgacatggccgcctgcatgaagtctgtgacagagcagggcgctgagctgagcaatgaggagaggaacctgctgtctgtggcctacaagaatgtggtgtag

SEQ ID NO: 174994 - DNA, 1224 bp, synthetic construct
  misc_feature 1..1224: note = Description of Artificial Sequence: Synthetic coding sequence
  source 1..1224: mol_type = other DNA
atgcccaccccagatgccaccaccccccaggccaagggcttcagaagagctgtgtctgagctggatgccaagcaggccgaggccatcatggtgcggggccagagcccccgcttcatcggccggcggcagagcctgattgaagatgccaggaaggagcgggaggccgctgtggccgctgctgctgctgctgtgcccagcgagcccggggaccccctggaggccgtggcctttgaggagaaggagggcaaggctgtgctgaacctgctcttcagcccccgggccaccaagcccagcgccctgagcagagctgtgaaggtgtttgagacctttgaggccaagatccaccacctggagaccaggcctgcccagaggcccagggctgggggcccccacctggagtactttgtgcggctggaggtgagaagaggagacctggccgccctgctgagcggcgtgcggcaggtgtctgaagatgtgcgcagccctgctggccccaaggtgccctggttccccaggaaggtgtctgagctggacaagtgccaccacctggtgaccaagtttgatcctgacctggacctggaccaccctggcttcagtgaccaggtgtaccggcagaggaggaagctgattgctgagatcgccttccagtacagacatggagaccccatcccccgggtggagtacacagctgaggagatcgccacctgggactgctgccacgagctgctgggccacgtgcccatgctggccgacaggacctttgcccagttcagccaggacatcggcctggccagcctgggcgccagtgatgaggagattgagaagctgagcaccctgtactggttcaccgtggagtttggcctgtgcaagcagaatggagaggtgaaggcctacggggccggcctgctgagcagctatggagagctgctgcactgcctgtctgaggagcctgagatccgggcctttgatcctgaggccgctgctgtgcagccctaccaggaccagacctaccagagcgtgtactttgtgtctgagagcttcagtgatgccaaggacaagctgcggagctatgccagccgcatccagaggcccttctctgtgaagtttgacccctacaccctggccattgatgtgctggacagcccccaggccgtgcggcgcagcctggagggcgtgcaggatgagctggacaccctggcccacgccctgagcgccatcggctag

SEQ ID NO: 174995 - DNA, 1494 bp, synthetic construct
  misc_feature 1..1494: note = Description of Artificial Sequence: Synthetic coding sequence
  source 1..1494: mol_type = other DNA
atgcccaccccagatgccaccaccccccaggccaagggcttcagaagagctgtgtctgagctggatgccaagcaggccgaggccatcatgagcccccgcttcatcggccggcggcagagcctgattgaagatgccaggaaggagcgggaggccgctgtggccgctgctgctgctgctgtgcccagcgagcccggggaccccctggaggccgtggcctttgaggagaaggagggcaaggctgtgctgaacctgctcttcagcccccgggccaccaagcccagcgccctgagcagagctgtgaaggtgtttgagacctttgaggccaagatccaccacctggagaccaggcctgcccagaggcccagggctgggggcccccacctggagtactttgtgcggctggaggtgagaagaggagacctggccgccctgctgagcggcgtgcggcaggtgtctgaagatgtgcgcagccctgctggccccaaggtgccctggttccccaggaaggtgtctgagctggacaagtgccaccacctggtgaccaagtttgatcctgacctggacctggaccaccctggcttcagtgaccaggtgtaccggcagaggaggaagctgattgctgagatcgccttccagtacagacatggagaccccatcccccgggtggagtacacagctgaggagatcgccacctggaaggaggtgtacaccaccctgaagggcctgtatgccacccacgcctgtggggagcacctggaggcctttgccctgctggagcgcttcagcggctaccgggaggacaacatcccccagctggaggatgtgagccgcttcctgaaggagaggacaggcttccagctgcggcctgtggccggcctgctgagcgcccgggacttcctggccagcctggccttccgggtcttccagtgcacccagtacatcagacatgccagcagccccatgcacagccctgagccagactgctgccacgagctgctgggccacgtgcccatgctggccgacaggacctttgcccagttcagccaggacatcggcctggccagcctgggcgccagtgatgaggagattgagaagctgagcaccctgtactggttcaccgtggagtttggcctgtgcaagcagaatggagaggtgaaggcctacggggccggcctgctgagcagctatggagagctgctgcactgcctgtctgaggagcctgagatccgggcctttgatcctgaggccgctgctgtgcagccctaccaggaccagacctaccagagcgtgtactttgtgtctgagagcttcagtgatgccaaggacaagctgcggagctatgccagccgcatccagaggcccttctctgtgaagtttgacccctacaccctggccattgatgtgctggacagcccccaggccgtgcggcgcagcctggagggcgtgcaggatgagctggacaccctggcccacgccctgagcgccatcggctag

SEQ ID NO: 174996 - DNA, 1575 bp, synthetic construct
  misc_feature 1..1575: note = Description of Artificial Sequence: Synthetic coding sequence
  source 1..1575: mol_type = other DNA
atgcccaccccagatgccaccaccccccaggccaagggcttcagaagagctgtgtctgagctggatgccaagcaggccgaggccatcatgggcgcccctggccccagcctgaccggcagcccctggccaggcacagctgccccagctgccagctacacccccacccccaggagcccccgcttcatcggccggcggcagagcctgattgaagatgccaggaaggagcgggaggccgctgtggccgctgctgctgctgctgtgcccagcgagcccggggaccccctggaggccgtggcctttgaggagaaggagggcaaggctgtgctgaacctgctcttcagcccccgggccaccaagcccagcgccctgagcagagctgtgaaggtgtttgagacctttgaggccaagatccaccacctggagaccaggcctgcccagaggccccgggccggcggcccccacctggagtactttgtgcggctggaggtgcggcggggggacctggccgccctgctgtctggagtgcggcaggtgtctgaagatgtgcgcagccctgctggccccaaggtgccctggttccccaggaaggtgtctgagctggacaagtgccaccacctggtgaccaagtttgatcctgacctggacctggaccaccctggcttcagtgaccaggtgtaccggcagaggaggaagctgattgctgagatcgccttccagtaccgccacggggaccccatcccccgggtggagtacacagctgaggagatcgccacctggaaggaggtgtacaccaccctgaagggcctgtatgccacccacgcctgtggggagcacctggaggcctttgccctgctggagcgcttcagcggctaccgggaggacaacatcccccagctggaggatgtgagccgcttcctgaaggagaggacaggcttccagctgcggcctgtggccggcctgctgagcgcccgggacttcctggccagcctggccttccgggtcttccagtgcacccagtacatcagacatgccagcagccccatgcacagccctgagccagactgctgccacgagctgctgggccacgtgcccatgctggccgacaggacctttgcccagttcagccaggacatcggcctggccagcctgggcgccagtgatgaggagattgagaagctgagcaccctgtactggttcaccgtggagtttggcctgtgcaagcagaatggagaggtgaaggcctatggagctggcctgctgagcagctatggagagctgctgcactgcctgtctgaggagcctgagatccgggcctttgatcctgaggccgctgctgtgcagccctaccaggaccagacctaccagagcgtgtactttgtgtctgagagcttcagtgatgccaaggacaagctgcggagctatgccagccgcatccagaggcccttctctgtgaagtttgacccctacaccctggccattgatgtgctggacagcccccaggccgtgagaagaagcctggagggcgtgcaggatgagctggacaccctggcccacgccctgagcgccatcggctag

SEQ ID NO: 174997 - DNA, 1587 bp, synthetic construct
  misc_feature 1..1587: note = Description of Artificial Sequence: Synthetic coding sequence
  source 1..1587: mol_type = other DNA
atgcccaccccagatgccaccaccccccaggccaagggcttcagaagagctgtgtctgagctggatgccaagcaggccgaggccatcatggtgcggggccagggcgcccctggccccagcctgaccggcagcccctggccaggcacagctgccccagctgccagctacacccccacccccaggagcccccgcttcatcggccggcggcagagcctgattgaagatgccaggaaggagcgggaggccgctgtggccgctgctgctgctgctgtgcccagcgagcccggggaccccctggaggccgtggcctttgaggagaaggagggcaaggctgtgctgaacctgctcttcagcccccgggccaccaagcccagcgccctgagcagagctgtgaaggtgtttgagacctttgaggccaagatccaccacctggagaccaggcctgcccagaggccccgggccggcggcccccacctggagtactttgtgcggctggaggtgcggcggggggacctggccgccctgctgtctggagtgcggcaggtgtctgaagatgtgcgcagccctgctggccccaaggtgccctggttccccaggaaggtgtctgagctggacaagtgccaccacctggtgaccaagtttgatcctgacctggacctggaccaccctggcttcagtgaccaggtgtaccggcagaggaggaagctgattgctgagatcgccttccagtaccgccacggggaccccatcccccgggtggagtacacagctgaggagatcgccacctggaaggaggtgtacaccaccctgaagggcctgtatgccacccacgcctgtggggagcacctggaggcctttgccctgctggagcgcttcagcggctaccgggaggacaacatcccccagctggaggatgtgagccgcttcctgaaggagaggacaggcttccagctgcggcctgtggccggcctgctgagcgcccgggacttcctggccagcctggccttccgggtcttccagtgcacccagtacatcagacatgccagcagccccatgcacagccctgagccagactgctgccacgagctgctgggccacgtgcccatgctggccgacaggacctttgcccagttcagccaggacatcggcctggccagcctgggcgccagtgatgaggagattgagaagctgagcaccctgtactggttcaccgtggagtttggcctgtgcaagcagaatggagaggtgaaggcctatggagctggcctgctgagcagctatggagagctgctgcactgcctgtctgaggagcctgagatccgggcctttgatcctgaggccgctgctgtgcagccctaccaggaccagacctaccagagcgtgtactttgtgtctgagagcttcagtgatgccaaggacaagctgcggagctatgccagccgcatccagaggcccttctctgtgaagtttgacccctacaccctggccattgatgtgctggacagcccccaggccgtgagaagaagcctggagggcgtgcaggatgagctggacaccctggcccacgccctgagcgccatcggctag

SEQ ID NO: 174998 - DNA, 3564 bp, synthetic construct
  misc_feature 1..3564: note = Description of Artificial Sequence: Synthetic coding sequence
  source 1..3564: mol_type = other DNA
atgcccctgcggcactggggcatggcccggggcagcaagcctgtgggagatggagcccagcccatggccgccatgggcggcctgaaggtgctgctgcactgggccggccctgggggcggggagccctgggtgaccttcagcgagagcagcctgacagctgaggaggtgtgcatccacatcgcccacaaggtgggcatcaccccaccctgcttcaacctgtttgccctgtttgatgcccaggcccaggtgtggctgccccccaaccacatcctggagatccccagagatgccagcctgatgctgtacttccgcatccgcttctacttcaggaactggcacggcatgaacccccgggagcctgctgtgtaccgctgtggccccccaggcacagaggccagcagtgaccagacagcccagggcatgcagctgctggaccctgccagctttgagtacctgtttgagcagggcaagcatgaatttgtgaatgatgtggccagcctgtgggagctgagcacagaggaggagatccaccacttcaagaatgaaagcctgggcatggccttcctgcacctgtgccacctggccctgcggcacggcatccccctggaggaggtggccaagaagaccagcttcaaggactgcatccccaggagcttccgccgccacatccggcagcacagcgccctgacccggctgcggctgagaaatgtgttccgccgcttcctgcgggacttccagcccggccgcctgagccagcagatggtgatggtgaagtacctggccaccctggagcggctggccccccgcttcggcacagagcgggtgcctgtgtgccacctgcggctgctggcccaggccgagggggagccctgctacatccgggacagcggcgtggcccccacagatcctggccctgagagcgctgctggcccccccacccatgaggtgctggtgactggaactggaggcatccagtggtggcctgtggaggaggaggtgaacaaggaggagggcagcagcggcagcagtggaagaaacccccaggccagcctgtttgggaagaaggccaaggcccacaaggctgtgggccagcctgctgaccggccccgggagcccctgtgggcctacttctgtgacttccgggacatcacccacgtggtgctgaaggagcactgtgtgtccatccaccggcaggacaacaagtgcctggagctgagcctgcccagcagagctgctgccctgagctttgtgtccctggtggatggctacttccggctgacagctgacagcagccactacctgtgccacgaggtggccccaccccggctggtgatgagcatcagagatggcatccacggccccctgctggagccctttgtgcaggccaagctgcggccagaagatggcctgtacctgatccactggagcaccagccacccctaccgcctcatcctgactgtggcccagaggagccaggccccagatggcatgcagagcctgcggctgaggaagttccccatcgagcagcaggatggagcctttgtgctggagggctggggccgctccttccccagcgtgcgggagctgggcgccgccctgcagggctgcctgctgcgggctggagatgactgcttcagcctgcggcgctgctgcctgccccagcctggagagaccagcaacctgatcatcatgagaggagcccgggccagccccaggaccctgaacctgagccagctgtccttccaccgggtggaccagaaggagatcacccagctgagccacctgggccagggcaccaggaccaacgtgtatgagggccgcctgcgggtggagggcagcggggaccctgaggagggcaagatggatgatgaggaccccctggtgcccggccgggaccggggccaggagctgcgggtggtgctgaaggtgctggaccccagccaccacgacatcgccctggccttctatgaaacagccagcctgatgagccaggtgagccacacccacctggcctttgtgcacggcgtgtgtgtgcggggccctgagaacatcatggtgacagaatatgtggagcacggccccctggatgtgtggctgcggcgggagcggggccacgtgcccatggcctggaagatggtggtggcccagcagctggccagcgccctgagctacctggagaacaagaacctggtgcacggcaatgtgtgtggcaggaacatcctgctggcccggctgggcctggccgagggcaccagccccttcatcaagctgagtgaccccggggtgggcctgggcgccctgagccgggaggagcgggtggagcgcatcccctggctggcccctgagtgcctgcctggaggagccaacagcctgagcacagccatggacaagtggggctttggagccaccctgctggagatctgctttgatggagaggcccccctgcagagccgcagccccagcgagaaggagcacttctaccagaggcagcaccggctgcctgagcccagctgcccccagctggccaccctgaccagccagtgcctgacctatgagcccacccagaggcccagcttccgcaccatcctgcgggacctgacccggctgcagccccacaacctggctgatgtgctgactgtgaacccagacagccctgccagtgaccccaccgtcttccacaagcgctacctgaagaagatccgggacctgggggagggccactttgggaaggtgtccctgtactgctatgaccccaccaatgatggcactggagagatggtggccgtgaaggccctgaaggctgactgtggcccccagcacaggagcggctggaagcaggagattgacatcctgcggaccctgtaccacgagcacatcatcaagtacaagggctgctgtgaggaccagggcgagaagagcctgcagctggtgatggagtatgtgcccctgggcagcctgcgggactacctgcccaggcacagcatcggcctggcccagctgctgctgtttgcccagcagatctgtgagggcatggcctacctgcacgcccagcactacatccaccgggacctggccgccagaaatgtgctgctggacaatgaccggctggtgaagattggagactttggcctggccaaggctgtgcctgagggccacgagtactacagagtgagagaagatggagacagccctgtgttctggtacgccccagaatgtctgaaggagtacaagttctactatgccagtgatgtgtggagctttggagtgaccctgtatgagctgctgacccactgtgacagcagccagagcccccccaccaagttcctggagctgattggcatcgcccagggccagatgacagtgctgcggctgacagagctgctggagcggggggagcggctgcccaggccagacaagtgcccctgtgaggtgtaccacctgatgaagaactgctgggagacagaggccagcttccggcccacctttgaaaatctcatccccatcctgaagacagtgcatgagaagtaccagggccaggcccccagcgtcttctctgtgtgctag

SEQ ID NO: 174999 - DNA, 3564 bp, synthetic construct; identical to SEQ ID NO: 174998
  misc_feature 1..3564: note = Description of Artificial Sequence: Synthetic coding sequence
  source 1..3564: mol_type = other DNA

SEQ ID NO: 175000 - DNA, 357 bp, synthetic construct
  misc_feature 1..357: note = Description of Artificial Sequence: Synthetic coding sequence
  source 1..357: mol_type = other DNA
atgcccctgcggcactggggcatggcccggggcagcaagcctgtgggagatggagcccagcccatggccgccatgggcggcctgaaggtgctgctgcactgggccggccctgggggcggggagccctgggtgaccttcagcgagagcagcctgacagctgaggaggtgtgcatccacatcgcccacaaggtgggcatcaccccaccctgcttcaacctgtttgccctgtttgatgcccaggcccaggtgtggctgccccccaaccacatcctggagatccccagagatgccagcctgatgctgtacttccgcatccgcttctacttcaggaactggcacggcatgaaccccaggtag

SEQ ID NO: 175001 - DNA, 2805 bp, synthetic construct
  misc_feature 1..2805: note = Description of Artificial Sequence: Synthetic coding sequence
  source 1..2805: mol_type = other DNA
atggtgatggtgaagtacctggccaccctggagcggctggcccccaggtttggaacagagcgggtgcctgtgtgccacctgcggctgctggcccaggccgagggggagccctgctacatccgggacagcggcgtggcccccacagaccccggccctgagagcgctgctggcccccccacccatgaggtgctggtgacaggcaccggcggcatccagtggtggcctgtggaggaggaggtgaacaaggaggagggcagcagcggcagcagcggcaggaacccccaggccagcctgtttgggaagaaggccaaggcccacaaggctgtgggccagcctgctgaccggccccgggagcccctgtgggcctacttctgtgacttccgggacatcacccacgtggtgctgaaggagcactgtgtgtccatccaccggcaggacaacaagtgcctggagctgagcctgcccagcagagctgctgccctgagctttgtgtccctggtggatggctacttccggctgacagctgacagcagccactacctgtgccacgaggtggccccaccccggctggtgatgagcatcagagatggcatccacggccccctgctggagccctttgtgcaggccaagctgcggccagaagatggcctgtacctgatccactggagcaccagccacccctaccgcctcatcctgactgtggcccagaggagccaggccccagatggcatgcagagcctgcggctgaggaagttccccatcgagcagcaggatggagcctttgtgctggagggctggggccgctccttccccagcgtgcgggagctgggcgccgccctgcagggctgcctgctgcgggctggagatgactgcttcagcctgcggcgctgctgcctgccccagcccggggagaccagcaacctgatcatcatgagaggagcccgggccagccccaggaccctgaacctgagccagctgtccttccaccgggtggaccagaaggagatcacccagctgagccacctgggccagggcaccaggaccaacgtgtatgagggccgcctgcgggtggagggcagcggggaccctgaggagggcaagatggatgatgaggaccccctggtgcccggccgggaccggggccaggagctgcgggtggtgctgaaggtgctggaccccagccaccacgacatcgccctggccttctatgaaacagccagcctgatgagccaggtgagccacacccacctggcctttgtgcatggagtgtgtgtgcggggccctgagaacatcatggtgacagaatatgtggagcacggccccctggatgtgtggctgcggcgggagcggggccacgtgcccatggcctggaagatggtggtggcccagcagctggccagcgccctgagctacctggagaacaagaacctggtgcatggaaatgtgtgtggcaggaacatcctgctggcccggctgggcctggccgagggcaccagccccttcatcaagctgagtgaccccggggtgggcctgggcgccctgagccgggaggagcgggtggagcgcatcccctggctggccccagaatgtctgcccggcggggccaacagcctgagcacagccatggacaagtggggctttggagccaccctgctggagatctgctttgatggagaggcccccctgcagagccgcagccccagcgagaaggagcacttctaccagaggcagcaccggctgcctgagcccagctgcccccagctggccaccctgaccagccagtgcctgacctatgagcccacccagaggcccagcttccgcaccatcctgcgggacctgacccggctgcagccccacaacctggctgatgtgctgactgtgaacccagacagccctgccagtgaccccaccgtcttccacaagcgctacctgaagaagatccgggacctgggggagggccactttgggaaggtgtccctgtactgctatgaccccaccaatgatggcaccggggagatggtggccgtgaaggccctgaaggctgactgtggcccccagcacaggagcggctggaagcaggagattgacatcctgcggaccctgtaccacgagcacatcatcaagtacaagggctgctgtgaggaccagggcgagaagagcctgcagctggtgatggagtatgtgcccctgggcagcctgcgggactacctgcccaggcacagcatcggcctggcccagctgctgctgtttgcccagcagatctgtgagggcatggcctacctgcacgcccagcactacatccaccgggacctggccgccagaaatgtgctgctggacaatgaccggctggtgaagatcggggactttggcctggccaaggctgtgcctgagggccacgagtactacagagtgcgggaggatggagacagccctgtgttctggtacgcccctgagtgcctgaaggagtacaagttctactatgccagtgatgtgtggagctttggagtgaccctgtatgagctgctgacccactgtgacagcagccagagcccccccaccaagttcctggagctgattggaattgcccagggccagatgacagtgctgcggctgacagagctgctggagcggggggagcggctgcccaggccagacaagtgcccctgtgaggtgtaccacctgatgaagaactgctgggagacagaggccagcttccggcccacctttgagaacctgatccccatcctgaagacagtgcatgagaagtaccagggccaggcccccagcgtcttctctgtgtgctag

SEQ ID NO: 175002 - DNA, 1986 bp, synthetic construct
  misc_feature 1..1986: note = Description of Artificial Sequence: Synthetic coding sequence
  source 1..1986: mol_type = other DNA
atgctgcctgaggccggcagcctgtggctgctgaagctgctgcgggacatccagctggcccagttctactggcccatcctggaggagctgaatgtgaccaggcctgagcactttgattttgtgaagccagaggacctggatggcatcggcatgggccggcctgcccagaggcggctgtctgaggccctgaagaggctgcggagcggccccaagagcaagaactgggtgtacaagatcctgggcggctttgcccctgagcacaaggagcccaccctgcccagcgacagccccaggcacctgcctgagcctgagggcggcctgaagtgcctgatccctgagggcgctgtgtgccgcggggagctgctgggcagcggctgctttggagtggtgcaccggggcctgtggaccctgcccagcggcaagtctgtgcctgtggccgtgaagagcctgcgggtgggccctgagggccccatgggcacagagctgggggacttcctgcgggaggtgtctgtgatgatgaacctggagcacccccacgtgctgcggctgcacggcctggtgctgggccagcccctgcagatggtgatggagctggcccccctgggcagcctgcacgcccggctgacagccccagcccccaccccacccctgctggtggccctgctgtgcctcttcctgcggcagctggccggggccatggcctacctgggcgcccggggcctggtgcaccgggacctggccaccaggaacctgctgctggccagccccaggaccatcaaggtggccgactttggcctggtgcggcccctgggcggggcccggggccgctacgtgatgggcggcccccggcccatcccctatgcctggtgtgcccctgagagcctgcggcatggagccttcagcagcgccagtgatgtgtggatgtttggagtgaccctgtgggagatgttcagcggcggggaggagccctgggccggcgtgcccccctacctgatcctgcagaggctggaggaccgggcccggctgcccaggcctcccctgtgcagccgggccctgtacagcctggccctgcgctgctgggccccccaccctgctgaccggcccagcttcagccacctggagggcctgctgcaggaggccggccccagcgaggcctgctgcgtgagagatgtgacagagcccggggccctgaggatggagactggagaccccatcaccgtcatcgagggcagcccagacagcaccatctggaagggccagaatggaagaaccttcaaggtgggcagcttccctgccagcgctgtgaccctggctgatgctgggggcctgcctgccaccaggcctgtgcaccggggcaccccagcccggggggaccagcaccctggcagcattgatggagacaggaagaaggccaacctgtgggatgcccccccagcccggggccagaggaggaacatgcccctggagaggatgaagggcatcagccgcagcctggagagcgtgctgagcctgggcccccggcccactggaggcggcagcagccccccagagatccggcaggcccgggctgtgccccagggccccccaggcctgccccccaggcctcccctgagcagcagcagcccccagcccagccagcccagccgggagcggctgccctggcccaagaggaagccaccccacaaccaccccatgggcatgcctggggccaggaaggccgccgccctgagcggcggcctgctgagtgaccctgagctgcagaggaagatcatggaggtggagctgtctgtgcacggcgtgacccaccaggagtgccagacagccctgggcgccactggaggagatgtggtgtctgccatccggaacctgaaggtggaccagctgttccacctgagcagccgcagcagagctgactgctggaggatcctggagcactaccagtgggacctgtctgctgccagccgctacgtgctggcccggccctag

SEQ ID NO: 175003 - DNA, 1986 bp, synthetic construct; identical to SEQ ID NO: 175002
  misc_feature 1..1986: note = Description of Artificial Sequence: Synthetic coding sequence
  source 1..1986: mol_type = other DNA

SEQ ID NO: 175004 - DNA, 1587 bp, synthetic construct
  misc_feature 1..1587: note = Description of Artificial Sequence: Synthetic coding sequence
  source 1..1587: mol_type = other DNA
atgcagcctgaggagggcaccggctggctgctggagctgctgtctgaggtgcagctgcagcagtacttcctgcggctgagagatgacctgaatgtgacccggctgagccactttgaatatgtgaagaatgaagacctggagaagattggcatgggccggcccggccagaggcggctgtgggaggccgtgaagaggaggaaggccctgtgcaagaggaagtcctggatgagcaaggtgttttctgggaagaggctggaggccgagttccccccccaccacagccagagcaccttcaggaagaccagccctgcccctgggggccctgctggggagggccccctgcagagcctgacctgcctgattggagagaaggacctgcggctgctggagaagctgggagatggcagctttggagtggtgagaagaggagagtgggatgcccccagcggcaagacagtgtctgtggccgtgaagtgcctgaagccagatgtgctgagccagcctgaggccatggatgacttcatccgggaggtgaatgccatgcacagcctggaccacaggaacctgatccggctgtatggagtggtgctgaccccacccatgaagatggtgacagagctggcccccctgggcagcctgctggaccggctgaggaagcaccagggccacttcctgctgggcaccctgagccgctatgctgtgcaggtggccgagggcatgggctacctggagagcaagcgcttcatccaccgggacctggccgccaggaacctgctgctggccacccgggacctggtgaagatcggggactttggcctgatgagggccctgccccagaatgatgaccactacgtgatgcaggagcacaggaaggtgccctttgcctggtgtgcccctgagagcctgaagaccaggaccttcagccacgccagtgacacctggatgtttggagtgaccctgtgggagatgttcacctacggccaggagccctggattggcctgaatggcagccagatcctgcacaagattgacaaggagggggagcggctgcccaggcctgaggactgcccccaggacatctacaacgtgatggtgcagtgctgggcccacaagccagaagatcggcccacctttgtggccctgcgggacttcctgctggaggcccagcccacagacatgagggccctgcaggactttgaggagccagacaagctgcacatccagatgaatgatgtgatcaccgtcatcgagggccgggcagagaactactggtggaggggccagaacaccaggaccctgtgtgtgggccccttccccagaaatgtggtgacctctgtggccggcctgagcgcccaggacatcagccagcccctgcagaacagcttcatccacactggacatggagacagcgaccccaggcactgctggggcttcccagacagaattgatgagtgccccttcagcgccttcagccctggccaccccccagctgagacctgtggccaggtgctgtggacaggccggcgggaggcctgtgccagtgacccccggctgcaccctgtgagcagcaggaccaagggcctgtag

SEQ ID NO: 175005 - DNA, 3117 bp, synthetic construct
  misc_feature 1..3117: note = Description of Artificial Sequence: Synthetic coding sequence
  source 1..3117: mol_type = other DNA
atgcagcctgaggagggcaccggctggctgctggagctgctgtctgaggtgcagctgcagcagtacttcctgcggctgagagatgacctgaatgtgacccggctgagccactttgaatatgtgaagaatgaagacctggagaagattggcatgggccggcccggccagaggcggctgtgggaggccgtgaagaggaggaaggccctgtgcaagaggaagtcctggatgagcaaggtgttttctgggaagaggctggaggccgagttccccccccaccacagccagagcaccttcaggaagaccagccctgcccctgggggccctgctggggagggccccctgcagagcctgacctgcctgattggagagaaggacctgcggctgctggagaagctgggagatggcagctttggagtggtgagaagaggagagtgggatgcccccagcggcaagacagtgtctgtggccgtgaagtgcctgaagccagatgtgctgagccagcctgaggccatggatgacttcatccgggaggtgaatgccatgcacagcctggaccacaggaacctgatccggctgtatggagtggtgctgaccccacccatgaagatggtgacagagctggcccccctgggcagcctgctggaccggctgaggaagcaccagggccacttcctgctgggcaccctgagccgctatgctgtgcaggtggccgagggcatgggctacctggagagcaagcgcttcatccaccgggacctggccgccaggaacctgctgctggccacccgggacctggtgaagatcggggactttggcctgatgagggccctgccccagaatgatgaccactacgtgatgcaggagcacaggaaggtgccctttgcctggtgtgcccctgagagcctgaagaccaggaccttcagccacgccagtgacacctggatgtttggagtgaccctgtgggagatgttcacctacggccaggagccctggattggcctgaatggcagccagatcctgcacaagattgacaaggagggggagcggctgcccaggcctgaggactgcccccaggacatctacaacgtgatggtgcagtgctgggcccacaagccagaagatcggcccacctttgtggccctgcgggacttcctgctggaggcccagcccacagacatgagggccctgcaggactttgaggagccagacaagctgcacatccagatgaatgatgtgatcaccgtcatcgagggccgggcagagaactactggtggaggggccagaacaccaggaccctgtgtgtgggccccttccccagaaatgtggtgacctctgtggccggcctgagcgcccaggacatcagccagcccctgcagaacagcttcatccacactggacatggagacagcgaccccaggcactgctggggcttcccagacagaattgatgagctgtacctgggcaaccccatggaccccccagacctgctgtctgtggagctgagcaccagccggcccccccagcacctgggcggcgtgaagaagcccacctatgaccctgtgtctgaggaccaggaccccctgagcagtgacttcaagaggctgggcctgaggaagccaggcctgccccggggcctgtggctggccaagcccagcgcccgggtgcccggcaccaaggccagccggggcagcggggctgaggtgaccctgattgactttggagaggagcctgtggtgcctgccctgcggccctgtgcccccagcctggcccagctggccatggatgcctgcagcctgctggatgagaccccaccccagagccccacccgggccctgccccggcccctgcaccccacccctgtggtggactgggatgcccggcccctgcccccacctccagcctatgatgatgtggcccaggatgaagatgactttgagatctgcagcatcaacagcaccctggtgggcgccggcgtgcctgctggccccagccagggccagaccaactatgcctttgtgcctgagcaggcccggcccccaccacccctggaggacaacctcttcctgcccccccagggcggcggcaagccacccagcagcgcccagacagctgagatcttccaggccctgcagcaggagtgcatgaggcagctgcaggccccagctggcagccctgcccccagccccagccctggaggagatgacaagccccaggtgcccccccgggtgcccatccccccccggcccacccggccccacgtgcagctgagccctgcccctcctggagaggaggagaccagccagtggccaggccctgccagccccccccgggtgcccccccgggagcccctgagcccccagggcagcaggacccccagccccctggtgcccccaggcagcagccccctgcccccccggctgagcagcagccctgggaagaccatgcccaccacccagagctttgccagtgaccccaagtatgccaccccccaggtgatccaggcccctggcccccgggccggcccctgcatcctgcccatcgtgagagatggcaagaaggtgagcagcacccactactacctgctgcctgagcggcccagctacctggagcgctaccagcgcttcctgcgggaggcccagagccctgaggagcccacccccctgcctgtgcccctgctgctgcccccacccagcaccccagccccagctgcccccacagccaccgtgcggcccatgccccaggccgccctggaccccaaggccaacttcagcaccaacaacagcaaccctggggcccggcccccaccaccccgggccacagcccggctgccccagaggggctgccctggagatggccctgaggccggccggcctgctgacaagatccagatggccatggtgcacggcgtgaccacagaggagtgccaggccgccctgcagtgccacggctggagcgtgcagagagctgcccagtacctgaaggtggagcagctgtttggcctgggcctgcggcccagaggagagtgccacaaggtgctggagatgtttgactggaacctggagcaggccggctgccacctgctgggctcctggggccctgcccaccacaagaggtag

SEQ ID NO: 175006 - DNA, 3261 bp, synthetic construct
  misc_feature 1..3261: note = Description of Artificial Sequence: Synthetic coding sequence
  source 1..3261: mol_type = other DNA
atgctggaggcccggccccccaggacccagggcagtgatgctgctggagctgctgctggccggggcctgcgggccctgctgctgagcctgacagctgctgctggcatctggggctccatgggagagaggtctgcctaccagaggctggccggcggggaggagggcccccagaggctgggcggcggccgcatgcagcctgaggagggcaccggctggctgctggagctgctgtctgaggtgcagctgcagcagtacttcctgcggctgagagatgacctgaatgtgacccggctgagccactttgaatatgtgaagaatgaagacctggagaagattggcatgggccggcccggccagaggcggctgtgggaggccgtgaagaggaggaaggccctgtgcaagaggaagtcctggatgagcaaggtgttcagcggcaagaggctggaggccgagttccccccccaccacagccagagcaccttcaggaagaccagccctgcccctgggggccctgctggggagggccccctgcagagcctgacctgcctgattggagagaaggacctgcggctgctggagaagctgggagatggcagctttggagtggtgcggcggggggagtgggatgcccccagcggcaagacagtgtctgtggccgtgaagtgcctgaagccagatgtgctgagccagcctgaggccatggatgacttcatccgggaggtgaatgccatgcacagcctggaccacaggaacctgatccggctgtatggagtggtgctgaccccacccatgaagatggtgacagagctggcccccctgggcagcctgctggaccggctgaggaagcaccagggccacttcctgctgggcaccctgagccgctatgctgtgcaggtggccgagggcatgggctacctggagagcaagcgcttcatccaccgggacctggccgccaggaacctgctgctggccacccgggacctggtgaagattggagactttggcctgatgagggccctgccccagaatgatgaccactacgtgatgcaggagcacaggaaggtgccctttgcctggtgtgcccctgagagcctgaagaccaggaccttcagccacgccagtgacacctggatgtttggagtgaccctgtgggagatgttcacctacggccaggagccctggattggcctgaatggcagccagatcctgcacaagattgacaaggagggggagcggctgcccaggcctgaggactgcccccaggacatctacaacgtgatggtgcagtgctgggcccacaagccagaggaccggcccacctttgtggccctgcgggacttcctgctggaggcccagcccacagacatgagggccctgcaggactttgaggagccagacaagctgcacatccagatgaatgatgtgatcaccgtgattgagggccgggcagagaactactggtggaggggccagaacaccaggaccctgtgtgtgggccccttccccagaaatgtggtgacctctgtggccggcctgagcgcccaggacatcagccagcccctgcagaacagcttcatccacacaggccacggggacagcgaccccaggcactgctggggcttcccagacagaattgatgagctgtacctgggcaaccccatggaccccccagacctgctgtctgtggagctgagcaccagcaggcctccccagcacctgggcggcgtgaagcgggagcccccaccccggcccccccagcctgccttcttcacccagaagcccacctatgaccctgtgtctgaggaccaggaccccctgagcagtgacttcaagaggctgggcctgaggaagccaggcctgccccggggcctgtggctggccaagcccagcgcccgggtgcccggcaccaaggccagccggggcagcggggctgaggtgaccctgattgactttggagaggagcctgtggtgcctgccctgcggccctgtgcccccagcctggcccagctggccatggatgcctgcagcctgctggatgagaccccaccccagagccccacccgggccctgccccggcccctgcaccccacccctgtggtggactgggatgcccggcccctgcccccacctccagcctatgatgatgtggcccaggatgaagatgactttgagatctgcagcatcaacagcaccctggtgggcgccggcgtgcctgctggccccagccagggccagaccaactatgcctttgtgcctgagcaggcccggcccccaccacccctggaggacaacctcttcctgcccccccagggcggcggcaagccacccagcagcgcccagacagctgagatcttccaggccctgcagcaggagtgcatgaggcagctgcaggccccagctggcagccctgcccccagccccagccctggaggagatgacaagccccaggtgcccccccgggtgcccatccccccccggcccacccggccccacgtgcagctgagccctgcccctcctggagaggaggagaccagccagtggccaggccctgccagccccccccgggtgcccccccgggagcccctgagcccccagggcagcaggacccccagccccctggtgcccccaggcagcagccccctgcccccccggctgagcagcagccctgggaagaccatgcccaccacccagagctttgccagtgaccccaagtatgccaccccccaggtgatccaggcccctggcccccgggccggcccctgcatcctgcccatcgtgagagatggcaagaaggtgagcagcacccactactacctgctgcctgagcggcccagctacctggagcgctaccagcgcttcctgcgggaggcccagagccctgaggagcccacccccctgcctgtgcccctgctgctgcccccacccagcaccccagccccagctgcccccacagccaccgtgcggcccatgccccaggccgccctggaccccaaggccaacttcagcaccaacaacagcaaccctggggcccggcccccaccaccccgggccacagcccggctgccccagaggggctgccctggagatggccctgaggccggccggcctgctgacaagatccagatggtggagcagctgtttggcctgggcctgcggcccagaggagagtgccacaaggtgctggagatgtttgactggaacctggagcaggccggctgccacctgctgggctcctggggccctgcccaccacaagaggtag

SEQ ID NO: 175007 - DNA, 3117 bp, synthetic construct; identical to SEQ ID NO: 175005
  misc_feature 1..3117: note = Description of Artificial Sequence: Synthetic coding sequence
  source 1..3117: mol_type = other DNA

SEQ ID NO: 175008 - DNA, 294 bp, synthetic construct
  misc_feature 1..294: note = Description of Artificial Sequence: Synthetic coding sequence
  source 1..294: mol_type = other DNA
atgcagcctgaggagggcaccggctggctgctggagctgctgtctgaggtgcagctgcagcagtacttcctgcggctgagagatgacctgaatgtgacccggctgagccactttgaatatgtgaagaatgaagacctggagaagattggcatgggccggcccggccagaggcggctgtgggaggccgtgaagaggaggaaggccctgtgcaagaggaagtcctggatgagcaaggtgttttctgggaagaggctggaggccgagttccccccccaccacagccagagcacctag

SEQ ID NO: 175009 - DNA, 1827 bp, synthetic construct
  misc_feature 1..1827: note = Description of Artificial Sequence: Synthetic coding sequence
  source 1..1827: mol_type = other DNA
atgagccaggagggggactatggccgctggaccatcagcagcagtgatgagagcgaggaggagaagcccaagccagacaagcccagcaccagcagcctgctgtgtgcccggcagggcgccgccaatgagccccgctacacctgcagcgaggcccagaaggccgcccacaagaggaagatcagccctgtgaagttcagcaacacagacagcgtgctgccccccaagaggcagaagagcggcagccaggaggacctgggctggtgcctgagcagcagtgatgatgagctgcagcctgagatgccccagaagcaggccgagaaggtggtgatcaagaaggagaaggacatcagcgccccaaatgatggaacagcccagaggacagagaaccacggggccccagcctgccaccggctgaaggaggaggaggatgaatatgagaccagcggggagggccaggacatctgggacatgctggacaagggcaaccccttccagttctacctgaccagggtgtctggagtgaagcccaagtacaacagcggggccctgcacatcaaggacatcctgagccccctgtttggcaccctggtgtcctctgcccagttcaactactgctttgatgtggactggctggtgaagcagtacccacctgagttcaggaagaagcccatcctgctggtgcacggggacaagcgggaggccaaggcccacctgcacgcccaggccaagccctatgagaacatcagcctgtgccaggccaagctggacatcgccttcggcacccaccacaccaagatgatgctgctgctgtatgaggagggcctgcgggtggtgatccacaccagcaacctgattcatgctgactggcaccagaagacccagggcatctggctgagccccctgtaccccagaattgctgatggcacccacaagagcggggagagccccacccacttcaaggctgacctgatctcctacctgatggcctacaatgcccccagcctgaaggagtggattgatgtgatccacaagcatgacctgtctgagaccaacgtgtacctgattggcagcaccccaggccgcttccagggcagccagaaggacaactggggccacttccggctgaagaagctgctgaaggaccacgccagctccatgcccaatgctgagagctggcctgtggtgggccagttcagctctgtgggcagcctgggcgcagatgagagcaagtggctgtgcagcgagttcaaggagagcatgctgaccctgggcaaggagagcaagacccctgggaagagctctgtgcccctgtacctgatctaccccagcgtggagaatgtgaggaccagcctggagggctacccagctgggggcagcctgccctacagcatccagacagctgagaagcagaactggctgcacagctacttccacaagtggagcgctgagaccagcggccgcagcaatgccatgccccacatcaagacctacatgaggcccagcccagacttcagcaagatcgcctggttcctggtgaccagcgccaacctgagcaaggccgcctggggcgccctggagaagaatggcacccagctgatgatccgctcctatgagctgggcgtgctcttcctgcccagcgccttcggcctggacagcttcaaggtgaagcagaagttctttgctggcagccaggagcccatggccaccttccctgtgccctatgacctgcccccagagctgtatggcagcaaggaccggccctggatctggaacatcccctacgtgaaggccccagacacccacggcaacatgtgggtgcccagctag

SEQ ID NO: 175010 - DNA, 1110 bp, synthetic construct
  misc_feature 1..1110: note = Description of Artificial Sequence: Synthetic coding sequence
  source 1..1110: mol_type = other DNA
atggtgatcagcgagcggctgcggctgacctccatgccccggcccagcctgaccaggaccagcctgagcgccaggaagatgatgctgctgctgtatgaggagggcctgcgggtggtgatccacaccagcaacctgattcatgctgactggcaccagaagacccagggcatctggctgagccccctgtaccccagaattgctgatggcacccacaagtctggagagagccccacccacttcaaggctgacctgatctcctacctgatggcctacaatgcccccagcctgaaggagtggattgatgtgatccacaagcatgacctgtctgagaccaacgtgtacctgattggcagcaccccaggccgcttccagggcagccagaaggacaactggggccacttccggctgaagaagctgctgaaggaccacgccagctccatgcccaatgctgagagctggcctgtggtgggccagttcagctctgtgggcagcctgggcgcagatgagagcaagtggctgtgcagcgagttcaaggagagcatgctgaccctgggcaaggagagcaagaccccaggcaagagctctgtgcccctgtacctgatctaccccagcgtggagaatgtgaggaccagcctggagggctacccagctgggggcagcctgccctacagcatccagacagctgagaagcagaactggctgcacagctacttccacaagtggagcgctgagaccagcggccgcagcaatgccatgccccacatcaagacctacatgaggcccagcccagacttcagcaagatcgcctggttcctggtgaccagcgccaacctgagcaaggccgcctggggcgccctggagaagaatggcacccagctgatgatccgctcctatgagctgggcgtgctcttcctgcccagcgccttcggcctggacagcttcaaggtgaagcagaagttctttgctggcagccaggagcccatggccaccttccctgtgccctatgacctgcccccagagctgtatggcagcaaggaccggccctggatctggaacatcccctacgtgaaggccccagacacccacggcaacatgtgggtgcccagctag

SEQ ID NO: 175011 - DNA, 1827 bp, synthetic construct; identical to SEQ ID NO: 175009
  misc_feature 1..1827: note = Description of Artificial Sequence: Synthetic coding sequence
  source 1..1827: mol_type = other DNA

SEQ ID NO: 175012 - DNA, 897 bp, synthetic construct
  misc_feature 1..897: note = Description of Artificial Sequence: Synthetic coding sequence
  source 1..897: mol_type = other DNA
atgagccaggagggggactatggccgctggaccatcagcagcagtgatgagagcgaggaggagaagcccaagccagacaagcccagcaccagcagcctgctgtgtgcccggcagggcgccgccaatgagccccgctacacctgcagcgaggcccagaaggccgcccacaagaggaagatcagccctgtgaagttcagcaacacagacagcgtgctgccccccaagaggcagaagagcggcagccaggaggacctgggctggtgcctgagcagcagtgatgatgagctgcagcctgagatgccccagaagcaggccgagaaggtggtgatcaagaaggagaaggacatcagcgccccaaatgatggaacagcccagaggacagagaaccacggggccccagcctgccaccggctgaaggaggaggaggatgaatatgagaccagcggggagggccaggacatctgggacatgctggacaagggcaaccccttccagttctacctgaccagggtgtctggagtgaagcccaagtacaacagcggggccctgcacatcaaggacatcctgagccccctgtttggcaccctggtgtcctctgcccagttcaactactgctttgatgtggactggctggtgaagcagtacccacctgagttcaggaagaagcccatcctgctggtgcacggggacaagcgggaggccaaggcccacctgcacgcccaggccaagccctatgagaacatcagcctgtgccaggccaagctggacatcgccttcggcacccaccacaccaagatgatgctgctgctgtatgaggagggcctgcgggtggtgatccacaccagcaacctgattcatgctgactggcaccagaagacccagggcacccacctgtag

SEQ ID NO: 175013 - DNA, 441 bp, synthetic construct
  misc_feature 1..441: note = Description of Artificial Sequence: Synthetic coding sequence
  source 1..441: mol_type = other DNA
atgagccaggagggggactatggccgctggaccatcagcagcagtgatgagagcgaggaggagaagcccaagccagacaagcccagcaccagcagcctgctgtgtgcccggcagggcgccgccaatgagccccgctacacctgcagcgaggcccagaaggccgcccacaagaggaagatcagccctgtgaagttcagcaacacagacagcgtgctgccccccaagaggcagaagagcggcagccaggaggacctgggctggtgcctgagcagcagtgatgatgagctgcagcctgagatgccccagaagcaggccgagaaggtggtgatcaagaaggagaaggacatcagcgccccaaatgatggaacagcccagaggacagagaaccacggggccccagcctgccaccggctgaaggaggaggaggatgaatatgaatag

SEQ ID NO: 175014 - DNA, 447 bp, synthetic construct
  misc_feature 1..447: note = Description of Artificial Sequence: Synthetic coding sequence
  source 1..447: mol_type = other DNA
atgagccaggagggggactatggccgctggaccatcagcagcagtgatgagagcgaggaggagaagcccaagccagacaagcccagcaccagcagcctgctgtgtgcccggcagggcgccgccaatgagccccgctacacctgcagcgaggcccagaaggccgcccacaagaggaagatcagccctgtgaagttcagcaacacagacagcgtgctgccccccaagaggcagaagagcggcagccaggaggacctgggctggtgcctgagcagcagtgatgatgagctgcagcctgagatgccccagaagcaggccgagaaggtggtgatcaagaaggagaaggacatcagcgccccaaatgatggaacagcccagaggacagagaaccacggggccccagcctgccaccggctgaaggaggaggaggatgaatatgagaccagctag

SEQ ID NO: 175015 - DNA, 840 bp, synthetic construct
  misc_feature 1..840: note = Description of Artificial Sequence: Synthetic coding sequence
  source 1..840: mol_type = other DNA
atgagccaggagggggactatggccgctggaccatcagcagcagtgatgagagcgaggaggagaagcccaagccagacaagcccagcaccagcagcctgctgtgtgcccggcagggcgccgccaatgagccccgctacacctgcagcgaggcccagaaggccgcccacaagaggaagatcagccctgtgaagttcagcaacacagacagcgtgctgccccccaagaggcagaagagcggcagccaggaggacctgggctggtgcctgagcagcagtgatgatgagctgcagcctgagatgccccagaagcaggccgagaaggtggtgatcaagaaggagaaggacatcagcgccccaaatgatggaacagcccagaggacagagaaccacggggccccagcctgccaccggctgaaggaggaggaggatgaatatgagaccagcggggagggccaggacatctgggacatgctggacaagggcaaccccttccagttctacctgaccagggtgtctggagtgaagcccaagtacaacagcggggccctgcacatcaaggacatcctgagccccctgtttggcaccctggtgtcctctgcccagttcaactactgctttgatgtggactggctggtgaagcagtacccacctgagttcaggaagaagcccatcctgctggtgcacggggacaagcgggaggccaaggcccacctgcacgcccaggccaagccctatgagaacatcagcctgtgccaggccaagctggacatcgccttcggcacccaccacaccaagatgatgctgctgctgtatgaggagggcctgcgggtggtgatctag

SEQ ID NO: 175016 - DNA, 486 bp, synthetic construct
  misc_feature 1..486: note = Description of Artificial Sequence: Synthetic coding sequence
  source 1..486: mol_type = other DNA
atgagccaggagggggactatggccgctggaccatcagcagcagtgatgagagcgaggaggagaagcccaagccagacaagcccagcaccagcagcctgctgtgtgcccggcagggcgccgccaatgagccccgctacacctgcagcgaggcccagaaggccgcccacaagaggaagatcagccctgtgaagttcagcaacacagacagcgtgctgccccccaagaggcagaagagcggcagccaggaggacctgggctggtgcctgagcagcagtgatgatgagctgcagcctgagatgccccagaagcaggccgagaaggtggtgatcaagaaggagaaggacatcagcgccccaaatgatggaacagcccagaggacagagaaccacggggccccagcctgccaccggctgaaggaggaggaggatgaatatgagaccagcggggagggccaggacatctgggacatgctggacaagggctag

SEQ ID NO: 175017 - DNA, 456 bp, synthetic construct
  misc_feature 1..456: note = Description of Artificial Sequence: Synthetic coding sequence
  source 1..456: mol_type = other DNA
atgagccaggagggggactatggccgctggaccatcagcagcagtgatgagagcgaggaggagaagcccaagccagacaagcccagcaccagcagcctgctgtgtgcccggcagggcgccgccaatgagccccgctacacctgcagcgaggcccagaaggccgcccacaagaggaagatcagccctgtgaagttcagcaacacagacagcgtgctgccccccaagaggcagaagagcggcagccaggaggacctgggctggtgcctgagcagcagtgatgatgagctgcagcctgagatgccccagaagcaggccgagaaggtggtgatcaagaaggagaaggacatcagcgccccaaatgatggaacagcccagaggacagagaaccacggggccccagcctgccaccggctgaaggaggaggaggatgaatatgagaccagcggggagggctag

SEQ ID NO: 175018 - DNA, 1113 bp, synthetic construct
  misc_feature 1..1113: note = Description of Artificial Sequence: Synthetic coding sequence
  source 1..1113: mol_type = other DNA
atggtgggcaagctgaagcagaacctgctgctggcctgcctggtgatcagctctgtgaccgtcttctacctgggccagcacgccatggagtgccaccacagaattgaggagaggagccagcctgtgaagctggagagcaccaggaccaccgtgaggacaggcctggacctgaaggccaacaagacctttgcctaccacaaggacatgcccctcatcttcatcggcggcgtgcccaggagcggcaccaccctgatgagggccatgctggatgcccacccagacatccgctgtggggaggagaccagggtcatcccccgcatcctggccctgaagcagatgtggagccgcagcagcaaggagaagatccggctggatgaagctggggtgacagatgaggtgctggacagcgccatgcaggccttcctgctggagatcatcgtgaagcatggagagcccgccccctacctgtgcaacaaggacccctttgccctgaagagcctgacctacctgagccgcctcttccccaatgccaagttcctgctgatggtgagagatggccgggcctctgtgcacagcatgatcagcaggaaggtgaccatcgccggctttgacctgaacagctacagagactgcctgaccaagtggaacagagccatcgagaccatgtacaaccagtgcatggaggtgggctacaagaagtgcatgctggtgcactatgagcagctggtgctgcaccctgagcgctggatgaggaccctgctgaagttcctgcagatcccctggaaccacagcgtgctgcaccacgaggagatgattggcaaggccggcggcgtgtccctgagcaaggtggagaggagcacagaccaggtgatcaagcctgtgaatgtgggcgccctgagcaagtgggtgggcaagatccccccagatgtgctgcaggacatggctgtgattgcccccatgctggccaagctgggctatgacccctatgccaacccccccaactacggcaagccagaccccaagatcatcgagaacaccaggagagtgtacaagggggagttccagctgcctgacttcctgaaggagaagccccagacagagcaggtggagtag

SEQ ID NO: 175019 - DNA, 129 bp, synthetic construct
  misc_feature 1..129: note = Description of Artificial Sequence: Synthetic coding sequence
  source 1..129: mol_type = other DNA
atggtgggcaagctgaagcagaacctgctgctggcctgcctggtgatcagctctgtgaccgtcttctacctgggccagcacgccatggagtgccaccacagaattgaggagaggagccagcctgtgtag

SEQ ID NO: 175020 - DNA, 423 bp, synthetic construct
  misc_feature 1..423: note = Description of Artificial Sequence: Synthetic coding sequence
  source 1..423: mol_type = other DNA
atggtgggcaagctgaagcagaacctgctgctggcctgcctggtgatcagctctgtgaccgtcttctacctgggccagcacgccatggagtgccaccacagaattgaggagaggagccagcctgtgaagctggagagcaccaggaccaccgtgaggacaggcctggacctgaaggccaacaagacctttgcctaccacaaggacatgcccctcatcttcatcggcggcgtgcccaggagcggcaccaccctgatgagggccatgctggatgcccacccagacatccgctgtggggaggagaccagggtcatcccccgcatcctggccctgaagcagatgtggagccgcagcagcaaggagaagatccggctggatgaagctggggtgacagatgaggtgctggacagcgccatgcaggcctag

SEQ ID NO: 175021 - DNA, 1083 bp, synthetic construct
  misc_feature 1..1083: note = Description of Artificial Sequence: Synthetic coding sequence
  source 1..1083: mol_type = other DNA
atggtgggcaagctgaagcagaacctgctgctggcctgcctggtgatcagctctgtgaccgtcttctacctgggccagcacgccatggagtgccaccacagaattgaggagaggagccagcctgtgaagctggagagcaccaggaccaccgtgaggacaggcctggacctgaaggccaacaagacctttgcctaccacaaggacatgcccctcatcttcatcggcggcgtgcccaggagcggcaccaccctgatgagggccatgctggatgcccacccagacatccgctgtggggaggagaccagggtcatcccccgcatcctggccctgaagcagatgtggagccgcagcagcaaggagaagatccggctggatgaagctggggtgacagatgaggtgctggacagcgccatgcaggccttcctgctggagatcatcgtgaagcatggagagcccgccccctacctgtgcaacaaggacccctttgccctgaagagcctgacctacctgagccgcctcttccccaatgccaagttcctgctgatggtgagagatggccgggcctctgtgcacagcatgatcagcaggaaggtgaccatcgccggctttgacctgaacagctacagagactgcctgaccaagtggaacagagccatcgagaccatgtacaaccagtgcatggaggtgggctacaagaagtgcatgctggtgcactatgagcagctggtgctgcaccctgagcgctggatgaggaccctgctgaagttcctgcagatcccctggaaccacagcgtgctgcaccacgaggagatgattggcaaggccggcggcgtgtccctgagcaaggtggagaggagcacagaccaggtgatcaagcctgtgaatgtgggcgccctgagcaagtgggtgggcaagatccccccagatgtgctgcaggacatggctgtgattgcccccatgctggccaagctgggctatgacccctatgccaacccccccaactacggcaagccagaccccaagatcatcgagaacacccggcgggagcggctgctgcccttccagcagaagggcaacagctag

SEQ ID NO: 175022 - DNA, 1134 bp, synthetic construct
  misc_feature 1..1134: note = Description of Artificial Sequence: Synthetic coding sequence
  source 1..1134: mol_type = other DNA
atgaggctgtctgtgcggcgggtgctgctggccgccggctgtgccctggtgctggtgctggccgtgcagctgggccagcaggtgctggagtgcagagctgtgctggccggcctgcggagccccaggggggccatgaggcctgagcaggaggagctggtgatggtgggcaccaaccacgtggagtaccgctatggcaaggccatgcccctcatctttgtgggcggcgtgcccaggagcggcaccaccctgatgagggccatgctggatgcccaccctgaggtgcgctgtggggaggagacccgcatcatcccccgggtgctggccatgaggcaggcctggagcaagagcggccgggagaagctgcggctggatgaggccggcgtgacagatgaggtgctggatgctgccatgcaggccttcatcctggaggtgattgccaagcacggggagcccgcccgggtgctgtgcaacaaggaccccttcaccctgaagagctctgtgtacctgagccgcctcttccccaacagcaagttcctgctgatggtgagagatggccgggcctctgtgcacagcatgatcaccaggaaggtgaccatcgccggctttgacctgagcagctacagagactgcctgaccaagtggaacaaggccatcgaggtgatgtatgcccagtgcatggaggtgggcaaggagaagtgcctgcctgtgtactatgagcagctggtgctgcacccccggcgcagcctgaagctgatcctggacttcctgggcatcgcctggagcgatgctgtgctgcaccacgaggacctgattggcaagccaggcggcgtgtccctgagcaagattgaaagaagcacagaccaggtgatcaagcctgtgaacctggaggccctgagcaagtggacaggccacatccctggagatgtggtgcgggacatggcccagatcgcccccatgctggcccagctgggctatgacccctatgccaacccccccaactacggcaacccagaccccttcgtcatcaacaacacccagagggtgctgaagggggactacaagaccccagccaacctgaagggctacttccaggtgaaccagaacagcaccagcagccacctgggcagcagctag

SEQ ID NO: 175023 - DNA, 1134 bp, synthetic construct; identical to SEQ ID NO: 175022
  misc_feature 1..1134: note = Description of Artificial Sequence: Synthetic coding sequence
  source 1..1134: mol_type = other DNA

SEQ ID NO: 175024 - DNA, 1134 bp, synthetic construct; identical to SEQ ID NO: 175022
  misc_feature 1..1134: note = Description of Artificial Sequence: Synthetic coding sequence
  source 1..1134: mol_type = other DNA

SEQ ID NO: 175025 - DNA, 195 bp, synthetic construct
  misc_feature 1..195: note = Description of Artificial Sequence: Synthetic coding sequence
  source 1..195: mol_type = other DNA
atgaggctgtctgtgcggcgggtgctgctggccgccggctgtgccctggtgctggtgctggccgtgcagctgggccagcaggtgctggagtgcagagctgtgctggccggcctgcggagccccaggggggccatgaggcctgagcaggaggagctggtgatggtgggcaccaaccacgtggagtaccgctactag

SEQ ID NO: 175026 - DNA, 429 bp, synthetic construct
  misc_feature 1..429: note = Description of Artificial Sequence: Synthetic coding sequence
  source 1..429: mol_type = other DNA
atgaggctgtctgtgcggcgggtgctgctggccgccggctgtgccctggtgctggtgctggccgtgcagctgggccagcaggtgctggagtgcagagctgtgctggccggcctgcggagccccaggggggccatgaggcctgagcaggaggagctggtgatggtgggcaccaaccacgtggagtaccgctatggcaaggccatgcccctcatctttgtgggcggcgtgcccaggagcggcaccaccctgatgagggccatgctggatgcccaccctgaggtgcgctgtggggaggagacccgcatcatcccccgggtgctggccatgaggcaggcctggagcaagagcggccgggagaagctgcggctggatgaggccggcgtgacagatgaggtgctggatgctgccatgcaggccttcatcctgtag

SEQ ID NO: 175027 - DNA, 144 bp, synthetic construct
  misc_feature 1..144: note = Description of Artificial Sequence: Synthetic coding sequence
  source 1..144: mol_type = other DNA
atgaggctgtctgtgcggcgggtgctgctggccgccggctgtgccctggtgctggtgctggccgtgcagctgggccagcaggtgctggagtgcagagctgtgctggccggcctgcggagccccaggggggccatgaggccctag

SEQ ID NO: 175028 - DNA, 147 bp, synthetic construct
  misc_feature 1..147: note = Description of Artificial Sequence: Synthetic coding sequence
  source 1..147: mol_type = other DNA
atgaggctgtctgtgcggcgggtgctgctggccgccggctgtgccctggtgctggtgctggccgtgcagctgggccagcaggtgctggagtgcagagctgtgctggccggcctgcggagccccaggggggccatgaggcctgagtag

SEQ ID NO: 175029 - DNA, 363 bp, synthetic construct
  misc_feature 1..363: note = Description of Artificial Sequence: Synthetic coding sequence
  source 1..363: mol_type = other DNA
atgaggctgtctgtgcggcgggtgctgctggccgccggctgtgccctggtgctggtgctggccgtgcagctgggccagcaggtgctggagtgcagagctgtgctggccggcctgcggagccccaggggggccatgaggcctgagcaggaggagctggtgatggtgggcaccaaccacgtggagtaccgctatggcaaggccatgcccctcatctttgtgggcggcgtgcccaggagcggcaccaccctgatgagggccatgctggatgcccaccctgaggtgcgctgtggggaggagacccgcatcatcccccgggtgctggccatgaggcaggcctggagcaagagcggccgggagaagtag

SEQ ID NO: 175030 - DNA, 933 bp, synthetic construct
  misc_feature 1..933: note = Description of Artificial Sequence: Synthetic coding sequence
  source 1..933: mol_type = other DNA
atgcccctcatctttgtgggcggcgtgcccaggagcggcaccaccctgatgagggccatgctggatgcccaccctgaggtgcgctgtggggaggagacccgcatcatcccccgggtgctggccatgaggcaggcctggagcaagagcggccgggagaagctgcggctggatgaagctggggtgacagatgaggtgctggatgctgccatgcaggccttcatcctggaggtgattgccaagcatggagagcccgcccgggtgctgtgcaacaaggaccccttcaccctgaagagctctgtgtacctgagccgcctcttccccaacagcaagttcctgctgatggtgagagatggccgggcctctgtgcacagcatgatcaccaggaaggtgaccatcgccggctttgacctgagcagctacagagactgcctgaccaagtggaacaaggccatcgaggtgatgtatgcccagtgcatggaggtgggcaaggagaagtgcctgcctgtgtactatgagcagctggtgctgcaccccaggaggagcctgaagctgatcctggacttcctgggcatcgcctggagcgatgctgtgctgcaccatgaagatctcatcggcaagccaggaggagtgtccctgagcaagattgaaagaagcacagaccaggtgatcaagcctgtgaacctggaggccctgagcaagtggacaggccacatccctggagatgtggtgcgggacatggcccagatcgcccccatgctggcccagctgggctatgacccctatgccaacccccccaactacggcaacccagacccctttgtgatcaacaacacccagagggtgctgaagggggactacaagaccccagccaacctgaagggctacttccaggtgaaccagaacagcaccagcagccacctgggcagcagctag

SEQ ID NO: 175031 - DNA, 1587 bp, synthetic construct
  misc_feature 1..1587: note = Description of Artificial Sequence: Synthetic coding sequence
  source 1..1587: mol_type = other DNA
atgggagatgcccccagccctgaggagaagctgcacctgatcaccaggaacctgcaggaggtgctgggggaggagaagctgaaggagatcctgaaggagcgggagctgaagatctactggggcacagccaccaccgggaagccccacgtggcctactttgtgcccatgagcaagattgctgacttcctgaaggccggctgtgaggtgaccatcctgtttgctgacctgcacgcctacctggacaacatgaaggccccctgggagctgctggagctgcgggtgtcctactatgaaaatgtcatcaaggccatgctggagagcattggagtgcccctggagaagctgaagttcatcaagggcacagactaccagctgagcaaggagtacaccctggatgtgtaccgcctgagctctgtggtgacccagcacgacagcaagaaggccggggctgaggtggtgaagcaggtggagcaccccctgctgagcggcctgctgtacccaggcctgcaggccctggatgaggagtacctgaaggtggatgcccagtttggaggcatcgaccagaggaagatcttcacctttgctgagaagtacctgcctgccctgggctacagcaagagggtgcacctgatgaaccccatggtgcccggcctgaccggcagcaagatgagcagcagcgaggaggagagcaagattgacctgctggacagaaaagaagatgtgaagaagaagctgaagaaggccttctgtgagcctggaaatgtggagaacaacggggtgctgtccttcatcaagcacgtgctcttccccctgaagtcagaatttgtgatcctgagagatgagaagtggggcggcaacaagacctacacagcctacgtggacctggagaaggactttgctgctgaggtggtgcaccctggggacctgaagaacagcgtggaggtggccctgaacaagctgctggaccccatccgggagaagttcaacaccccagccctgaagaagctggccagcgctgcctacccagaccccagcaagcagaagcccatggccaagggccctgccaagaacagcgagcctgaggaggtgatccccagccggctggacatccgggtgggcaagatcatcaccgtggagaagcacccagatgctgacagcctgtatgtggagaagattgatgtgggggaggccgagcccaggacagtggtgtctggcctggtgcagtttgtgcccaaggaggagctgcaggaccggctggtggtggtgctgtgcaacctgaagccccagaagatgagaggagtggagagccagggcatgctgctgtgtgccagcattgagggcatcaaccggcaggtggagcccctggaccccccagctggcagcgcccctggagagcacgtgtttgtgaagggctatgagaagggccagccagatgaggagctgaagcccaagaagaaggtgtttgagaagctgcaggccgacttcaagatcagcgaggagtgcatcgcccagtggaagcagaccaacttcatgaccaagctgggcagcatcagctgcaagagcctgaagggcggcaacatctcctag

SEQ ID NO: 175032 - DNA, 1434 bp, synthetic construct
  misc_feature 1..1434: note = Description of Artificial Sequence: Synthetic coding sequence
  source 1..1434: mol_type = other DNA
atggccgcccccatcctgcggagcttctcctggggccgctggagcggcaccctgaacctgtctgtgctgctgcccctgggcctgaggaaggcccacagcggggcccagggcctgctggccgcccagaaggcccggggcctcttcaaggacttcttccctgagaccggcaccaagattgagctgcctgagctgtttgaccggggcacagccagcttcccccagaccatctactgcggctttgaccccacagctgacagcctgcacgtgggccacctgctggccctgctgggcctcttccacctgcagagagctggccacaacgtgattgccctggtgggcggggccacagcccggctgggggaccccagcggccgcaccaaggagcgggaggccctggagacagagcgggtgcgggccaatgcccgggccctgcggctgggcctggaggccctggccgccaaccaccagcagctgttcacagatggccgctcctggggcagcttcaccgtgctggacaacagcgcctggtaccagaagcagcacctggtggacttcctggccgctgtgggcggccacttcaggatgggcaccctgctgagccggcagagcgtgcagctgcggctgaagagccctgagggcatgagcctggccgagttcttctaccaggtgctgcaggcctatgacttctactacctgttccagagatatggctgccgggtgcagctgggcggcagtgaccagctgggcaacatcatgagcggctatgagttcatcaacaagctgaccggggaggatgtgtttggcatcaccgtgcccctcatcaccagcaccaccggggccaagctgggcaagtctgctggaaatgctgtgtggctgaacagagacaagaccagcccctttgagctgtaccagttctttgtgcggcagccagatgattctgtggagcgctacctgaagctgttcaccttcctgcccctgcctgagattgaccacatcatgcagctgcacgtgaaggagcctgagcggcggggcccccagaagaggctggccgctgaggtgaccaagctggtgcacggccgggagggcctggacagcgccaagcgctgcacccaggccctgtaccacagcagcattgatgccctggaggtgatgtctgaccaggagctgaaggagctgttcaaggaggcccccttcagcgagttcttcctggaccccggcacctctgtgctggacacctgcaggaaggccaatgccatcccagatggcccccggggctacaggatgatcacagagggcggcgtgtccatcaaccaccagcaggtgaccaaccctgagagcgtgctgattgtgggccagcacatcctgaagaatggcctgagcctgctgaagattggcaagaggaacttctacatcatcaagtggctgcagctgtag

SEQ ID NO: 175033 - DNA, 723 bp, synthetic construct
  misc_feature 1..723: note = Description of Artificial Sequence: Synthetic coding sequence
  source 1..723: mol_type = other DNA
atggccgagtacctggccagcatctttggaacagagaaggacaaggtgaactgcagcttctacttcaagatcggggcctgcagacatggagaccgctgcagccggctgcacaacaagcccaccttcagccagaccatcgccctgctgaacatctacagaaacccccagaacagcagccagagcgcagatggcctgcgctgtgctgtgtctgatgtggagatgcaggagcactatgatgagttctttgaggaggtgttcacagagatggaggagaagtatggagaggtggaggagatgaatgtgtgtgacaacctgggggaccacctggtgggcaatgtgtatgtgaagttccggcgggaggaggatgctgagaaggccgtcatcgacctgaacaaccgctggttcaacggccagcccatccacgccgagctgagccctgtgacagacttccgggaggcctgctgccggcagtatgagatgggagagtgcacccggggcggcttctgcaacttcatgcacctgaagcccatcagccgggagctgcggcgggagctgtatggaagaagaaggaagaagcacaggagccgcagccgcagccgggagcggcgcagccgcagccgggaccggggccggggcggcggcggcggcggcggcggcggcggcggcggccgggagcgggacagaagaagaagccgggaccgggagaggagcggccgcttctag

SEQ ID NO: 175034 - DNA, 723 bp, synthetic construct
  misc_feature 1..723: note = Description of Artificial Sequence: Synthetic coding sequence
  source 1..723: mol_type = other DNA
atggccgagtacctggccagcatctttggaacagagaaggacaaggtgaactgcagcttctacttcaagatcggggcctgcagacatggagaccgctgcagccggctgcacaacaagcccaccttcagccagaccatcctgatccagaacatctacagaaacccccagaacagcgcccagacagcagatggcagccactgtgctgtgtctgatgtggagatgcaggagcactatgatgagttctttgaggaggtgttcacagagatggaggagaagtatggagaggtggaggagatgaatgtgtgtgacaacctgggggaccacctggtgggcaatgtgtatgtgaagttccggcgggaggaggatgctgagaaggccgtcatcgacctgaacaaccgctggttcaacggccagcccatccacgccgagctgagccctgtgacagacttccgggaggcctgctgccggcagtatgagatgggagagtgcacccggggcggcttctgcaacttcatgcacctgaagcccatcagccgggagctgcggcgggagctgtatggaagaagaaggaagaagcacaggagccgcagccgcagccgggagcggcgcagccgcagccgggaccggggccggggcggcggcggcggcggcggcggcggcggcggcggccgggagcgggacagaagaagaagccgggaccgggagaggagcggccgcttctag

SEQ ID NO: 175035 - DNA, 504 bp, synthetic construct
  misc_feature 1..504: note = Description of Artificial Sequence: Synthetic coding sequence
  source 1..504: mol_type = other DNA
atgcaggagcactatgatgagttctttgaggaggtgttcacagagatggaggagaagtacggggaggtggaggagatgaatgtgtgtgacaacctgggggaccacctggtgggcaatgtgtatgtgaagttcagaagagaggaggatgctgagaaggctgtgattgacctgaacaaccgctggttcaacggccagcccatccatgctgagctgagccctgtgacagacttccgggaggcctgctgccggcagtatgagatgggagaatgtacccggggcggcttctgcaacttcatgcacctgaagcccatcagccgggagctgcggcgggagctgtatggaagaagaaggaagaagcacaggagccgcagccgcagccgggagaggaggagccgcagccgggaccggggccggggcggcggcggcggcggcggcggcggcggcggcggccgggagcgggacagaagaagaagccgggaccgggagaggagcggccgcttctag

SEQ ID NO: 175036 - DNA, 504 bp, synthetic construct; identical to SEQ ID NO: 175035
  misc_feature 1..504: note = Description of Artificial Sequence: Synthetic coding sequence
  source 1..504: mol_type = other DNA

SEQ ID NO: 175037 - DNA, 1218 bp, synthetic construct
  misc_feature 1..1218: note = Description of Artificial Sequence: Synthetic coding sequence
  source 1..1218: mol_type = other DNA
atgtttgtgcaggaggagaagatctttgctgggaaggtgctgcggctgcacatctgtgccagtgatggagctgagtggctggaggaggccacagaggacacctctgtggagaagctgaaggagcgctgcctgaagcactgtgcccacggcagcctggaggaccccaagagcatcacccaccacaagctgattcatgctgccagcgagcgggtgctgagtgatgcccggaccatcctggaggagaacatccaggaccaggatgtgctgctgctgatcaagaagagggcccccagccccctgcccaagatggctgatgtgtctgctgaggagaagaagaagcaggaccagaaggccccagacaaggaggccatcctgcgggccacagccaacctgcccagctacaacatggacagagctgctgtgcagaccaacatgagggacttccagacagagctgaggaagatcctggtgtccctcatcgaggtggcccagaagctgctggccctgaacccagatgctgtggagctgttcaagaaggccaatgccatgctggatgaagatgaagatgagcgggtggatgaagctgccctgcggcagctgacagagatgggcttcccagaaaatagagccaccaaggccctgcagctgaaccacatgtctgtgccccaggccatggagtggctgattgaacatgctgaggaccccaccatcgacacccccctgcccggccaggcccctcctgaggccgagggcgccacagctgctgccagcgaggccgctgctggggccagcgccacagatgaggaggccagagatgagctgacagagatcttcaagaagatccggaggaagcgggagttccgggcagatgcccgggctgtgatcagcctgatggagatgggctttgatgagaaggaggtgattgatgccctgcgggtgaacaacaaccagcagaatgctgcctgtgagtggctgctgggggacaggaagcccagccctgaggagctggacaagggcatcgaccctgacagccccctcttccaggccatcctggacaaccctgtggtgcagctgggcctgaccaaccccaagaccctgctggcctttgaggacatgctggagaaccccctgaacagcacccagtggatgaatgaccctgagaccggccctgtgatgctgcagatcagccgcatcttccagaccctgaacagaacatag

SEQ ID NO: 175038 - DNA, 540 bp, synthetic construct
  misc_feature 1..540: note = Description of Artificial Sequence: Synthetic coding sequence
  source 1..540: mol_type = other DNA
atggccgccagccaggtgctgggggagaagatcaacatcctgtctggagagaccgtgaaggccggggaccgggaccccctgggcaatgactgcccagagcaggaccggctgccccagaggtcctggaggcagaagtgtgccagctatgtgctggccctgcggccctggagcttcagcgccagcctgacccctgtggccctgggcagcgccctggcctaccgcagccacggcgtgctggacccccggctgctggtgggctgtgctgtggccgtgctggccgtgcatggagctggcaacctggtgaacacctactatgacttcagcaaaggaattgaccacaagaagagtgatgacaggaccctggtggaccgcatcctggagccccaggatgtggtgcgctttggagtcttcctgtacaccctgggctgtgtgtgtgccgcctgcctgtactacctgagccccctgaagctggagcacctggccctgatctactttggaggcctgagcggcagcttcctgtacacaggagtgctgatctag

SEQ ID NO: 175039 - DNA, 1017 bp, synthetic construct
  misc_feature 1..1017: note = Description of Artificial Sequence: Synthetic coding sequence
  source 1..1017: mol_type = other DNA
atggccgccagccaggtgctgggggagaagatcaacatcctgtctggagagaccgtgaaggccggggaccgggaccccctgggcaatgactgcccagagcaggaccggctgccccagaggtcctggaggcagaagtgtgccagctatgtgctggccctgcggccctggagcttcagcgccagcctgacccctgtggccctgggcagcgccctggcctaccgcagccacggcgtgctggacccccggctgctggtgggctgtgctgtggccgtgctggccgtgcatggagctggcaacctggtgaacacctactatgacttcagcaaaggaattgaccacaagaagagtgatgacaggaccctggtggaccgcatcctggagccccaggatgtggtgcgctttggagtcttcctgtacaccctgggctgtgtgtgtgccgcctgcctgtactacctgagccccctgaagctggagcacctggccctgatctactttggaggcctgagcggcagcttcctgtacacaggaggcatcggcttcaagtatgtggccctgggggacctgatcatcctgatcaccttcggccccctggccgtgatgtttgcctatgccatccaggtgggcagcctggccatcttccccctggtgtatgccatccccctggccctgagcacagaggccatcctgcacagcaacaacacccgggacatggagagtgaccgggaggccggcatcgtgaccctggccatcctgattggccccaccttctcctacatcctgtacaacaccctgctcttcctgccctacctggtgttcagcatcctggccacccactgcaccatcagcctggccctgcccctgctgaccatccccatggccttcagcctggagcggcagttccgcagccaggccttcaacaagctgccccagaggacagccaagctgaacctgctgctgggcctcttctacgtgtttggcatcatcctggccccagctggcagcctgcccaagatctag

SEQ ID NO: 175040 - DNA, 3405 bp, synthetic construct
  misc_feature 1..3405: note = Description of Artificial Sequence: Synthetic coding sequence
  source 1..3405: mol_type = other DNA
atgtctgagccccaccgggtgcagttcaccagcctgcccggcagcctgaacccagccttcctgaagaagagcaggaaggaggaggccggggccggggagcagcaccaggactgtgagcctgctgctgctgctgtgcgcatcaccctgaccctgtttgagccagaccacaagcgctgcccagagttcttctacccagagctggtgaagaacatccggggcaaggtgaagggcctgcagcccggggacaagaagaaggacctgagtgaccccttcaatgatgaggagaaggagcggcacaaggtggaggccctggccaggaagtttgaggagaagtatggaggcaagaagaggaggaaggaccgcatccaggacctgattgacatgggctacggctatgatgaaagtgacagcttcatcgacaacagcgaggcctatgatgagctggtgcctgccagcctgaccaccaagtatggaggcttctacatcaacagcggcaccctgcagttccggcaggccagcgagagtgaagatgacttcatcaaggagaagaagaagaagagccccaagaagaggaagctgaaggagggcggggagaagatcaagaagaagaagaaggatgacacctatgacaaggagaagaagagcaagaagagcaagttcagcaaggccggcttcaccgccctgaatgccagcaaggagaagaagaagaagaagtacagcggggccctgtctgtgaaggagatgctgaagaagttccagaaggagaaggaggcccagaagaagcgggaggaggagcacaagcctgtggccgtgcccagcgctgaggcccagggcctgcgggagctggagggcgccagtgaccccctgctgagcctgtttggcagcaccagtgacaatgacctgctgcaggccgccacagccatggacagcctgacagacctggacctggagcacctgctgtctgagagccctgagggcagccccttccgggacatggatgatggcagtgacagcctgggcgtgggcctggaccaggagttccggcagcccagcagcctgcctgagggcctgcctgcccccctggagaagagggtgaaggagctggcccaggccgcccgggctgctgagggggagagccggcagaagttcttcacccaggacatcaatggcatcctgctggacatcgaggcccagacccgggagctgagcagccaggtgcgcagcggcgtgtatgcctacctggccagcttcctgccctgcagcaaggatgccctgctgaagagggccaggaagctgcacctgtatgagcagggcggccgcctgaaggagcccctgcagaagctgaaggaggccatcggccgggccatgcctgagcagatggccaagtaccaggatgagtgccaggcccacacccaggccaaggtggccaagatgctggaggaggagaaggacaaggagcagagggaccgcatctgcagtgatgaggaggaggatgaggagaagggcggccgccgcatcatgggccccaggaagaagttccagtggaatgatgagatccgggagctgctgtgccaggtggtgaagatcaagctggagagccaggacctggagaggaacaacaaggcccaggcctgggaggactgtgtgaagggcttcctggatgctgaggtgaagcccctgtggcccaagggctggatgcaggcccggaccctcttcaaggagagccggcggggccacggccacctgaccagcatcctggccaagaagaaggtgatggcccccagcaagatcaaggtgaaggagagcagcaccaagccagacaagaaggtgtctgtgcccagcggccagattggaggccccatcgccctgcccagcgaccaccagacaggaggcctgagcatcggggccagcagccgggagctgcccagccaggccagcggcggcctggccaaccccccacctgtgaacctggaggacagcctggatgaagatctcatcagaaatcctgccagctctgtggaggccgtgtccaaggagctggccgccctgaacagcagagctgctggcaacagcgagttcaccctgcctgcccccagcaaggccccagctgagaaggtgggcggcgtgctgtgcacagaggagaagaggaactttgccaagcccagccccagcgcccctcctccagccagcagcctgcagagccccctgaacttcctggccgagcaggccctggccctgggccagagcagccaggagaagaagccagagagcagcggctacaaggagctgagctgccaggcccccctgaacaagggcctgcctgaggtgcaccagagcaaggccaagcaccacagcctgcccaggaccagccacggcccccaggtggccgtgcctgtgcccggcccccaggtgaaggtgttccacgccggcacccagcagcagaagaacttcaccccacccagcccctttgccaacaagctgcagggccccaaggccagccccacccagtgccacaggagcctgctgcagctggtgaagacagctgccaagggccagggcttccaccccagcgccccagccaccagcggcggcctgagcgccagcagcagcagcagccacaagaccccagccagcagcagcagcgccctgagccacccagccaagccccacagcgtgagcagcgctggcagcagctacaagaacaacccctttgccagcagcatcagcaagcatggagtgagcagcggcagcagcagcagcggcggcacccctgtgcagagctctgtgtctggcagcctggtgcccggcatccagcccccatctgtgggccaggccaccagcaggcctgtgcccagcagcgctgggaagaagatgcctgtgtcccagaagctgaccctggtggcccctcctgggggccccaacggggacagcagcggcggcacccagggcgtggccaagctgctgaccagccccagcctgaagcccagcgctgtgtcctctgtgaccagcagcaccagcctgagcaaaggagccagcggcaccgtgctgctggccggcagcagcctgatggccagcccctacaagagcagcagccccaagctgagcggggccatgagcagcaacagcctgggcatcatcacccctgtgcccatccctgtgcacgtgctgtccttctctgctgacagcagcgccaaggccggcgtgtccaaggatgccatcgtgactggacctgcccctggcagcttccaccacggcctgggccacagcctgctggccggcctgcacagcagcccccctcatgctgcccccctgccccatgctgctgtgcccacccacatcccccagagcctgcccggggccagccagctgcacggcaagggccctgctgtgcccaggaagctgtag

SEQ ID NO: 175041 - DNA, 3405 bp, synthetic construct; identical to SEQ ID NO: 175040
  misc_feature 1..3405: note = Description of Artificial Sequence: Synthetic coding sequence
  source 1..3405: mol_type = other DNA

SEQ ID NO: 175042 - DNA, 3315 bp, synthetic construct
  misc_feature 1..3315: note = Description of Artificial Sequence: Synthetic coding sequence
  source 1..3315: mol_type = other DNA
atgtctgagccccaccgggtgcagttcaccagcctgcccggcagcctgaacccagccttcctgaagaagagcaggaaggaggaggccggggccggggagcagcaccaggactgtgagcctgctgctgctgctgtgcgcatcaccctgaccctgtttgagccagaccacaagcgctgcccagagttcttctacccagagctggtgaagaacatccggggcaaggtgaagggcctgcagcccggggacaagaagaaggacctgagtgaccccttcaatgatgaggagaaggagcggcacaaggtggaggccctggccaggaagtttgaggagaagtatggaggcaagaagaggaggaaggaccgcatccaggacctgattgacatgggctacggctatgatgaaagtgacagcttcatcgacaacagcgaggcctatgatgagctggtgcctgccagcctgaccaccaagtatggaggcttctacatcaacagcggcaccctgcagttccggcaggccagcgagagtgaagatgacttcatcaaggagaagaagaagaagagccccaagaagaggaagctgaaggagggcggggagaagatcaagaagaagaagaaggatgacacctatgacaaggagaagaagagcaagaagagcaagttcagcaaggccggcttcaccgccctgaatgccagcaaggagaagaagaagaagaagtacagcggggccctgtctgtgaaggagatgctgaagaagttccagaaggagaaggaggcccagaagaagcgggaggaggagcacaagcctgtggccgtgcccagcgctgaggcccagggcctgcgggagctggagggcgccagtgaccccctgctgagcctgtttggcagcaccagtgacaatgacctgctgcaggccgccacagccatggacagcctgacagacctggacctggagcacctgctgtctgagagccctgagggcagccccttccgggacatggatgatggcagtgacagcctgggcgtgggcctggaccaggagttccggcagcccagcagcctgcctgagggcctgcctgcccccctggagaagagggtgaaggagctggcccaggccgcccgggctgctgagggggagagccggcagaagttcttcacccaggacatcaatggcatcctgctggacatcgaggcccagacccgggagctgagcagccaggtgcgcagcggcgtgtatgcctacctggccagcttcctgccctgcagcaaggatgccctgctgaagagggccaggaagctgcacctgtatgagcagggcggccgcctgaaggagcccctgcagaagctgaaggaggccatcggccgggccatgcctgagcagatggccaagtaccaggatgagtgccaggcccacacccaggccaaggtggccaagatgctggaggaggagaaggacaaggagcagagggaccgcatctgcagtgatgaggaggaggatgaggagaagggcggccgccgcatcatgggccccaggaagaagttccagtggaatgatgagatccgggagctgctgtgccaggtggtgaagatcaagctggagagccaggacctggagaggaacaacaaggcccaggcctgggaggactgtgtgaagggcttcctggatgctgaggtgaagcccctgtggcccaagggctggatgcaggcccggaccctcttcaaggagagccggcggggccacggccacctgaccagcatcctggccaagaagaaggtgatggcccccagcaagatcaaggtgaaggagagcagcaccaagccagacaagaaggtgtctgtgcccagcggccagattggaggccccatcgccctgcccagcgaccaccagacaggaggcctgagcatcggggccagcagccgggagctgcccagccaggccagcggcggcctggccaaccccccacctgtgaacctggaggacagcctggatgaagatctcatcagaaatcctgccagctctgtggaggccgtgtccaaggagctggccgccctgaacagcagagctgctggcaacagcgagttcaccctgcctgcccccagcaaggccccagctgagaaggtgggcggcgtgctgtgcacagaggagaagaggaactttgccaagcccagccccagcgcccctcctccagccagcagcctgcagagccccctgaacttcctggccgagcaggccctggccctgggccagagcagccaggagaagaagccagagagcagcggctacaaggagctgagctgccaggcccccctgaacaagggcctgcctgaggtgcaccagagcaaggccaagcaccacagcctgcccaggaccagccacggcccccaggtggccgtgcctgtgcccggcccccaggtgaaggtgttccacgccggcacccagcagcagaagaacttcaccccacccagcccctttgccaacaagctgcagggccccaaggccagccccacccagtgccacaggagcctgctgcagctggtgaagacagctgccaagggccagggcttccaccccagcgccccagccaccagcggcggcctgagcgccagcagcagcagcagccacaagaccccagccagcagcagcagcgccctgagccacccagccaagccccacagcgtgagcagcgctggcagcagctacaagaacaacccctttgccagcagcatcagcaagcatggagtgagcagcggcagcagcagcagcggcggcacccctgtgcagagctctgtgtctggcagcctggtgcccggcatccagcccccatctgtgggccaggccaccagcaggcctgtgcccagcagcgctgggaagaagatgcctgtgtcccagaagctgaccctggtggcccctcctgggggccccaacggggacagcagcggcggcacccagggcgtggccaagctgctgaccagccccagcctgaagcccagcgctgtgtcctctgtgaccagcagcaccagcctgagcaaaggagccagcggcaccgtgctgctggccggcagcagcctgatggccagcccctacaagagcagcagccccaagctgagcggggccatgagcagcaacagcctgggcatcatcacccctgtgcccatccctgtgcacgtgctgtccttctctgctgacagcagcgccaaggccggcgtgtccaaggatgccatcgtgactggacctgcccctggcagcttccaccacggcctgggccacagcgccagccagctgcacggcaagggccctgctgtgcccaggaagctgtag

SEQ ID NO: 175043 - DNA, 3795 bp, synthetic construct
  misc_feature 1..3795: note = Description of Artificial Sequence: Synthetic coding sequence
  source 1..3795: mol_type = other DNA
atgagcctgcagcgggagccccccaggcctgagcccccaccacccttcccccccctgcccctgcagcccccaccaccccgggagagcgccagcagagctgagcagccccccaggcctccccgggagaccgtgcggctggagctggtgctgaaggaccccacagatgagagctgtgtggagttctcctacccagagctgctgctgtgtggggagcagaggaagaagctgatccacacagaggaccccttcaatgatgagcaccaggagcggcaggaggtggagatgctggccaagaagtttgagatgaagtatggaggcaagcccaggaagcacaggaaggaccggctgcaggacctgattgacatcggcttcggctatgatgaaacagaccccttcatcgacaacagcgaggcctatgatgagctggtgcctgccagcctgaccaccaagtatggaggcttctacatcaacacaggcaccctgcagttccggcaggccagtgacacagaagaagatgacatcacagacaaccagaagcacaagccacccaaggtgcccaagatcaaggaggatgacatcgagatgaagaagaggaagaggaaggaggagggggagaaggagaagaagcccaggaagaaggtgcccaagcagctgggcgtggtggccctgaacagccacaagtctgagaagaagaagaagcgctacaaggacagcctgagcctggccgccatgatcaggaagttccagaaggagaaggatgccctgaagaaggagagcaaccccaaggtgcctgtgaccctgagcacccccagcctgaacaagccaccctgtgccgccgccgccctgggcaatgatgtgcctgacctgaacctgagcagcggggaccctgacctgcccatctttgtgtccaccaatgaacatgagctgttccaggaggccgagaatgccctggagatgctggatgactttgattttgaccggctgctggatgctgccagtgatggcagccccctgtctgagagcggcggggagaatggcaccaccacccagcccacctacaccagccaggtgatgcccaaggtggtgcccaccctgcctgagggcctgcctgtgctgctggagaagagaattgaggacctgcgggtggccgccaagctgtttgatgaggagggcaggaagaagttcttcacccaggacatgaacaacatcctgctggacatcgagctgcagctgcaggagctgggccctgtgatccgcagcggcgtgtacagccacctggaggcctttgtgccctgcaacaaggagaccctggtgaagaggctgaagaagctgcacctgaatgtgcaggatgaccggctgcgggagcccctgcagaagctgaagctggccgtgtccaatgtgatgcctgagcagctgttcaagtaccaggaggactgccaggcccggagccaggccaagtgtgccaagctgcagacagatgaggagcgggagaagaatggaagtgaagaagatgatgatgagaagccaggcaagagggtcatcggccccaggaagaagttccactgggatgacaccatccgcaccctgctgtgcaacctggtggagatcaagctgggctgctatgagctggagcccaacaagagccagagcgctgaggactacctgaagagcttcatggagacagaggtgaagcccctgtggcccaagggctggatgcaggccaggatgctgttcaaggagagccgctctgtgcacaaccacctgaccagcgccccagccaagaagaaggtgatcccagcccccaagcccaaggtgaaggaggtgatggtgaagaccctgcccctgcacagcttccccaccatgctgaaggagtgcagccccaagaaggaccagaagacccccaccagcctggtggcctctgtgtctggcccccccaccagcagcagcacagctgccatcgctgctgccagcagcagcagcgccccagcccaggagaccatctgcctggatgacagcctggatgaggacctgtccttccacagccccagcctggacctggtgtctgaggccctggccgtcatcaacaacggcaacaagggcccccctgtgggcagccgcatctccatgcccaccaccaagccccggcccggcctgcgggaggagaagctggccagcatcatgagcaagctgcccctggccacccccaagaagctggacagcacccagaccacccacagcagcagcctgattgctggccacacaggccctgtgcccaagaagccccaggacctggcccacacaggcatcagcagcggcctgattgctggcagcagcatccagaaccccaaggtgtccctggagcccctgcctgcccggctgctgcagcagggcctgcagaggagcagccagatccacaccagcagcagcagccagacccacgtgagcagcagcagccaggcccagattgctgccagcagccacgccctgggcaccagcgaggcccaggatgccagcagcctgacccaggtgaccaaggtgcaccagcacagcgctgtgcagcagaactacgtgagccccctgcaggccaccatcagcaagagccagaccaaccctgtggtgaagctgagcaacaacccccagctgagctgcagcagcagcctcatcaagaccagtgacaagcccctgatgtaccgcctgcccctgagcacccccagccctggaaatggcagccagggcagccaccccctggtgtccaggacagtgcccagcaccaccaccagcagcaactacctggccaaggccatggtgtcccagatcagcacccagggcttcaagagccccttctccatggccgccagccccaagctggccgccagccccaagccagccaccagccccaagcccctgcccagccccaagcccagcgccagccccaagcccagcctgagcgccaagcccagcgtgtccaccaagctgatcagcaagagcaaccccacccccaagcccaccgtgagccccagcagcagcagccccaatgccctggtggcccagggcagccacagcagcaccaacagccctgtgcacaagcagcccagcggcatgaacatcagccggcagagccccaccctgaacctgctgcccagcagcaggaccagcggcctgccccccaccaagaacctgcaggcccccagcaagctgaccaacagcagcagcacaggcaccgtgggcaagaacagcctgtctggaattgccatgaatgtgcctgccagccggggcagcaacctgaacagcagcggggccaacagaaccagcctgagcggcggcactggaagtggcacccagggcgccaccaagcccctgagcaccccccaccggcccagcacagccagcggcagctctgtggtgacagcctctgtgcagagcacagctggggccagcctgctggccaatgccagccccctgaccctgatgaccagccccctgtctgtgaccaaccagaatgtgaccccatttggcatgctgggcggcctggtgcctgtgaccatgcccttccagttccccctggagatctttggatttggaacagacacagctggggtgaccaccaccagcggcagcaccagcgctgccttccaccacagcctgacccagaacctgctgaagggcctgcagcctggaggagcccagcacgccgccaccctgagccacagccccctgcctgcccacctgcagcaggccttccatgatggcggccagagcaagggggacaccaagctgcccaggaagagccagtag

SEQ ID NO: 175044 - DNA, 4044 bp, synthetic construct
  misc_feature 1..4044: note = Description of Artificial Sequence: Synthetic coding sequence
  source 1..4044: mol_type = other DNA
atggccgagcccaggagagtggccttcatcagcctgagccctgtgagaagaagagaggccgagtacccaggccctgagcgggagcctgagtacccccgggagcccccccggctggagccccagccctaccgggagcccgcccgggcagagcccccagccccccgggagcccgcccccaggagtgatgcccagccccccagccgggagaagcccctgccccagcgggaggtgtccagagctgagccccccatgagcctgcagcgggagccccccaggcctgagcccccaccacccttcccccccctgcccctgcagcccccaccaccccgggagagcgccagcagagctgagcagcccccccggcccccccgggagaccgtgcggctggagctggtgctgaaggaccccacagatgagagctgtgtggagttctcctacccagagctgctgctgtgtggggagcagaggaagaagctgatccacacagaggaccccttcaatgatgagcaccaggagcggcaggaggtggagatgctggccaagaagtttgagatgaagtatggaggcaagcccaggaagcacaggaaggaccggctgcaggacctgattgatattggatttggctatgatgaaacagaccccttcatcgacaacagcgaggcctatgatgagctggtgcctgccagcctgaccaccaagtatggaggcttctacatcaacacaggcaccctgcagttccggcaggccagtgacacagaggaggatgacatcacagacaaccagaagcacaagccacccaaggtgcccaagatcaaggaggatgacatcgagatgaagaagaggaagaggaaggaggagggggagaaggagaagaagcccaggaagaaggtgcccaagcagctgggcgtggtggccctgaacagccacaagtctgagaagaagaagaagcgctacaaggacagcctgagcctggccgccatgatcaggaagttccagaaggagaaggatgccctgaagaaggagagcaaccccaaggtgcctgtgaccctgagcacccccagcctgaacaagccaccctgtgccgctgctgccctgggcaatgatgtgcctgacctgaacctgagcagcggggaccctgacctgcccatctttgtgtccaccaatgagcacgagctgttccaggaggctgaaaatgccctggagatgctggatgactttgattttgaccggctgctggatgctgccagtgatggcagccccctgtctgagagcggaggagaaaatggcaccaccacccagcccacctacaccagccaggtgatgcccaaggtggtgcccaccctgcctgagggcctgcctgtgctgctggagaagagaattgaggacctgcgggtggccgccaagctgtttgatgaggagggcaggaagaagttcttcacccaggacatgaacaacatcctgctggacatcgagctgcagctgcaggagctgggccctgtgatccgctctggagtgtacagccacctggaggcctttgtgccctgcaacaaggagaccctggtgaagaggctgaagaagctgcacctgaatgtgcaggatgaccggctgcgggagcccctgcagaagctgaagctggccgtgtccaatgtgatgcctgagcagctgttcaagtaccaggaggactgccaggcccggagccaggccaagtgtgccaagctgcagacagatgaggagcgggagaagaatggcagcgaggaggatgatgatgagaagccaggcaagagggtgattggccccaggaagaagttccactgggatgacaccatccgcaccctgctgtgcaacctggtggagatcaagctgggctgctatgagctggagcccaacaagagccagagcgctgaggactacctgaagagcttcatggagacagaggtgaagcccctgtggcccaagggctggatgcaggccaggatgctgttcaaggagagccgctctgtgcacaaccacctgaccagcgccccagccaagaagaaggtgatcccagcccccaagcccaaggtgaaggaggtgatggtgaagaccctgcccctgcacagcttccccaccatgctgaaggaatgtagccccaagaaggaccagaagacccccaccagcctggtggcctctgtgtctggcccccccaccagcagcagcacagctgccatcgccgccgccagcagcagcagcgccccagcccaggagaccatctgcctggatgacagcctggatgaggacctgtccttccacagccccagcctggacctggtgtctgaggccctggccgtcatcaacaatggaaacaagggcccccctgtgggcagccgcatctccatgcccaccaccaagcccaggcctggcctgcgggaggagaagctggccagcatcatgagcaagctgcccctggccacccccaagaagctggacagcacccagaccacccacagcagcagcctgattgctggccacactggacctgtgcccaagaagccccaggacctggcccacacaggcatcagcagcggcctgattgctggcagcagcatccagaaccccaaggtgtccctggagcccctgcctgcccggctgctgcagcagggcctgcagaggagcagccagatccacaccagcagcagcagccagacccacgtgagcagcagcagccaggcccagattgctgccagcagccacgccctgggcaccagcgaggcccaggatgccagcagcctgacccaggtgaccaaggtgcaccagcacagcgctgtgcagcagaactacgtgagccccctgcaggccaccatcagcaagagccagaccaaccctgtggtgaagctgagcaacaacccccagctgagctgcagcagcagcctcatcaagaccagtgacaagcccctgatgtaccgcctgcccctgagcacccccagccctggaaatggcagccagggcagccaccccctggtgtccaggacagtgcccagcaccaccaccagcagcaactacctggccaaggccatggtgtcccagatcagcacccagggcttcaagagccccttctccatggccgccagccccaagctggccgccagccccaagccagccaccagccccaagcccctgcccagccccaagcccagcgccagccccaagcccagcctgagcgccaagcccagcgtgtccaccaagctgatcagcaagagcaaccccacccccaagcccaccgtgagccccagcagcagcagccccaatgccctggtggcccagggcagccacagcagcaccaacagccctgtgcacaagcagcccagcggcatgaacatcagccggcagagccccaccctgaacctgctgcccagcagcaggaccagcggcctgccccccaccaagaacctgcaggcccccagcaagctgaccaacagcagcagcactggaacagtgggcaagaacagcctgagcggcatcgccatgaatgtgcctgccagccggggcagcaacctgaacagcagcggggccaacagaaccagcctgagcggcggcaccggcagcggcacccagggcgccaccaagcccctgagcaccccccaccggcccagcacagccagcggcagctctgtggtgacagcctctgtgcagagcacagctggggccagcctgctggccaatgccagccccctgaccctgatgaccagccccctgtctgtgaccaaccagaatgtgacccccttcggcatgctgggcggcctggtgcctgtgaccatgcccttccagttccccctggagatcttcggcttcggcacagacacagctggggtgaccaccaccagcggcagcaccagcgctgccttccaccacagcctgacccagaacctgctgaagggcctgcagcccggcggggcccagcacgccgccaccctgagccacagccccctgcctgcccacctgcagcaggccttccatgatggcggccagagcaaaggagacaccaagctgcccaggaagagccagtag

SEQ ID NO: 175045 - DNA, 1686 bp, synthetic construct
  misc_feature 1..1686: note = Description of Artificial Sequence: Synthetic coding sequence
  source 1..1686: mol_type = other DNA
atggccgagagcggggagagcggcggccccccaggcagccaggacagcgctgctggagctgagggcgctggggccccagctgctgctgccagcgctgagcccaagatcatgaaggtgacagtgaagacccccaaggagaaggaggagtttgctgtgcctgagaacagctctgtgcagcagttcaaggaggagatcagcaagcgcttcaagagccacacagaccagctggtgctgatctttgctgggaagatcctgaaggaccaggacaccctgagccagcacggcatccatgatggcctgactgtgcacctggtgatcaagacccagaaccggccccaggaccacagcgcccagcagaccaacacagctggcagcaatgtgaccaccagcagcacccccaacagcaacagcaccagcggcagcgccaccagcaaccccttcggcctgggcggcctgggcggcctggccggcctgagcagcctgggcctgaacaccaccaacttcagcgagctgcagagccagatgcagaggcagctgctgagcaaccctgagatgatggtgcagatcatggagaacccctttgtgcagagcatgctgagcaacccagacctgatgaggcagctgatcatggccaacccccagatgcagcagctgatccagagaaatcctgagatcagccacatgctgaacaacccagacatcatgaggcagaccctggagctggccagaaatcctgccatgatgcaggagatgatgaggaaccaggaccgggccctgagcaacctggagagcatccctgggggctacaatgccctgcggaggatgtacacagacatccaggagcccatgctgtctgctgcccaggagcagtttggaggcaacccctttgccagcctggtgagcaacaccagcagtggagagggcagccagcccagcaggacagaaaatagagaccccctgcccaacccctgggccccccagaccagccagagcagcagcgccagcagcggcacagccagcacagtgggcggcaccaccggcagcacagccagcggcaccagcggccagagcaccacagcccccaacctggtgcctggggtgggcgcctccatgttcaacaccccaggcatgcagagcctgctgcagcagatcacagagaacccccagctgatgcagaacatgctgagcgccccctacatgaggtccatgatgcagagcctgagccagaacccagacctggccgcccagatgcagaacccagacaccctgagcgccatgagcaacccccgggccatgcaggccctgctgcagatccagcagggcctgcagaccctggccacagaggcccctggcctcatccctggcttcaccccaggcctgggcgccctgggcagcactggaggcagcagcggcaccaacggcagcaatgccacccccagcgagaacaccagccccacagctggcaccacagagcccggccaccagcagttcatccagcagatgctgcaggccctggccggcgtgaacccccagctgcagaaccctgaggtgcgcttccagcagcagctggagcagctgagcgccatgggcttcctgaaccgggaggccaacctgcaggccctgattgccaccggcggggacatcaatgctgccatcgagcggctgctgggcagccagcccagctag

SEQ ID NO: 175046 - DNA, 1770 bp, synthetic construct
  misc_feature 1..1770: note = Description of Artificial Sequence: Synthetic coding sequence
  source 1..1770: mol_type = other DNA
atggccgagagcggggagagcggcggccccccaggcagccaggacagcgctgctggagctgagggcgctggggccccagctgctgctgccagcgctgagcccaagatcatgaaggtgacagtgaagacccccaaggagaaggaggagtttgctgtgcctgagaacagctctgtgcagcagttcaaggaggagatcagcaagcgcttcaagagccacacagaccagctggtgctgatctttgctgggaagatcctgaaggaccaggacaccctgagccagcacggcatccatgatggcctgactgtgcacctggtgatcaagacccagaaccggccccaggaccacagcgcccagcagaccaacacagctggcagcaatgtgaccaccagcagcacccccaacagcaacagcaccagcggcagcgccaccagcaaccccttcggcctgggcggcctgggcggcctggccggcctgagcagcctgggcctgaacaccaccaacttcagcgagctgcagagccagatgcagaggcagctgctgagcaaccctgagatgatggtgcagatcatggagaacccctttgtgcagagcatgctgagcaacccagacctgatgaggcagctgatcatggccaacccccagatgcagcagctgatccagagaaatcctgagatcagccacatgctgaacaacccagacatcatgaggcagaccctggagctggccagaaatcctgccatgatgcaggagatgatgaggaaccaggaccgggccctgagcaacctggagagcatccctgggggctacaatgccctgcggaggatgtacacagacatccaggagcccatgctgtctgctgcccaggagcagtttggaggcaacccctttgccagcctggtgagcaacaccagcagtggagagggcagccagcccagcaggacagaaaatagagaccccctgcccaacccctgggccccccagaccagccagagcagcagcgccagcagcggcacagccagcacagtgggcggcaccaccggcagcacagccagcggcaccagcggccagagcaccacagcccccaacctggtgcctggggtgggcgcctccatgttcaacaccccaggcatgcagagcctgctgcagcagatcacagagaacccccagctgatgcagaacatgctgagcgccccctacatgaggtccatgatgcagagcctgagccagaacccagacctggccgcccagatgatgctgaacaaccccctgtttgctggcaacccccagctgcaggagcagatgaggcagcagctgcccaccttcctgcagcagatgcagaacccagacaccctgagcgccatgagcaacccccgggccatgcaggccctgctgcagatccagcagggcctgcagaccctggccacagaggcccctggcctcatccctggcttcaccccaggcctgggcgccctgggcagcactggaggcagcagcggcaccaacggcagcaatgccacccccagcgagaacaccagccccacagctggcaccacagagcccggccaccagcagttcatccagcagatgctgcaggccctggccggcgtgaacccccagctgcagaaccctgaggtgcgcttccagcagcagctggagcagctgagcgccatgggcttcctgaaccgggaggccaacctgcaggccctgattgccaccggcggggacatcaatgctgccatcgagcggctgctgggcagccagcccagctag

SEQ ID NO: 175047 - DNA, 1875 bp, synthetic construct
  misc_feature 1..1875: note = Description of Artificial Sequence: Synthetic coding sequence
  source 1..1875: mol_type = other DNA
atggctgaaaatggagagagcagcggccccccccggcccagccggggccctgctgctgcccagggcagcgctgctgccccagctgagcccaagatcatcaaggtgacagtgaagacccccaaggagaaggaggagtttgctgtgcctgagaacagctctgtgcagcagttcaaggaggccatcagcaagcgcttcaagagccagacagaccagctggtgctgatctttgctgggaagatcctgaaggaccaggacaccctcatccagcacggcatccatgatggcctgactgtgcacctggtgatcaagagccagaaccggccccagggccagagcacccagcccagcaatgctgctggcaccaacaccaccagcgccagcacccccaggagcaacagcacccccatcagcaccaacagcaaccccttcggcctgggcagcctgggcggcctggccggcctgagcagcctgggcctgagcagcaccaacttcagcgagctgcagagccagatgcagcagcagctgatggccagccctgagatgatgatccagatcatggagaacccctttgtgcagagcatgctgagcaacccagacctgatgaggcagctgatcatggccaacccccagatgcagcagctgatccagagaaatcctgagatcagccacctgctgaacaacccagacatcatgaggcagaccctggagatcgccagaaatcctgccatgatgcaggagatgatgaggaaccaggacctggccctgagcaacctggagagcatccctgggggctacaatgccctgcggaggatgtacacagacatccaggagcccatgctgaatgctgcccaggagcagtttggaggcaacccctttgcctctgtgggcagcagcagcagcagtggagagggcacccagcccagcaggacagaaaatagagaccccctgcccaacccctgggcccctcctccagccacccagagcagcgccaccaccagcaccaccaccagcacaggcagcggcagcggcaacagcagcagcaatgccaccggcaacacagtggccgccgccaactacgtggccagcatcttcagcaccccaggcatgcagagcctgctgcagcagatcacagagaacccccagctgatccagaacatgctgagcgccccctacatgaggtccatgatgcagagcctgagccagaacccagacctggccgcccagatgatgctgaacagccccctcttcaccgccaacccccagctgcaggagcagatgaggccccagctgcctgccttcctgcagcagatgcagaacccagacaccctgagcgccatgagcaacccccgggccatgcaggccctgatgcagatccagcagggcctgcagaccctggccacagaggcccctggcctcatccccagcttcaccccaggagtgggcgtgggcgtgctgggcacagccatcggccctgtgggccctgtgacccccatcggccccatcggccccatcgtgcccttcacccccatcggccccatcggccccatcggccccactggacctgctgcccctcctggcagcacaggcagcggcggccccaccggccccaccgtgagcagcgctgcccccagcgagaccaccagccccaccagcgagagcggccccaaccagcagttcatccagcagatggtgcaggccctggccggggccaatgccccccagctgcccaaccctgaggtgcgcttccagcagcagctggagcagctgaatgccatgggcttcctgaaccgggaggccaacctgcaggccctgattgccactggaggagacatcaatgctgccatcgagcggctgctgggcagccagcccagctag

SEQ ID NO: 175048 - DNA, 1467 bp, synthetic construct
  misc_feature 1..1467: note = Description of Artificial Sequence: Synthetic coding sequence
  source 1..1467: mol_type = other DNA
atggctgaaaatggagagagcagcggccccccccggcccagccggggccctgctgctgcccagggcagcgctgctgccccagctgagcccaagatcatcaaggtgacagtgaagacccccaaggagaaggaggagtttgctgtgcctgagaacagctctgtgcagcagttcaaggaggccatcagcaagcgcttcaagagccagacagaccagctggtgctgatctttgctgggaagatcctgaaggaccaggacaccctcatccagcacggcatccatgatggcctgactgtgcacctggtgatcaagagccagaaccggccccagggccagagcacccagcccagcaatgctgctggcaccaacaccaccagcgccagcacccccaggagcaacagcacccccatcagcaccaacagcaaccccttcggcctgggcagcctgggcggcctggccggcctgagcagcctgggcctgagcagcaccaacttcagcgagctgcagagccagatgcagcagcagctgatggccagccctgagatgatgatccagatcatggagaacccctttgtgcagagcatgctgagcaacccagacctgatgaggcagctgatcatggccaacccccagatgcagcagctgatccagagaaatcctgagatcagccacctgctgaacaacccagacatcatgaggcagaccctggagatcgccagaaatcctgccatgatgcaggagatgatgaggaaccaggacctggccctgagcaacctggagagcatccctgggggctacaatgccctgcggaggatgtacacagacatccaggagcccatgctgaatgctgcccaggagcagtttggaggcaacccctttgcctctgtgggcagcagcagcagcagtggagagggcacccagcccagcaggacagaaaatagagaccccctgcccaacccctgggcccctcctccagccacccagagcagcgccaccaccagcaccaccaccagcacaggcagcggcagcggcaacagcagcagcaatgccaccggcaacacagtggccgccgccaactacgtggccagcatcttcagcaccccaggcatgcagagcctgctgcagcagatcacagagaacccccagctgatccagaacatgctgagcgccccctacatgaggtccatgatgcagagcctgagccagaacccagacctggccgcccagatgatgctgaacagccccctcttcaccgccaacccccagctgcaggagcagatgaggccccagctgcctgccttcctgcagcagatgcagaacccagacaccctgagcgccatgagcaaccccaccagcagcagcttcagcaagtggtgccggccctggctggagcagatgctgcacagctgccgcatccagaagagtgacttcagcaacaactggaacagcagcacccagtggggcagctag

SEQ ID NO: 175049 - DNA, 1968 bp, synthetic construct
  misc_feature 1..1968: note = Description of Artificial Sequence: Synthetic coding sequence
  source 1..1968: mol_type = other DNA
atggccaagggcggggaggccctgccccagggcagccctgcccctgtgcaggacccccacctgatcaaggtgacagtgaagacccccaaggacaaggaggacttctctgtgacagacacctgcaccatccagcagctgaaggaggagatcagccagcgcttcaaggcccacccagaccagctggtgctgatctttgctgggaagatcctgaaggaccctgacagcctggcccagtgtggggtgagagatggcctgactgtgcacctggtgatcaagaggcagcaccgggccatgggaaatgaatgtcctgctgcctctgtgcccacccagggccccagccctggcagcctgccccagcccagcagcatctacccagcagatggccccccagccttcagcctgggcctgctgaccggcctgagccggctgggcctggcctaccggggcttcccagaccagcccagcagcctgatgaggcagcacgtgtctgtgcctgagtttgtgacccagctgattgatgaccccttcatccctggcctgctgagcaacacaggcctggtgcggcagctggtgctggacaacccccacatgcagcagctgatccagcacaaccctgagatcggccacatcctgaacaaccctgagatcatgaggcagaccctggagttcctgagaaatcctgccatgatgcaggagatgatccgcagccaggacagagtgctgagcaacctggagagcatccctgggggctacaacgtgctgtgcaccatgtacacagacatcatggaccccatgctgaatgctgtgcaggagcagtttggaggcaacccctttgccacagccaccacagacaatgccaccaccaccaccagccagcccagcaggatggagaactgtgaccccctgcccaacccctggaccagcacccacggcggcagcggcagccggcagggccggcaggatggagaccaggatgccccagacatccggaaccgcttccccaacttcctgggcatcatccggctgtatgactacctgcagcagctgcacgagaacccccagagcctgggcacctacctgcagggcacagccagcgccctgagccagagccaggagcccccacccagcgtgaacagagtgccccccagcagccccagcagccaggagcccggcagcggccagcccctgcctgaggagagcgtggccatcaagggccgcagcagctgcccagccttcctgcgctaccccacagagaacagcacaggccagggcggggaccaggatggagctgggaagagcagcacaggccacagcaccaacctgcctgacctggtgtctggcctgggggacagcgccaacagagtgccctttgcccccctgtccttcagccccacagctgccatccctggcatccctgagcccccctggctgcccagccctgcctaccccaggagcctgcggccagatggcatgaacccagccccccagctgcaggatgagatccagccccagctgcccctgctgatgcacctgcaggccgccatggccaacccccgggccctgcaggccctgcggcagatcgagcagggcctgcaggtgctggccacagaggccccccggctgctgctgtggttcatgccctgcctggccggcaccggctctgtggccggcggcatcgagagccgggaggaccccctgatgtctgaggaccccctgcccaaccccccacctgaggtgtttcctgccctggacagcgctgagctgggcttcctgagcccccccttcctgcacatgctgcaggacctggtgtccaccaacccccagcagctgcagcctgaggcccacttccaggtgcagctggagcagctgcgctccatgggcttcctgaaccgggaggccaacctgcaggccctgattgccactggaggagatgtggatgctgctgtggagaagctgcggcagagctag

SEQ ID NO: 175050 - DNA, 666 bp, synthetic construct
  misc_feature 1..666: note = Description of Artificial Sequence: Synthetic coding sequence
  source 1..666: mol_type = other DNA
atggccaagggcggggaggccctgccccagggcagccctgcccctgtgcaggacccccacctgatcaaggtgacagtgaagacccccaaggacaaggaggacttctctgtgacagacacctgcaccatccagcagctgaaggaggagatcagccagcgcttcaaggcccacccagaccagctggtgctgatctttgctgggaagatcctgaaggaccctgacagcctggcccagtgtggggtgagagatggcctgactgtgcacctggtgatcaagaggcagcaccgggccatgggaaatgaatgtcctgctgcctctgtgcccacccagggccccagccctggcagcctgccccagcccagcagcatctacccagcagatggccccccagccttcagcctgggcctgctgaccggcctgagccggctgggcctggcctaccggggcttcccagaccagcccagcagcctgatgaggcagcacgtgtctgtgcctgagtttgtgacccagctgattgatgaccccttcatccctggcctgctgagcaacacaggcctggtgcggcagctggtgctggacaacccccacatgcagcagctgatccagcacaaccctgagatcggccacatcctgaacaaccctgagatcatgaggcagaccctgtag

SEQ ID NO: 175051 - DNA, 681 bp, synthetic construct
  misc_feature 1..681: note = Description of Artificial Sequence: Synthetic coding sequence
  source 1..681: mol_type = other DNA
atggccgagcccagcggggctgagaccaggcctcccatccgggtgacagtgaagacccccaaggacaaggaggagatcgtcatctgtgaccgggcctctgtgaaggagttcaaggaggagatcagccgccgcttcaaggcccagcaggaccagctggtgctgatctttgctgggaagatcctgaaggatggagacaccctgaaccagcacggcatcaaggatggcctgactgtgcacctggtgatcaagaccccccagaaggcccaggaccctgcccctcctgctgcccccagcctgcctgctgctgatgctgagccccgggtgaccctgcacccctaccagagccccagccatgctggcattgctgctgaccctgctggcaccacagacctggccgaccggggcccctgggccggcacccagccctggctgctgtgggacatcccagaccccagcaccctgagccggcagcagaggagagtgtatgcccggggcccccacttcctgaccagccacgccagccacatcttcagcaacagaggcttccagaggcctgctgccacccacgccgcagatgatcctgccttcggctggaagtggaagctgactggagcagatgcccggtctgagatctctgctgctgctggagctgcccagctgcacggcctgcaccagagctag

SEQ ID NO: 175052 - DNA, 1806 bp, synthetic construct
  misc_feature 1..1806: note = Description of Artificial Sequence: Synthetic coding sequence
  source 1..1806: mol_type = other DNA
atggccgagcccagcggggctgagaccaggcctcccatccgggtgacagtgaagacccccaaggacaaggaggagatcgtcatctgtgaccgggcctctgtgaaggagttcaaggaggagatcagccgccgcttcaaggcccagcaggaccagctggtgctgatctttgctgggaagatcctgaaggatggagacaccctgaaccagcacggcatcaaggatggcctgactgtgcacctggtgatcaagaccccccagaaggcccaggaccctgctgctgccacagccagcagccccagcaccccagaccctgccagcgcccccagcaccaccccagccagccctgccaccccagcccagcccagcaccagcggcagcgccagcagtgatgctggcagcggcagccgccgcagcagcggcggcggccccagccctggagctggggagggcagccccagcgccacagccagcatcctgagcggctttggaggcatcctgggcctgggcagcctgggcctgggcagcgccaacttcatggagctgcagcagcagatgcagaggcagctgatgagcaaccctgagatgctgagccagatcatggagaaccccctggtgcaggacatgatgagcaacccagacctgatgaggcacatgatcatggccaacccccagatgcagcagctgatggagagaaatcctgagatcagccacatgctgaacaaccctgagctgatgaggcagaccatggagctggccagaaatcctgccatgatgcaggagatgatgaggaaccaggaccgggccctgagcaacctggagagcatccctgggggctacaatgccctgcggaggatgtacacagacatccaggagcccatgttttctgctgcccgggagcagtttggaaacaaccccttcagcagcctggccggcaacagcgacagcagcagcagccagcccctgaggacagagaaccgggagcccctgcccaacccctggagccccagcccccccaccagccaggcccctggcagcggcggggagggcaccggcggcagcggcaccagccaggtgcaccccaccgtgagcaaccccttcggcatcaatgctgccagcctgggcagcggcatgttcaacagccctgagatgcaggccctgctgcagcagatcagcgagaacccccagctgatgcagaatgtcatcagcgccccctacatgaggtccatgatgcagaccctggcccagaacccagactttgctgcccagatgatggtgaatgtgcccctgtttgctggcaacccccagctgcaggagcagctgcggctgcagctgcctgtgttcctgcagcagatgcagaaccctgagagcctgagcatcctgaccaacccccgggccatgcaggccctgctgcagatccagcagggcctgcagaccctgcagacagaggcccctggcctggtgcccagcctgggcagctttggcatcagcaggaccccagcccccagcgctggcagcaatgccggcagcaccccagaggcccccaccagcagccctgccaccccagccaccagcagccccactggagccagcagcgcccagcagcagctgatgcagcagatgatccagctgctggccggcagcggcaacagccaggtgcagaccccagaggtgcgcttccagcagcagctggagcagctgaacagcatgggcttcatcaaccgggaggccaacctgcaggccctgattgccaccggcggggacatcaatgctgccatcgagcggctgctgggcagccagctgtcctag

SEQ ID NO: 175053 - DNA, 336 bp, synthetic construct
  misc_feature 1..336: note = Description of Artificial Sequence: Synthetic coding sequence
  source 1..336: mol_type = other DNA
atggccggcaagcaggccgtgtctgccagcggcaagtggctggatggcatcaggaagtggtactacaatgctgctggcttcaacaagctgggcctgatgagagatgacaccatctatgaagatgaagatgtgaaggaggccatccggcggctgcctgaaaatctctacaatgacaggatgttccgcatcaagagggccctggacctgaacctgaagcaccagatcctgcccaaggagcagtggaccaagtatgaggaggagaacttctacctggagccctacctgaaggaggtgatccgggagaggaaggagcgggaggagtgggccaagaagtag

SEQ ID NO: 175054 - DNA, 1443 bp, synthetic construct
  misc_feature 1..1443: note = Description of Artificial Sequence: Synthetic coding sequence
  source 1..1443: mol_type = other DNA
atggccgcctctgtggtgtgcagagctgccacagctggggcccaggtgctgctgcgggcccggcgcagccctgccctgctgcggaccccagccctgcggagcacagccacctttgcccaggccctgcagtttgtgcctgagacccaggtgtccctgctggacaatggcctgcgggtggccagcgagcagagcagccagcccacctgcaccgtgggcgtgtggattgatgtgggcagcagatttgaaacagagaagaacaatggagctggctacttcctggagcacctggccttcaagggcaccaagaacagacctggcagcgccctggagaaggaggtggagagcatgggcgcccacctgaatgcctacagcacccgggagcacacagcctactacatcaaggccctgagcaaggacctgcccaaggctgtggagctgctgggggacatcgtgcagaactgcagcctggaggacagccagatcgagaaggagagagatgtgatcctgcgggagatgcaggagaatgatgcctccatgagagatgtggtgttcaactacctgcacgccacagccttccagggcacccccctggcccaggccgtggagggccccagtgaaaatgtgaggaagctgagcagagctgacctgacagagtacctgagcacccactacaaggcccccaggatggtgctggccgccgccggcggcgtggagcaccagcagctgctggacctggcccagaagcacctgggcggcatcccctggacctatgcagaagatgctgtgcccaccctgaccccctgccgcttcaccggcagcgagatccgccacagagatgatgccctgccctttgcccacgtggccatcgctgtggagggccctggctgggccagcccagacaacgtggccctgcaggtggccaatgccatcatcggccactatgactgcacctacggcggcggcgtgcacctgagcagccccctggccagcggggctgtggccaacaagctgtgccagagcttccagaccttcagcatctgctacgccgagaccggcctgctgggcgcccactttgtgtgtgacaggatgaagattgatgacatgatgtttgtgctgcagggccagtggatgaggctgtgcaccagcgccacagagagcgaggtggcccggggcaagaacatcctgagaaatgccctggtgagccacctggatggcaccacccctgtgtgtgaagatattggccgcagcctgctgacctacggccgccgcatccccctggccgagtgggagagcagaattgctgaggtggatgcctctgtggtgcgggagatctgcagcaagtacatctatgaccagtgcccagctgtggccggctacggccccatcgagcagctgcctgactacaaccgcatccgcagcggcatgttctggctgcgcttctag

SEQ ID NO: 175055 - DNA, 1362 bp, synthetic construct
  misc_feature 1..1362: note = Description of Artificial Sequence: Synthetic coding sequence
  source 1..1362: mol_type = other DNA
atgaagctgctgaccagggctggcagcttcagccgcttctacagcctgaaggtggcccccaaggtgaaggccacagctgccccagctggggccccaccccagccccaggacctggagttcaccaagctgcccaacggcctggtgattgccagcctggagaactacagccctgtgtccagaattggcctcttcatcaaggccggcagccgctatgaggacttcagcaacctgggcaccacccacctgctgcggctgaccagcagcctgaccaccaagggggccagcagcttcaagatcacccggggcattgaagctgtgggcggcaagctgtctgtgacagccacccgggagaacatggcctacacagtggagtgcctgcggggagatgtggacatcctgatggagttcctgctgaatgtgaccacagcccctgagttccgccgctgggaggtggccgacctgcagccccagctgaagattgacaaggctgtggccttccagaacccccagacccacgtgattgagaacctgcatgctgctgcctacagaaatgccctggccaaccccctgtactgcccagactacagaattggcaaggtgaccagcgaggagctgcactactttgtgcagaaccacttcaccagcgccaggatggccctgattggcctgggcgtgagccaccctgtgctgaagcaggtggccgagcagttcctgaacatgaggggcggcctgggcctgagcggggccaaggccaactacagaggaggagagatccgggagcagaatggagacagcctggtgcatgctgcctttgtggccgagagcgctgtggccggcagcgctgaggccaatgccttctctgtgctgcagcacgtgctgggcgccggcccccacgtgaagaggggcagcaacaccaccagccacctgcaccaggccgtggccaaggccacccagcagccctttgatgtgtctgccttcaatgccagctacagcgacagcggcctgtttggcatctacaccatcagccaggccacagctgctggagatgtgatcaaggccgcctacaaccaggtgaagaccatcgcccagggcaacctgagcaacacagatgtgcaggccgccaagaacaagctgaaggccggctacctgatgtctgtggagagcagcgagtgcttcctggaggaggtgggcagccaggccctggtggccggcagctacatgccacccagcacagtgctgcagcagattgacagcgtggccaatgctgacatcatcaatgctgccaagaagtttgtgtctggccagaagtccatggccgccagcggcaacctgggccacaccccatttgtggatgagctgtag

SEQ ID NO: 175056 - DNA, 276 bp, synthetic construct
  misc_feature 1..276: note = Description of Artificial Sequence: Synthetic coding sequence
  source 1..276: mol_type = other DNA
atgggcctggaggatgagcagaagatgctgacagaaagtggggaccctgaggaggaggaggaggaggaggaggagctggtggaccccctgaccaccgtgcgggagcagtgtgagcagctggagaagtgtgtgaaggcccgggagcggctggagctgtgtgatgagcgggtgagcagccgcagccacacagaggaggactgcacagaggagctgtttgacttcctgcacgcccgggaccactgtgtggcccacaagctgttcaacaacctgaagtag

SEQ ID NO: 175057 - DNA, 249 bp, synthetic construct
  misc_feature 1..249: note = Description of Artificial Sequence: Synthetic coding sequence
  source 1..249: mol_type = other DNA
atgggccgggagtttggaaacctgaccaggatgagacatgtgatctcctacagcctgagcccctttgagcagagggcctacccccacgtgttcaccaagggcatccccaacgtgctgcggcgcatccgggagagcttcttccgggtggtgccccagtttgtggtgttctacctgatctacacctggggcacagaggagtttgagaggagcaagaggaagaacccagctgcctatgaaaatgacaagtag

SEQ ID NO: 175058 - DNA, 249 bp, synthetic construct; identical to SEQ ID NO: 175057
  misc_feature 1..249: note = Description of Artificial Sequence: Synthetic coding sequence
  source 1..249: mol_type = other DNA

SEQ ID NO: 175059 - DNA, 249 bp, synthetic construct; identical to SEQ ID NO: 175057
  misc_feature 1..249: note = Description of Artificial Sequence: Synthetic coding sequence
  source 1..249: mol_type = other DNA

SEQ ID NO: 175060 - DNA, 387 bp, synthetic construct
  misc_feature 1..387: note = Description of Artificial Sequence: Synthetic coding sequence
  source 1..387: mol_type = other DNA
atgcagatctttgtgaagaccctgaccgggaagaccatcaccctggaggtggagcccagcgacaccattgaaaatgtgaaggccaagatccaggacaaggagggcatccccccagaccagcagaggctcatctttgctgggaagcagctggaggatggccgcaccctgagtgactacaacatccagaaggagagcaccctgcacctggtgctgcggctgcggggcggcatcatcgagcccagcctgcggcagctggcccagaagtacaactgtgacaagatgatctgcaggaagtgctacgcccggctgcaccccagggctgtgaactgcaggaagaagaagtgtggccacaccaacaacctgcggcccaagaagaaggtgaagtag

SEQ ID NO: 175061 - DNA, 387 bp, synthetic construct; identical to SEQ ID NO: 175060
  misc_feature 1..387: note = Description of Artificial Sequence: Synthetic coding sequence
  source 1..387: mol_type = other DNA

SEQ ID NO: 175062 - DNA, 1872 bp, synthetic construct
  misc_feature 1..1872: note = Description of Artificial Sequence: Synthetic coding sequence
  source 1..1872: mol_type = other DNA
atggctgctggggagacccagctgtatgccaaggtgagcaacaagctgaagagccgcagcagccccagcctgctggagcccctgctggccatgggcttccctgtgcacacagccctgaaggccctggccgccactggaaggaagacagctgaggaggccctggcctggctgcatgaccactgcaatgaccccagcctggatgaccccatcccccaggagtatgccctcttcctgtgccccaccggccccctgctggagaagctgcaggagttctggagggagagcaagaggcagtgtgccaagaacagagcccacgaggtgttcccccacgtgaccctgtgtgacttcttcacctgtgaggaccagaaggtggagtgcctgtatgaggccctgaagagagctggggaccggctgctgggcagcttccccacagctgtgcccctggccctgcacagcagcatctcctacctgggcttctttgtgtctggcagccctgcagatgtgatccgggagtttgccatgacctttgccacagaggccagcctgctggccgactgcagcgtgaagccctgcaccaagcagctgcacctgaccctggcccacaagttctacccccaccaccagaggaccctggagcagctggcccgggccatccccctgggccacagctgccagtggacagctgccctgtacagccgggacatgagatttgtgcactaccagaccctgcgggccctcttccagtacaagccccagaatgtggatgagctgaccctgagccctggggactacatctttgtggaccccacccagcaggatgaggccagcgagggctgggtgattggcatcagccagaggacaggctgccggggcttcctgcctgagaactacacagaccgggccagcgagagtgacacctgggtgaagcacaggatgtacaccttcagcctggccacagacctgaacagcaggaaggatggagaggccagcagccgctgcagcggggagttcctgccccagacagcccggagcctgagcagcctgcaggccctgcaggccaccgtggccaggaagtctgtgctggtggtgagacatggagagcgggtggaccagatctttgggaaggcctggctgcagcagtgcagcaccccagatggcaagtactacagaccagacctgaacttcccctgcagcctgcccaggaggagccggggcatcaaggactttgaaaatgacccccccctgagcagctgtggcatcttccagagcagaattgctggagatgccctgctggacagcggcatccgcatcagctctgtgtttgccagccctgccctgcgctgtgtgcagacagccaagctgatcctggaggagctgaagctggagaagaagatcaagatccgggtggagcccggcatctttgagtggaccaagtgggaggccggcaagaccacccccaccctgatgagcctggaggagctgaaggaggccaacttcaacatcgacacagactacagacctgccttccccctgagcgccctgatgcctgctgagagctaccaggagtacatggaccgctgcacagcctccatggtgcagatcgtgaacacctgcccccaggacaccggggtcatcctgattgtgagccacggcagcaccctggacagctgcacccggcccctgctgggcctgcccccccgggagtgtggggactttgcccagctggtgaggaagatccccagcctgggcatgtgcttctgtgaggagaacaaggaggagggcaagtgggagctggtgaacccccctgtgaagaccctgacccacggggccaatgctgccttcaactggaggaactggatcagcggcaactag

SEQ ID NO: 175063 - DNA, 1986 bp, synthetic construct
  misc_feature 1..1986: note = Description of Artificial Sequence: Synthetic coding sequence
  source 1..1986: mol_type = other DNA
atggctgctggggagacccagctgtatgccaaggtgagcaacaagctgaagagccgcagcagccccagcctgctggagcccctgctggccatgggcttccctgtgcacacagccctgaaggccctggccgccactggaaggaagacagctgaggaggccctggcctggctgcatgaccactgcaatgaccccagcctggatgaccccatcccccaggagtatgccctcttcctgtgccccaccggccccctgctggagaagctgcaggagttctggagggagagcaagaggcagtgtgccaagaacagagcccacgaggtgttcccccacgtgaccctgtgtgacttcttcacctgtgaggaccagaaggtggagtgcctgtatgaggccctgaagagagctggggaccggctgctgggcagcttccccacagctgtgcccctggccctgcacagcagcatctcctacctgggcttctttgtgtctggcagccctgcagatgtgatccgggagtttgccatgacctttgccacagaggccagcctgctggccggcacctctgtgagccgcttctggatcttcagccaggtgcccggccacggccccaacctgcggctgagcaacctgacccgggccagctttgtgagccactacatcctgcagaagtactgcagcgtgaagccctgcaccaagcagctgcacctgaccctggcccacaagttctacccccaccaccagaggaccctggagcagctggcccgggccatccccctgggccacagctgccagtggacagctgccctgtacagccgggacatgagatttgtgcactaccagaccctgcgggccctcttccagtacaagccccagaatgtggatgagctgaccctgagccctggggactacatctttgtggaccccacccagcaggatgaggccagcgagggctgggtgattggcatcagccagaggacaggctgccggggcttcctgcctgagaactacacagaccgggccagcgagagtgacacctgggtgaagcacaggatgtacaccttcagcctggccacagacctgaacagcaggaaggatggagaggccagcagccgctgcagcggggagttcctgccccagacagcccggagcctgagcagcctgcaggccctgcaggccaccgtggccaggaagtctgtgctggtggtgagacatggagagcgggtggaccagatctttgggaaggcctggctgcagcagtgcagcaccccagatggcaagtactacagaccagacctgaacttcccctgcagcctgcccaggaggagccggggcatcaaggactttgaaaatgacccccccctgagcagctgtggcatcttccagagcagaattgctggagatgccctgctggacagcggcatccgcatcagctctgtgtttgccagccctgccctgcgctgtgtgcagacagccaagctgatcctggaggagctgaagctggagaagaagatcaagatccgggtggagcccggcatctttgagtggaccaagtgggaggccggcaagaccacccccaccctgatgagcctggaggagctgaaggaggccaacttcaacatcgacacagactacagacctgccttccccctgagcgccctgatgcctgctgagagctaccaggagtacatggaccgctgcacagcctccatggtgcagatcgtgaacacctgcccccaggacaccggggtcatcctgattgtgagccacggcagcaccctggacagctgcacccggcccctgctgggcctgcccccccgggagtgtggggactttgcccagctggtgaggaagatccccagcctgggcatgtgcttctgtgaggagaacaaggaggagggcaagtgggagctggtgaacccccctgtgaagaccctgacccacggggccaatgctgccttcaactggaggaactggatcagcggcaactag

SEQ ID NO: 175064 - DNA, 369 bp, synthetic construct
  misc_feature 1..369: note = Description of Artificial Sequence: Synthetic coding sequence
  source 1..369: mol_type = other DNA
atggctgctggggagacccagctgtatgccaaggtgagcaacaagctgaagagccgcagcagccccagcctgctggagcccctgctggccatgggcttccctgtgcacacagccctgaaggccctggccgccactggaaggaagacagctgaggaggccctggcctggctgcatgaccactgcaatgaccccagcctggatgaccccatcccccaggagtatgccctcttcctgtgccccaccggccccctgctggagaagctgcaggagttctggagggagagcaagaggcagtgtgccaagaacagagcccacgaggtgttcccccacgtgaccctgtgtgacttcttcaccggccctgctgtgtag

SEQ ID NO: 175065 - DNA, 1581 bp, synthetic construct
  misc_feature 1..1581: note = Description of Artificial Sequence: Synthetic coding sequence
  source 1..1581: mol_type = other DNA
atggctgctggggagacccagctgtatgccaaggtgagcaacaagctgaagagccgcagcagccccagcctgctggagcccctgctggccatgggcttccctgtgcacacagccctgaaggccctggccgccactggaaggaagacagctgaggaggccctggcctggctgcatgaccactgcaatgaccccagcctggatgaccccatcccccaggagtatgccctcttcctgtgccccaccggccccctgctggagaagctgcaggagttctggagggagagcaagaggcagtgtgccaagaacagagcccacgaggtgttcccccacgtgaccctgtgtgacttcttcacctgtgaggaccagaaggtggagtgcctgtatgaggccctgaagagagctggggaccggctgctgggcagcttccccacagctgtgcccctggccctgcacagcagcatctcctacctgggcttctttgtgtctggcagccctgcagatgtgatccgggagtttgccatgacctttgccacagaggccagcctgctggccgactgcagcgtgaagccctgcaccaagcagctgcacctgaccctggcccacaagttctacccccaccaccagaggaccctggagcagctggcccgggccatccccctgggccacagctgccagtggacagctgccctgtacagccgggacatgagatttgtgcactaccagaccctgcgggccctcttccagtacaagccccagaatgtggatgagctgaccctgagccctggggactacatctttgtggaccccacccagcaggatgaggccagcgagggctgggtgattggcatcagccagaggacaggctgccggggcttcctgcctgagaactacacagaccgggccagcgagagtgacacctgggtgaagcacaggatgtacaccttcagcctggccacagacctgaacagcaggaaggatggagaggccagcagccgctgcagcggggagttcctgccccagacagcccggagcctgagcagcctgcaggccctgcaggccaccgtggccaggaagtctgtgctggtggtgagacatggagagcgggtggaccagatctttgggaaggcctggctgcagcagtgcagcaccccagatggcaagtactacagaccagacctgaacttcccctgcagcctgcccaggaggagccggggcatcaaggactttgaaaatgacccccccctgagcagctgtggcatcttccagagcagaattgctggagatgccctgctggacagcggcatccgcatcagctctgtgtttgccagccctgccctgcgctgtgtgcagacagccaagctgatcctggaggagctgaagctggagaagaagatcaagatccgggtggagcccggcatctttgagtggaccaagtgggaggccggcaagaccacccccaccctgatgagcctggaggagctgaaggaggccaacttcaacatcgacacagactaccgcagcctgccctgggcctgtgcctctgtgaagaagatcaagaggaaagaaaatggctcctggtag

SEQ ID NO: 175066 - DNA, 1950 bp, synthetic construct
  misc_feature 1..1950: note = Description of Artificial Sequence: Synthetic coding sequence
  source 1..1950: mol_type = other DNA
atggcccagtatggccaccccagccccctgggcatggccgcccgggaggagctgtacagcaaggtgaccccaagaagaaaccggcagcagaggcctggcaccatcaagcacggcagcgccctggatgtgctgctgtccatgggcttcccccgggcccgggcccagaaggccctggccagcactggaggccgctctgtgcaggccgcctgtgactggctgttcagccacgtgggggaccccttcctggatgaccccctgccccgggagtatgtgctgtacctgcggcccaccggccccctggcccagaagctgagtgacttctggcagcagagcaagcagatctgtgggaagaacaaggcccacaacatcttcccccacatcaccctgtgccagttcttcatgtgtgaggacagcaaggtggatgccctgggggaggccctgcagaccaccgtgagccgctggaagtgcaagttcagcgcccccctgcccctggagctgtacaccagcagcaacttcatcggcctgtttgtgaaggaggacagcgctgaggtgctgaagaagtttgctgctgactttgctgctgaggccgccagcaagacagaggtgcacgtggagccccacaagaagcagctgcacgtgaccctggcctaccacttccaggccagccacctgcccaccctggagaagctggcccagaacattgatgtgaagctgggctgtgactgggtggccaccatcttcagccgggacatccgctttgccaaccacgagaccctgcaggtgatctacccctacaccccccagaatgatgatgagctggagctggtgcctggggacttcatcttcatgagccccatggagcagaccagcaccagcgagggctggatctacggcaccagcctgaccaccggctgcagcggcctgctgcctgagaactacatcaccaaggcagatgaatgttccacctggatcttccacggcagctacagcatcctgaacaccagcagcagcaacagcctgacctttggagatggagtgctggagcggcggccctatgaggaccagggcctgggggagaccacccccctgaccatcatctgccagcccatgcagcccctgcgggtgaacagccagcccggcccccagaagcgctgcctgtttgtgtgcagacatggagagaggatggatgtggtgtttgggaagtactggctgagccagtgctttgatgccaagggccgctacatccgcaccaacctgaacatgccccacagcctgccccagaggtctgggggcttccgggactatgagaaggatgcccccatcaccgtgtttggctgcatgcaggcccggctggtgggggaggccctgctggagagcaacaccatcatcgaccacgtgtactgcagccccagcctgcgctgtgtgcagacagcccacaacatcctgaagggcctgcagcaggagaaccacctgaagatccgggtggagcccggcctgtttgagtggaccaagtgggtggccggcagcaccctgcctgcctggatcccccccagcgagctggccgccgccaacctgtctgtggacaccacctaccggccccacatccccatcagcaagctggtggtgtctgagagctatgacacctacatcagccgctccttccaggtgaccaaggagatcatcagcgagtgcaagagcaaaggaaacaacatcctgattgtggcccacgccagcagcctggaggcctgcacctgccagctgcagggcctgagcccccagaacagcaaggactttgtgcagatggtgaggaagatcccctacctgggcttctgcagctgtgaggagctgggggagaccggcatctggcagctgacagatcctcccatcctgcccctgacccacggccccactggaggcttcaactggagggagaccctgctgcaggagtag

SEQ ID NO: 175067 - DNA, 1509 bp, synthetic construct
  misc_feature 1..1509: note = Description of Artificial Sequence: Synthetic coding sequence
  source 1..1509: mol_type = other DNA
atggccagcaagaagctgggcgctgacttccacggcaccttctcctacctggatgatgtgcccttcaagacaggagacaagttcaagaccccagccaaggtgggcctgcccatcggcttcagcctgcctgactgcctgcaggtggtgcgggaggtgcagtatgacttcagcctggagaagaagaccatcgagtgggccgaggagatcaagaagattgaggaggccgagcgggaggccgagtgcaagattgctgaggccgaggccaaggtgaacagcaagagcggccctgagggggacagcaagatgtccttcagcaagacccacagcacagccaccatgcccccacccatcaaccccatcctggccagcctgcagcacaacagcatcctgacccccaccagggtgagcagcagcgccaccaagcagaaggtgctgagccccccccacatcaaggctgacttcaacctggccgactttgaatgtgaggaggacccctttgacaacctggagctgaagaccattgatgagaaggaggagctgaggaacatcctggtgggcaccaccggccccatcatggcccagctgctggacaacaacctgccccggggcggcagcggctctgtgctgcaggatgaggaggtgctggccagcctggagcgggccaccctggacttcaagcccctgcacaagcccaacggcttcatcaccctgccccagctgggcaactgtgagaagatgagcctgagcagcaaggtgtccctgccccccatcccagctgtgagcaacatcaagagcctgtccttccccaagctggacagtgatgacagcaaccagaagacagccaagctggccagcaccttccacagcaccagctgcctgagaaatggcaccttccagaacagcctgaagcccagcacccagagcagcgccagcgagctgaatggccaccacaccctgggcctgagcgccctgaacctggacagcggcacagagatgcctgccctgaccagcagccagatgcccagcctgtctgtgctgtctgtgtgcacagaggagagcagcccccccaacacaggccccaccgtgaccccacccaacttctctgtgtcccaggtgcccaacatgcccagctgcccccaggcctacagcgagctgcagatgctgagccccagcgagcggcagtgtgtggagaccgtggtgaacatgggctacagctatgaatgtgtgctgcgggccatgaagaagaagggggagaacatcgagcagatcctggactacctgtttgcccacggccagctgtgtgagaagggctttgaccccctgctggtggaggaggccctggagatgcaccagtgcagcgaggagaagatgatggagttcctgcagctgatgagcaagttcaaggagatgggctttgagctgaaggacatcaaggaggtgctgctgctgcacaacaatgaccaggacaatgccctggaggacctgatggcccgggccggggccagctag

SEQ ID NO: 175068 - DNA, 1509 bp, synthetic construct; identical to SEQ ID NO: 175067
  misc_feature 1..1509: note = Description of Artificial Sequence: Synthetic coding sequence
  source 1..1509: mol_type = other DNA

SEQ ID NO: 175069 - DNA, 1326 bp, synthetic construct
  misc_feature 1..1326: note = Description of Artificial Sequence: Synthetic coding sequence
  source 1..1326: mol_type = other DNA
atggccagcaagaagctgggcgctgacttccacggcaccttctcctacctggatgatgtgcccttcaagacaggagacaagttcaagaccccagccaaggtgggcctgcccatcggcttcagcctgcctgactgcctgcaggtggtgcgggaggtgcagtatgacttcagcctggagaagaagaccatcgagtgggccgaggagatcaagaagattgaggaggccgagcgggaggccgagtgcaagattgctgaggccgaggccaaggtgaacagcaagagcggccctgagggggacagcaagatgtccttcagcaagacccacagcacagccaccatgcccccacccatcaaccccatcctggccagcctgcagcacaacagcatcctgacccccaccagggtgagcagcagcgccaccaagcagaaggtgctgagccccccccacatcaaggctgacttcaacctggccgactttgaatgtgaggaggacccctttgacaacctggagctgaagaccattgatgagaaggaggagctgaggaacatcctggtgggcaccaccggccccatcatggcccagctgctggacaacaacctgccccggggcggcagcggctctgtgctgcaggatgaggaggtgctggccagcctggagcgggccaccctggacttcaagcccctgcacaagcccaacggcttcatcaccctgccccagctgggcaactgtgagaagatgagcctgagcagcaaggtgtccctgccccccatcccagctgtgagcaacatcaagagcctgtccttccccaagctggacagtgatgacagcaaccagaagacagccaagctggccagcaccttccacagcaccagctgcctgagaaatggcaccttccagaacagcctgaagcccagcacccagagcagcgccagcgagctgaatggccaccacaccctgggcctgagcgccctgaacctggacagcggcacagagatgcctgccctgaccagcagccagatgcccagcctgtctgtgctgtctgtgtgcacagaggagagcagcccccccaacacaggccccaccatcctggactacctgtttgcccacggccagctgtgtgagaagggctttgaccccctgctggtggaggaggccctggagatgcaccagtgcagcgaggagaagatgatggagttcctgcagctgatgagcaagttcaaggagatgggctttgagctgaaggacatcaaggaggtgctgctgctgcacaacaatgaccaggacaatgccctggaggacctgatggcccgggccggggccagctag

SEQ ID NO: 175070 - DNA, 1509 bp, synthetic construct; identical to SEQ ID NO: 175067
  misc_feature 1..1509: note = Description of Artificial Sequence: Synthetic coding sequence
  source 1..1509: mol_type = other DNA

SEQ ID NO: 175071 - DNA, 1509 bp, synthetic construct; identical to SEQ ID NO: 175067
  misc_feature 1..1509: note = Description of Artificial Sequence: Synthetic coding sequence
  source 1..1509: mol_type = other DNA

SEQ ID NO: 175072 - DNA, 1617 bp, synthetic construct
  misc_feature 1..1617: note = Description of Artificial Sequence: Synthetic coding sequence
  source 1..1617: mol_type = other DNA
atgtctggagctgtgcggggcagaagaagagaggtgggcctgcagcacggcggctgcggcactggaggcggctatggagatggcctggcccggagcggccagagctggcgctggtggaggagcctgagcctgggcgctgtgggcagcagcgctggaacagagcccggccggcctgctggggccagcaccttccggctgctgcggcggcggcagcagaggcacagcggcagcaagtggctgctgcgctcctgggtgcagatcttcatgtatgacttcagcctggagaagaagaccatcgagtgggccgaggagatcaagaagattgaggaggccgagcgggaggccgagtgcaagattgctgaggccgaggccaaggtgaacagcaagagcggccctgagggggacagcaagatgtccttcagcaagacccacagcacagccaccatgcccccacccatcaaccccatcctggccagcctgcagcacaacagcatcctgacccccaccagggtgagcagcagcgccaccaagcagaaggtgctgagccccccccacatcaaggctgacttcaacctggccgactttgaatgtgaggaggacccctttgacaacctggagctgaagaccattgatgagaaggaggagctgaggaacatcctggtgggcaccaccggccccatcatggcccagctgctggacaacaacctgccccggggcggcagcggctctgtgctgcaggatgaggaggtgctggccagcctggagcgggccaccctggacttcaagcccctgcacaagcccaacggcttcatcaccctgccccagctgggcaactgtgagaagatgagcctgagcagcaaggtgtccctgccccccatcccagctgtgagcaacatcaagagcctgtccttccccaagctggacagtgatgacagcaaccagaagacagccaagctggccagcaccttccacagcaccagctgcctgagaaatggcaccttccagaacagcctgaagcccagcacccagagcagcgccagcgagctgaatggccaccacaccctgggcctgagcgccctgaacctggacagcggcacagagatgcctgccctgaccagcagccagatgcccagcctgtctgtgctgtctgtgtgcacagaggagagcagcccccccaacacaggccccaccgtgaccccacccaacttctctgtgtcccaggtgcccaacatgcccagctgcccccaggcctacagcgagctgcagatgctgagccccagcgagcggcagtgtgtggagaccgtggtgaacatgggctacagctatgaatgtgtgctgcgggccatgaagaagaagggggagaacatcgagcagatcctggactacctgtttgcccacggccagctgtgtgagaagggctttgaccccctgctggtggaggaggccctggagatgcaccagtgcagcgaggagaagatgatggagttcctgcagctgatgagcaagttcaaggagatgggctttgagctgaaggacatcaaggaggtgctgctgctgcacaacaatgaccaggacaatgccctggaggacctgatggcccgggccggggccagctag

SEQ ID NO: 175073 - DNA, 1701 bp, synthetic construct
  misc_feature 1..1701: note = Description of Artificial Sequence: Synthetic coding sequence
  source 1..1701: mol_type = other DNA
atgtctggagctgtgcggggcagaagaagagaggtgggcctgcagcacggcggctgcggcactggaggcggctatggagatggcctggcccggagcggccagagctggcgctggtggaggagcctgagcctgggcgctgtgggcagcagcgctggaacagagcccggccggcctgctggggccagcaccttccggctgctgcggcggcggcagcagaggcacagcggcaccttctcctacctggatgatgtgcccttcaagacaggagacaagttcaagaccccagccaaggtgggcctgcccatcggcttcagcctgcctgactgcctgcaggtggtgcgggaggtgcagtatgacttcagcctggagaagaagaccatcgagtgggccgaggagatcaagaagattgaggaggccgagcgggaggccgagtgcaagattgctgaggccgaggccaaggtgaacagcaagagcggccctgagggggacagcaagatgtccttcagcaagacccacagcacagccaccatgcccccacccatcaaccccatcctggccagcctgcagcacaacagcatcctgacccccaccagggtgagcagcagcgccaccaagcagaaggtgctgagccccccccacatcaaggctgacttcaacctggccgactttgaatgtgaggaggacccctttgacaacctggagctgaagaccattgatgagaaggaggagctgaggaacatcctggtgggcaccaccggccccatcatggcccagctgctggacaacaacctgccccggggcggcagcggctctgtgctgcaggatgaggaggtgctggccagcctggagcgggccaccctggacttcaagcccctgcacaagcccaacggcttcatcaccctgccccagctgggcaactgtgagaagatgagcctgagcagcaaggtgtccctgccccccatcccagctgtgagcaacatcaagagcctgtccttccccaagctggacagtgatgacagcaaccagaagacagccaagctggccagcaccttccacagcaccagctgcctgagaaatggcaccttccagaacagcctgaagcccagcacccagagcagcgccagcgagctgaatggccaccacaccctgggcctgagcgccctgaacctggacagcggcacagagatgcctgccctgaccagcagccagatgcccagcctgtctgtgctgtctgtgtgcacagaggagagcagcccccccaacacaggccccaccgtgaccccacccaacttctctgtgtcccaggtgcccaacatgcccagctgcccccaggcctacagcgagctgcagatgctgagccccagcgagcggcagtgtgtggagaccgtggtgaacatgggctacagctatgaatgtgtgctgcgggccatgaagaagaagggggagaacatcgagcagatcctggactacctgtttgcccacggccagctgtgtgagaagggctttgaccccctgctggtggaggaggccctggagatgcaccagtgcagcgaggagaagatgatggagttcctgcagctgatgagcaagttcaaggagatgggctttgagctgaaggacatcaaggaggtgctgctgctgcacaacaatgaccaggacaatgccctggaggacctgatggcccgggccggggccagctag

SEQ ID NO: 175074 - DNA, 690 bp, synthetic construct
  misc_feature 1..690: note = Description of Artificial Sequence: Synthetic coding sequence
  source 1..690: mol_type = other DNA
atgcagatctttgtgaagaccctgaccgggaagaccatcaccctggaggtggagcccagcgacaccattgaaaatgtgaaggccaagatccaggacaaggagggcatccccccagaccagcagaggctcatctttgctgggaagcagctggaggatggccgcaccctgagtgactacaacatccagaaggagagcaccctgcacctggtgctgcggctgcggggcggcatgcagatctttgtgaagaccctgaccgggaagaccatcaccctggaggtggagcccagcgacaccattgaaaatgtgaaggccaagatccaggacaaggagggcatccccccagaccagcagaggctcatctttgctgggaagcagctggaggatggccgcaccctgagtgactacaacatccagaaggagagcaccctgcacctggtgctgcggctgcggggcggcatgcagatctttgtgaagaccctgaccgggaagaccatcaccctggaggtggagcccagcgacaccattgaaaatgtgaaggccaagatccaggacaaggagggcatccccccagaccagcagaggctcatctttgctgggaagcagctggaggatggccgcaccctgagtgactacaacatccagaaggagagcaccctgcacctggtgctgcggctgcggggcggctgctag

SEQ ID NO: 175075 - DNA, 690 bp, synthetic construct; identical to SEQ ID NO: 175074
  misc_feature 1..690: note = Description of Artificial Sequence: Synthetic coding sequence
  source 1..690: mol_type = other DNA

SEQ ID NO: 175076 - DNA, 690 bp, synthetic construct; identical to SEQ ID NO: 175074
  misc_feature 1..690: note = Description of Artificial Sequence: Synthetic coding sequence
  source 1..690: mol_type = other DNA

SEQ ID NO: 175077 - DNA, 462 bp, synthetic construct
  misc_feature 1..462: note = Description of Artificial Sequence: Synthetic coding sequence
  source 1..462: mol_type = other DNA
atgcagatctttgtgaagaccctgaccgggaagaccatcaccctggaggtggagcccagcgacaccattgaaaatgtgaaggccaagatccaggacaaggagggcatccccccagaccagcagaggctcatctttgctgggaagcagctggaggatggccgcaccctgagtgactacaacatccagaaggagagcaccctgcacctggtgctgcggctgcggggcggcatgcagatctttgtgaagaccctgaccgggaagaccatcaccctggaggtggagcccagcgacaccattgaaaatgtgaaggccaagatccaggacaaggagggcatccccccagaccagcagaggctcatctttgctgggaagcagctggaggatggccgcaccctgagtgactacaacatccagaaggagagcaccctgcacctggtgctgcggctgcggggcggctgctag

SEQ ID NO: 175078 - DNA, 2058 bp, synthetic construct
  misc_feature 1..2058: note = Description of Artificial Sequence: Synthetic coding sequence
  source 1..2058: mol_type = other DNA
atgcagatctttgtgaagaccctgaccgggaagaccatcaccctggaggtggagcccagcgacaccattgaaaatgtgaaggccaagatccaggacaaggagggcatccccccagaccagcagaggctcatctttgctgggaagcagctggaggatggccgcaccctgagtgactacaacatccagaaggagagcaccctgcacctggtgctgcggctgcggggcggcatgcagatctttgtgaagaccctgaccgggaagaccatcaccctggaggtggagcccagcgacaccattgaaaatgtgaaggccaagatccaggacaaggagggcatccccccagaccagcagaggctcatctttgctgggaagcagctggaggatggccgcaccctgagtgactacaacatccagaaggagagcaccctgcacctggtgctgcggctgcggggcggcatgcagatctttgtgaagaccctgaccgggaagaccatcaccctggaggtggagcccagcgacaccattgaaaatgtgaaggccaagatccaggacaaggagggcatccccagcgaccagcagaggctcatctttgctgggaagcagctggaggatggccgcaccctgagtgactacaacatccagaaggagagcaccctgcacctggtgctgcggctgcggggcggcatgcagatctttgtgaagaccctgaccgggaagaccatcaccctggaggtggagcccagcgacaccattgaaaatgtgaaggccaagatccaggacaaggagggcatccccccagaccagcagaggctcatctttgctgggaagcagctggaggatggccgcaccctgagtgactacaacatccagaaggagagcaccctgcacctggtgctgcggctgcggggcggcatgcagatctttgtgaagaccctgaccgggaagaccatcaccctggaggtggagcccagcgacaccattgaaaatgtgaaggccaagatccaggacaaggagggcatccccccagaccagcagaggctcatctttgctgggaagcagctggaggatggccgcaccctgagtgactacaacatccagaaggagagcaccctgcacctggtgctgcggctgcggggcggcatgcagatctttgtgaagaccctgaccgggaagaccatcaccctggaggtggagcccagcgacaccattgaaaatgtgaaggccaagatccaggacaaggagggcatccccccagaccagcagaggctcatctttgctgggaagcagctggaggatggccgcaccctgagtgactacaacatccagaaggagagcaccctgcacctggtgctgcggctgcggggcggcatgcagatctttgtgaagaccctgaccgggaagaccatcaccctggaggtggagcccagcgacaccattgaaaatgtgaaggccaagatccaggacaaggagggcatccccccagaccagcagaggctcatctttgctgggaagcagctggaggatggccgcaccctgagtgactacaacatccagaaggagagcaccctgcacctggtgctgcggctgcggggcggcatgcagatctttgtgaagaccctgaccgggaagaccatcaccctggaggtggagcccagcgacaccattgaaaatgtgaaggccaagatccaggacaaggagggcatccccccagaccagcagaggctcatctttgctgggaagcagctggaggatggccgcaccctgagtgactacaacatccagaaggagagcaccctgcacctggtgctgcggctgcggggcggcatgcagatctttgtgaagaccctgaccgggaagaccatcaccctggaggtggagcccagcgacaccattgaaaatgtgaaggccaagatccaggacaaggagggcatccccccagaccagcagaggctcatctttgctgggaagcagctggaggatggccgcaccctgagtgactacaacatccagaaggagagcaccctgcacctggtgctgcggctgcggggcggcgtgtag

SEQ ID NO: 175079 - DNA, 450 bp, synthetic construct
  misc_feature 1..450: note = Description of Artificial Sequence: Synthetic coding sequence
  source 1..450: mol_type = other DNA
atgcagatctttgtgaagaccctgaccgggaagaccatcaccctggaggtggagcccagcgacaccattgaaaatgtgaaggccaagatccaggacaaggagggcatccccccagaccagcagaggctcatctttgctgggaagcagctggaggatggccgcaccctgagtgactacaacatccagaaggagagcaccctgcacctggtgctgcggctgcggggcggcatgcagatctttgtgaagaccctgaccgggaagaccatcaccctggaggtggagcccagcgacaccattgaaaatgtgaaggccaagatccaggacaaggagggcatccccccagaccagcagaggctcatctttgctgggaagcagctggaggatggccgcaccctgagtgactacaacatccagaaggagagcaccctgcacctggtgctgcggctgtag

SEQ ID NO: 175080 - DNA, 372 bp, synthetic construct
  misc_feature 1..372: note = Description of Artificial Sequence: Synthetic coding sequence
  source 1..372: mol_type = other DNA
atgcagatctttgtgaagaccctgaccgggaagaccatcaccctggaggtggagcccagcgacaccattgaaaatgtgaaggccaagatccaggacaaggagggcatccccccagaccagcagaggctcatctttgctgggaagcagctggaggatggccgcaccctgagtgactacaacatccagaaggagagcaccctgcacctggtgctgcggctgcggggcggcatgcagatctttgtgaagaccctgaccgggaagaccatcaccctggaggtggagcccagcgacaccattgaaaatgtgaaggccaagatccaggacaaggagggcatccccccagaccagcagaggctcatctttgctggatag

SEQ ID NO: 175081 - DNA, 2058 bp, synthetic construct; identical to SEQ ID NO: 175078
  misc_feature 1..2058: note = Description of Artificial Sequence: Synthetic coding sequence
  source 1..2058: mol_type = other DNA

SEQ ID NO: 175082 - DNA, 486 bp, synthetic construct
  misc_feature 1..486: note = Description of Artificial Sequence: Synthetic coding sequence
  source 1..486: mol_type = other DNA
atgcagatctttgtgaagaccctgaccgggaagaccatcaccctggaggtggagcccagcgacaccattgaaaatgtgaaggccaagatccaggacaaggagggcatccccccagaccagcagaggctcatctttgctgggaagcagctggaggatggccgcaccctgagtgactacaacatccagaaggagagcaccctgcacctggtgctgcggctgcggggcggcatgcagatctttgtgaagaccctgaccgggaagaccatcaccctggaggtggagcccagcgacaccattgaaaatgtgaaggccaagatccaggacaaggagggcatccccccagaccagcagaggctcatctttgctgggaagcagctggaggatggccgcaccctgagtgactacaacatccagaaggagagcaccctgcacctggtgctgcggctgcggggcggcatgcagatctttgtgaagaccctgacctag

SEQ ID NO: 175083 - DNA, 405 bp, synthetic construct
  misc_feature 1..405: note = Description of Artificial Sequence: Synthetic coding sequence
  source 1..405: mol_type = other DNA
atgcagatctttgtgaagaccctgaccgggaagaccatcaccctggaggtggagcccagcgacaccattgaaaatgtgaaggccaagatccaggacaaggagggcatccccccagaccagcagaggctcatctttgctgggaagcagctggaggatggccgcaccctgagtgactacaacatccagaaggagagcaccctgcacctggtgctgcggctgcggggcggcatgcagatctttgtgaagaccctgaccgggaagaccatcaccctggaggtggagcccagcgacaccattgaaaatgtgaaggccaagatccaggacaaggagggcatccccccagaccagcagaggctcatctttgctgggaagcagctggaggatggccgcaccctgagtgactag

SEQ ID NO: 175084 - DNA, 510 bp, synthetic construct
  misc_feature 1..510: note = Description of Artificial Sequence: Synthetic coding sequence
  source 1..510: mol_type = other DNA
atgcagatctttgtgaagaccctgaccgggaagaccatcaccctggaggtggagcccagcgacaccattgaaaatgtgaaggccaagatccaggacaaggagggcatccccccagaccagcagaggctcatctttgctgggaagcagctggaggatggccgcaccctgagtgactacaacatccagaaggagagcaccctgcacctggtgctgcggctgcggggcggcatgcagatctttgtgaagaccctgaccgggaagaccatcaccctggaggtggagcccagcgacaccattgaaaatgtgaaggccaagatccaggacaaggagggcatccccagcgaccagcagaggctcatctttgctgggaagcagctggaggatggccgcaccctgagtgactacaacatccagaaggagagcaccctgcacctggtgctgcggctgcggggcggcatgcagatctttgtgaagaccctgaccgggaagaccatcaccctggaggtgtag

SEQ ID NO: 175085 - DNA, 468 bp, synthetic construct
  misc_feature 1..468: note = Description of Artificial Sequence: Synthetic coding sequence
  source 1..468: mol_type = other DNA
atgcagatctttgtgaagaccctgaccgggaagaccatcaccctggaggtggagcccagcgacaccattgaaaatgtgaaggccaagatccaggacaaggagggcatccccccagaccagcagaggctcatctttgctgggaagcagctggaggatggccgcaccctgagtgactacaacatccagaaggagagcaccctgcacctggtgctgcggctgcggggcggcatgcagatctttgtgaagaccctgaccgggaagaccatcaccctggaggtggagcccagcgacaccattgaaaatgtgaaggccaagatccaggacaaggagggcatccccccagaccagcagaggctcatctttgctgggaagcagctggaggatggccgcaccctgagtgactacaacatccagaaggagagcaccctgcacctggtgctgcggctgcggggcggcatgcagatctag

SEQ ID NO: 175086 - DNA, 186 bp, synthetic construct
  misc_feature 1..186: note = Description of Artificial Sequence: Synthetic coding sequence
  source 1..186: mol_type = other DNA
atgcagatctttgtgaagaccctgaccgggaagaccatcaccctggaggtggagcccagcgacaccattgaaaatgtgaaggccaagatccaggacaaggagggcatccccccagaccagcagaggctcatctttgctgggaagcagctggaggatggccgcaccctgagtgactacaacatctag

SEQ ID NO: 175087 - DNA, 1830 bp, synthetic construct
  misc_feature 1..1830: note = Description of Artificial Sequence: Synthetic coding sequence
  source 1..1830: mol_type = other DNA
atgcagatctttgtgaagaccctgaccgggaagaccatcaccctggaggtggagcccagcgacaccattgaaaatgtgaaggccaagatccaggacaaggagggcatccccccagaccagcagaggctcatctttgctgggaagcagctggaggatggccgcaccctgagtgactacaacatccagaaggagagcaccctgcacctggtgctgcggctgcggggcggcatgcagatctttgtgaagaccctgaccgggaagaccatcaccctggaggtggagcccagcgacaccattgaaaatgtgaaggccaagatccaggacaaggagggcatccccagcgaccagcagaggctcatctttgctgggaagcagctggaggatggccgcaccctgagtgactacaacatccagaaggagagcaccctgcacctggtgctgcggctgcggggcggcatgcagatctttgtgaagaccctgaccgggaagaccatcaccctggaggtggagcccagcgacaccattgaaaatgtgaaggccaagatccaggacaaggagggcatccccccagaccagcagaggctcatctttgctgggaagcagctggaggatggccgcaccctgagtgactacaacatccagaaggagagcaccctgcacctggtgctgcggctgcggggcggcatgcagatctttgtgaagaccctgaccgggaagaccatcaccctggaggtggagcccagcgacaccattgaaaatgtgaaggccaagatccaggacaaggagggcatccccccagaccagcagaggctcatctttgctgggaagcagctggaggatggccgcaccctgagtgactacaacatccagaaggagagcaccctgcacctggtgctgcggctgcggggcggcatgcagatctttgtgaagaccctgaccgggaagaccatcaccctggaggtggagcccagcgacaccattgaaaatgtgaaggccaagatccaggacaaggagggcatccccccagaccagcagaggctcatctttgctgggaagcagctggaggatggccgcaccctgagtgactacaacatccagaaggagagcaccctgcacctggtgctgcggctgcggggcggcatgcagatctttgtgaagaccctgaccgggaagaccatcaccctggaggtggagcccagcgacaccattgaaaatgtgaaggccaagatccaggacaaggagggcatccccccagaccagcagaggctcatctttgctgggaagcagctggaggatggccgcaccctgagtgactacaacatccagaaggagagcaccctgcacctggtgctgcggctgcggggcggcatgcagatctttgtgaagaccctgaccgggaagaccatcaccctggaggtggagcccagcgacaccattgaaaatgtgaaggccaagatccaggacaaggagggcatccccccagaccagcagaggctcatctttgctgggaagcagctggaggatggccgcaccctgagtgactacaacatccagaaggagagcaccctgcacctggtgctgcggctgcggggcggcatgcagatctttgtgaagaccctgaccgggaagaccatcaccctggaggtggagcccagcgacaccattgaaaatgtgaaggccaagatccaggacaaggagggcatccccccagaccagcagaggctcatctttgctgggaagcagctggaggatggccgcaccctgagtgactacaacatccagaaggagagcaccctgcacctggtgctgcggctgcggggcggcgtgtag

SEQ ID NO: 175088 - DNA, 411 bp, synthetic construct
  misc_feature 1..411: note = Description of Artificial Sequence: Synthetic coding sequence
  source 1..411: mol_type = other DNA
atgcagatctttgtgaagaccctgaccgggaagaccatcaccctggaggtggagcccagcgacaccattgaaaatgtgaaggccaagatccaggacaaggagggcatccccccagaccagcagaggctcatctttgctgggaagcagctggaggatggccgcaccctgagtgactacaacatccagaaggagagcaccctgcacctggtgctgcggctgcggggcggcatgcagatctttgtgaagaccctgaccgggaagaccatcaccctggaggtggagcccagcgacaccattgaaaatgtgaaggccaagatccaggacaaggagggcatccccccagaccagcagaggctcatctttgctgggaagcagctggaggatggccgcaccctgagtgactacaactag

SEQ ID NO: 175089 - DNA, 672 bp, synthetic construct
  misc_feature 1..672: note = Description of Artificial Sequence: Synthetic coding sequence
  source 1..672: mol_type = other DNA
atgcagctgaagcccatggagatcaaccctgagatgctgaacaaggtgctgagccggctgggcgtggccggccagtggaggtttgtggatgtgctgggcctggaggaggagagcctgggctctgtgcctgccccagcctgtgccctgctgctgctcttccccctgacagcccagcacgagaacttcaggaagaagcagatcgaggagctgaagggccaggaggtgagccccaaggtgtacttcatgaagcagaccatcggcaacagctgtggcaccatcggcctcatccatgctgtggccaacaaccaggacaagctgggctttgaagatggctctgtgctgaagcagttcctgtctgaaacagagaagatgagcccagaagatcgggccaagtgctttgagaagaatgaggccatccaggccgcccatgatgctgtggcccaggagggccagtgccgggtggatgacaaggtgaacttccacttcatcctcttcaacaacgtggatggccacctgtatgagctggatggccgcatgcccttccctgtgaaccacggggccagcagcgaggacaccctgctgaaggatgctgccaaggtgtgccgggagttcacagagcgggagcagggcgaggtgcgcttctctgctgtggccctgtgcaaggccgcctag

SEQ ID NO: 175090 - DNA, 642 bp, synthetic construct
  misc_feature 1..642: note = Description of Artificial Sequence: Synthetic coding sequence
  source 1..642: mol_type = other DNA
atgcagctgaagcccatggagatcaaccctgagatgctgaacaaggtgctgagccggctgggcgtggccggccagtggaggtttgtggatgtgctgggcctggaggaggagagcctgggctctgtgcctgccccagcctgtgccctgctgctgctcttccccctgacagcccagcacgagaacttcaggaagaagcagatcgaggagctgaagggccaggaggtgagccccaaggtgtacttcatgaagcagaccatcggcaacagctgtggcaccatcggcctcatccatgctgtggccaacaaccaggacaagctgggctttgaagatggctctgtgctgaagcagttcctgtctgaaacagagaagatgagcccagaagatcgggccaagtgctttgagaagaatgaggccatccaggccgcccatgatgctgtggcccaggagggccagtgccgggtggatgacaaggtgaacttccacttcatcctcttcaacaacgtggatggccacctgtatgagctggatggccgcatgcccttccctgtgaaccacggggccagcagcgaggacaccctgctgaaggatgctgccaaggtgtgccgggagttcacagagcgggagcagggcgaggtgaggtag

SEQ ID NO: 175091 - DNA, 177 bp, synthetic construct
  misc_feature 1..177: note = Description of Artificial Sequence: Synthetic coding sequence
  source 1..177: mol_type = other DNA
atgcagctgaagcccatggagatcaaccctgagatgctgaacaaggtgctgagccggctgggcgtggccggccagtggaggtttgtggatgtgctgggcctggaggaggagagcctgggctctgtgcctgccccagcctgtgccctgctgctgctcttccccctgacagcccagtag

SEQ ID NO: 175092 - DNA, 756 bp, synthetic construct
  misc_feature 1..756: note = Description of Artificial Sequence: Synthetic coding sequence
  source 1..756: mol_type = other DNA
atggtgcccaggcctgtgtgtgctgtgctgctgctcttccccatcacagagaagtatgaggtgttcagaacagaggaggaggagaagatcaagagccagggccaggatgtgaccagctctgtgtacttcatgaagcagaccatcagcaatgcctgtggcaccatcggcctcatccacgccatcgccaacaacaaggacaagatgcactttgagagcggcagcaccctgaagaagttcctggaggagagcgtgtccatgagccctgaggagcgggcccgctacctggagaactatgatgccatccgggtgacccatgagaccagcgcccacgagggccagacagagagcagcagccccagcagcagccagccccacagcagccactgcaggaccaaggccagcagcctgtgccaccacgccagcctgccctgggtgaagagaaatcatgtgggccctgccaaggccaccagccccagcctgcggctgcggcgctggaggcccttcctgcggctgcccagcctgggcctgcacagcgtggcccccagcattgatgagaaggtggacctgcacttcatcgccctggtgcacgtggatggccacctgtatgagctggatggcaggaagcccttccccatcaaccacggggagaccagtgatgagaccctgctggaggatgccatcgaggtgtgcaagaagttcatggagcgggaccctgatgagctgcgcttcaatgccatcgccctgtctgctgcctag

SEQ ID NO: 175093 - DNA, 693 bp, synthetic construct
  misc_feature 1..693: note = Description of Artificial Sequence: Synthetic coding sequence
  source 1..693: mol_type = other DNA
atggagggccagcgctggctgcccctggaggccaaccctgaggtgaccaaccagttcctgaagcagctgggcctgcaccccaactggcagtttgtggatgtgtatggcatggaccctgagctgctgtccatggtgcccaggcctgtgtgtgctgtgctgctgctcttccccatcacagagaagtatgaggtgttcagaacagaggaggaggagaagatcaagagccagggccaggatgtgaccagctctgtgtacttcatgaagcagaccatcagcaatgcctgtggcaccatcggcctcatccacgccatcgccaacaacaaggacaagatgcactttgaaagtggcagcaccctgaagaagttcctggaggagagcgtgtccatgagccctgaggagcgggcccgctacctggagaactatgatgccatccgggtgacccatgagaccagcgcccacgagggccagacagaggcccccagcattgatgagaaggtggacctgcacttcatcgccctggtgcacgtggatggccacctgtatgagctggatggcaggaagcccttccccatcaaccacggggagaccagtgatgagaccctgctggaggatgccatcgaggtgtgcaagaagttcatggagcgggaccctgatgagctgcgcttcaatgccatcgccctgtctgctgcctag

SEQ ID NO: 175094 - DNA, 687 bp, synthetic construct
  misc_feature 1..687: note = Description of Artificial Sequence: Synthetic coding sequence
  source 1..687: mol_type = other DNA
acagaggaggaggagaagatcaagagccagggccaggatgtgaccagctctgtgtacttcatgaagcagaccatcagcaatgcctgtggcaccatcggcctcatccacgccatcgccaacaacaaggacaagatgcactttgaaagtggcagcaccctgaagaagttcctggaggagagcgtgtccatgagccctgaggagcgggcccgctacctggagaactatgatgccatccgggtgacccatgagaccagcgcccacgagggccagacagagagcagcagccccagcagcagccagccccacagcagccactgcaggaccaaggccagcagcctgtgccaccacgccagcctgccctgggtgaagaggaaccacgtgggccctgccaaggccaccagccccagcctgcggctgcggcgctggaggcccttcctgcggctgcccagcctgggcctgcacagcgtggcccccagcattgatgagaaggtggacctgcacttcatcgccctggtgcacgtggatggccacctgtatgagctggatggcaggaagcccttccccatcaaccacggggagaccagtgatgagaccctgctggaggatgccatcgaggtgtgcaagaagttcatggagcgggaccctgatgagctgcgcttcaatgccatcgccctgtctgctgcctag

SEQ ID NO: 175095 - DNA, 981 bp, synthetic construct
  misc_feature 1..981: note = Description of Artificial Sequence: Synthetic coding sequence
  source 1..981: mol_type = other DNA
atgactggaaatgctggggagtggtgcctgatggagagtgaccccggggtcttcacagagctgatcaagggcttcggctgccgcggggcccaggtggaggagatctggagcctggagccagaaaattttgagaagctgaagcctgtgcacggcctcatcttcctgttcaagtggcagcccggggaggagcctgctggctctgtggtgcaggacagccggctggacaccatcttctttgccaagcaggtgatcaacaatgcctgtgccacccaggccatcgtgtctgtgctgctgaactgcacccaccaggatgtgcacctgggggagaccctgtctgagttcaaggagttcagccagagctttgatgctgccatgaagggcctggccctgagcaacagtgatgtgatccggcaggtgcacaacagctttgcccggcagcagatgtttgaatttgacaccaagaccagcgccaaggaggaggatgccttccactttgtgtcctatgtgcctgtgaatggccgcctgtatgagctggatggcctgcgggagggccccatcgacctgggcgcctgcaaccaggatgactggatctctgctgtgcggcctgtgattgagaagaggatccagaagtacagcgagggggagatccgcttcaacctgatggccatcgtgtctgacaggaagatgatctatgagcagaagattgctgagctgcagaggcagctggccgaggagcccatggacacagaccagggcaacagcatgctgagcgccatccagagcgaggtggccaagaaccagatgctgattgaggaggaggtgcagaagctgaagcgctacaagattgagaacatccggaggaagcacaactacctgcccttcatcatggagctgctgaagaccctggccgagcaccagcagctgatccccctggtggagaagtttgagaagcactttgagaagaccctgctgggcaagtag

SEQ ID NO: 175096 - DNA, 951 bp, synthetic construct
  misc_feature 1..951: note = Description of Artificial Sequence: Synthetic coding sequence
  source 1..951: mol_type = other DNA
atgactggaaatgctggggagtggtgcctgatggagagtgaccccggggtcttcacagagctgatcaagggcttcggctgccgcggggcccaggtggaggagatctggagcctggagccagaaaattttgagaagctgaagcctgtgcacggcctcatcttcctgttcaagtggcagcccggggaggagcctgctggctctgtggtgcaggacagccggctggacaccatcttctttgccaagcaggtgatcaacaatgcctgtgccacccaggccatcgtgtctgtgctgctgaactgcacccaccaggatgtgcacctgggggagaccctgtctgagttcaaggagttcagccagagctttgatgctgccatgaagggcctggccctgagcaacagtgatgtgatccggcaggtgcacaacagctttgcccggcagcagatgtttgaatttgacaccaagaccagcgccaaggaggaggatgccttccactttgtgtcctatgtgcctgtgaatggccgcctgtatgagctggatggcctgcgggagggccccatcgacctgggcgcctgcaaccaggatgactggatctctgctgtgcggcctgtgattgagaagaggatccagaagtacagcgagggggagatccgcttcaacctgatggccatcgtgtctgacaggaagatgatctatgagcagaagattgctgagctgcagaggcagctggccgaggagcccatggacacagaccagggcaacagcatgctgagcgccatccagagcgaggtggccaagaaccagatgctgattgaggaggaggtgcagaagctgaagcgctacaagattgagaacatccggaggaagcacaactacctgcccttcatcatggagctgctgaagaccctggccgagcaccagcagctgatccccctggtggagaagggcaagtag

SEQ ID NO: 175097 - DNA, 1107 bp, synthetic construct
  misc_feature 1..1107: note = Description of Artificial Sequence: Synthetic coding sequence
  source 1..1107: mol_type = other DNA
gcccggggcggcagcggccgctgtgtggcccgggccatgactggaaatgctggggagtggtgcctgatggagagtgaccccggggtcttcacagagctgatcaagggcttcggctgccgcggggcccaggtggaggagatctggagcctggagccagaaaattttgagaagctgaagcctgtgcacggcctcatcttcctgttcaagtggcagcccggggaggagcctgctggctctgtggtgcaggacagccggctggacaccatcttctttgccaagcaggtgatcaacaatgcctgtgccacccaggccatcgtgtctgtgctgctgaactgcacccaccaggatgtgcacctgggggagaccctgtctgagttcaaggagttcagccagagctttgatgctgccatgaagggcctggccctgagcaacagtgatgtgatccggcaggtgcacaacagctttgcccggcagcagatgtttgaatttgacaccaagaccagcgccaaggaggaggatgccttccactttgtgtcctatgtgcctgtgaatggccgcctgtatgagctggatggcctgcgggagggccccatcgacctgggcgcctgcaaccaggatgactggatctctgctgtgcggcctgtgattgagaagaggatccagaaggatggcttcagcccctgctgccccggctggagccagaccccagagctgaagcccagcgcctgcctggacctgcccaagtggtacagcgagggggagatccgcttcaacctgatggccatcgtgtctgacaggaagatgatctatgagcagaagattgctgagctgcagaggcagctggccgaggaggagcccatggacacagaccagggcaacagcatgctgagcgccatccagagcgaggtggccaagaaccagatgctgattgaggaggaggtgcagaagctgaagcgctacaagattgagaacatccggaggaagcacaactacctgcccttcatcatggagctgctgaagaccctggccgagcaccagcagctgatccccctggtggagaaggccaaggagaagcagaatgccaagaaggcccaggagaccaagtag

SEQ ID NO: 175098 - DNA, 1068 bp, synthetic construct
  misc_feature 1..1068: note = Description of Artificial Sequence: Synthetic coding sequence
  source 1..1068: mol_type = other DNA
atgactggaaatgctggggagtggtgcctgatggagagtgaccccggggtcttcacagagctgatcaagggcttcggctgccgcggggcccaggtggaggagatctggagcctggagccagaaaattttgagaagctgaagcctgtgcacggcctcatcttcctgttcaagtggcagcccggggaggagcctgctggctctgtggtgcaggacagccggctggacaccatcttctttgccaagcaggtgatcaacaatgcctgtgccacccaggccatcgtgtctgtgctgctgaactgcacccaccaggatgtgcacctgggggagaccctgtctgagttcaaggagttcagccagagctttgatgctgccatgaagggcctggccctgagcaacagtgatgtgatccggcaggtgcacaacagctttgcccggcagcagatgtttgaatttgacaccaagaccagcgccaaggaggaggatgccttccactttgtgtcctatgtgcctgtgaatggccgcctgtatgagctggatggcctgcgggagggccccatcgacctgggcgcctgcaaccaggatgactggatctctgctgtgcggcctgtgattgagaagaggatccagaaggatggcttcagcccctgctgccccggctggagccagaccccagagctgaagcccagcgcctgcctggacctgcccaagtggtacagcgagggggagatccgcttcaacctgatggccatcgtgtctgacaggaagatgatctatgagcagaagattgctgagctgcagaggcagctggccgaggagcccatggacacagaccagggcaacagcatgctgagcgccatccagagcgaggtggccaagaaccagatgctgattgaggaggaggtgcagaagctgaagcgctacaagattgagaacatccggaggaagcacaactacctgcccttcatcatggagctgctgaagaccctggccgagcaccagcagctgatccccctggtggagaaggccaaggagaagcagaatgccaagaaggcccaggagaccaagtag

SEQ ID NO: 175099 - DNA, 579 bp, synthetic construct
  misc_feature 1..579: note = Description of Artificial Sequence: Synthetic coding sequence
  source 1..579: mol_type = other DNA
atgaagggcctggccctgagcaacagtgatgtgatccggcaggtgcacaacagctttgcccggcagcagatgtttgaatttgacaccaagaccagcgccaaggaggaggatgccttccactttgtgtcctatgtgcctgtgaatggccgcctgtatgagctggatggcctgcgggagggccccatcgacctgggcgcctgcaaccaggatgactggatctctgctgtgcggcctgtgattgagaagaggatccagaagtacagcgagggggagatccgcttcaacctgatggccatcgtgtctgacaggaagatgatctatgagcagaagattgctgagctgcagaggcagctggccgaggagcccatggacacagaccagggcaacagcatgctgagcgccatccagagcgaggtggccaagaaccagatgctgattgaggaggaggtgcagaagctgaagcgctacaagattgagaacatccggaggaagcacaactacctgcccttcatcatggagctgctgaagaccctggccgagcaccagcagctgatccccctggtggagaagatcttctag

SEQ ID NO: 175100 - DNA, 987 bp, synthetic construct
  misc_feature 1..987: note = Description of Artificial Sequence: Synthetic coding sequence
  source 1..987: mol_type = other DNA
atgactggaaatgctggggagtggtgcctgatggagagtgaccccggggtcttcacagagctgatcaagggcttcggctgccgcggggcccaggtggaggagatctggagcctggagccagaaaattttgagaagctgaagcctgtgcacggcctcatcttcctgttcaagtggcagcccggggaggagcctgctggctctgtggtgcaggacagccggctggacaccatcttctttgccaagcaggtgatcaacaatgcctgtgccacccaggccatcgtgtctgtgctgctgaactgcacccaccaggatgtgcacctgggggagaccctgtctgagttcaaggagttcagccagagctttgatgctgccatgaagggcctggccctgagcaacagtgatgtgatccggcaggtgcacaacagctttgcccggcagcagatgtttgaatttgacaccaagaccagcgccaaggaggaggatgccttccactttgtgtcctatgtgcctgtgaatggccgcctgtatgagctggatggcctgcgggagggccccatcgacctgggcgcctgcaaccaggatgactggatctctgctgtgcggcctgtgattgagaagaggatccagaagtacagcgagggggagatccgcttcaacctgatggccatcgtgtctgacaggaagatgatctatgagcagaagattgctgagctgcagaggcagctggccgaggagcccatggacacagaccagggcaacagcatgctgagcgccatccagagcgaggtggccaagaaccagatgctgattgaggaggaggtgcagaagctgaagcgctacaagattgagaacatccggaggaagcacaactacctgcccttcatcatggagctgctgaagaccctggccgagcaccagcagctgatccccctggtggagaaggccaaggagaagcagaatgccaagaaggcccaggagaccaagtag

SEQ ID NO: 175101 - DNA, 990 bp, synthetic construct
  misc_feature 1..990: note = Description of Artificial Sequence: Synthetic coding sequence
  source 1..990: mol_type = other DNA
atgactggaaatgctggggagtggtgcctgatggagagtgaccccggggtcttcacagagctgatcaagggcttcggctgccgcggggcccaggtggaggagatctggagcctggagccagaaaattttgagaagctgaagcctgtgcacggcctcatcttcctgttcaagtggcagcccggggaggagcctgctggctctgtggtgcaggacagccggctggacaccatcttctttgccaagcaggtgatcaacaatgcctgtgccacccaggccatcgtgtctgtgctgctgaactgcacccaccaggatgtgcacctgggggagaccctgtctgagttcaaggagttcagccagagctttgatgctgccatgaagggcctggccctgagcaacagtgatgtgatccggcaggtgcacaacagctttgcccggcagcagatgtttgaatttgacaccaagaccagcgccaaggaggaggatgccttccactttgtgtcctatgtgcctgtgaatggccgcctgtatgagctggatggcctgcgggagggccccatcgacctgggcgcctgcaaccaggatgactggatctctgctgtgcggcctgtgattgagaagaggatccagaagtacagcgagggggagatccgcttcaacctgatggccatcgtgtctgacaggaagatgatctatgagcagaagattgctgagctgcagaggcagctggccgaggaggagcccatggacacagaccagggcaacagcatgctgagcgccatccagagcgaggtggccaagaaccagatgctgattgaggaggaggtgcagaagctgaagcgctacaagattgagaacatccggaggaagcacaactacctgcccttcatcatggagctgctgaagaccctggccgagcaccagcagctgatccccctggtggagaaggccaaggagaagcagaatgccaagaaggcccaggagaccaagtag

SEQ ID NO: 175102 - DNA, 954 bp, synthetic construct
  misc_feature 1..954: note = Description of Artificial Sequence: Synthetic coding sequence
  source 1..954: mol_type = other DNA
atggagagtgaccccggggtcttcacagagctgatcaagggcttcggctgccgcggggcccaggtggaggagatctggagcctggagccagaaaattttgagaagctgaagcctgtgcacggcctcatcttcctgttcaagtggcagcccggggaggagcctgctggctctgtggtgcaggacagccggctggacaccatcttctttgccaagcaggtgatcaacaatgcctgtgccacccaggccatcgtgtctgtgctgctgaactgcacccaccaggatgtgcacctgggggagaccctgtctgagttcaaggagttcagccagagctttgatgctgccatgaagggcctggccctgagcaacagtgatgtgatccggcaggtgcacaacagctttgcccggcagcagatgtttgaatttgacaccaagaccagcgccaaggaggaggatgccttccactttgtgtcctatgtgcctgtgaatggccgcctgtatgagctggatggcctgcgggagggccccatcgacctgggcgcctgcaaccaggatgactggatctctgctgtgcggcctgtgattgagaagaggatccagaagtacagcgagggggagatccgcttcaacctgatggccatcgtgtctgacaggaagatgatctatgagcagaagattgctgagctgcagaggcagctggccgaggaggagcccatggacacagaccagggcaacagcatgctgagcgccatccagagcgaggtggccaagaaccagatgctgattgaggaggaggtgcagaagctgaagcgctacaagattgagaacatccggaggaagcacaactacctgcccttcatcatggagctgctgaagaccctggccgagcaccagcagctgatccccctggtggagaagtttgagaagcactttgagaagaccctgctgggcaagtag

SEQ ID NO: 175103 - DNA, 300 bp, synthetic construct
  misc_feature 1..300: note = Description of Artificial Sequence: Synthetic coding sequence
  source 1..300: mol_type = other DNA
tgaaacctgatggccatcgtgtctgacaggaagatgatctatgagcagaagattgctgagctgcagaggcagctggccgaggagcccatggacacagaccagggcaacagcatgctgagcgccatccagagcgaggtggccaagaaccagatgctgattgaggaggaggtgcagaagctgaagcgctacaagattgagaacatccggaggaagcacaactacctgcccttcatcatggagctgctgaagaccctggccgagcaccagcagctgatccccctggtggagaagatcttctag

SEQ ID NO: 175104 - DNA, 498 bp, synthetic construct
  misc_feature 1..498: note = Description of Artificial Sequence: Synthetic coding sequence
  source 1..498: mol_type = other DNA
atggtgcggcccggcctggccaggatgagcctgccccgctgctggttccgctacccaggctggacaggagctgaggccggccggggccgggccatcgtgtcccggcggctgcccagcctgaacccctgggatgctggggagagacatggaggcctggtgcgcatctgtgccagcctgggcccccacaagaggctgcctgctggcctgccccagtgcccccacctgtacctggccgctgaccccctggacccccagaggcggcaggagaagagctgtgccgccctgggcaatgacaagaggcggcagccagatggccagaggcagccccagcagcagcagcagccccactgccggcggggcttccaggccccagccctgcccaaccccctgcgggtgctgcagggcctgggccgggtgtccatgagcctgggctggctggagcggcccccagccctgagcagagctgctggctgccgcggggcccaggtggaggagtag

SEQ ID NO: 175105 - DNA, 657 bp, synthetic construct
  misc_feature 1..657: note = Description of Artificial Sequence: Synthetic coding sequence
  source 1..657: mol_type = other DNA
tgactgtctgagttcaaggagttcagccagagctttgatgctgccatgaagggcctggccctgagcaacagtgatgtgatccggcaggtgcacaacagctttgcccggcagcagatgtttgaatttgacaccaagaccagcgccaaggaggaggatgccttccactttgtgtcctatgtgcctgtgaatggccgcctgtatgagctggatggcctgcgggagggccccatcgacctgggcgcctgcaaccaggatgactggatctctgctgtgcggcctgtgattgagaagaggatccagaagtacagcgagggggagatccgcttcaacctgatggccatcgtgtctgacaggaagatgatctatgagcagaagattgctgagctgcagaggcagctggccgaggaggagcccatggacacagaccagggcaacagcatgctgagcgccatccagagcgaggtggccaagaaccagatgctgattgaggaggaggtgcagaagctgaagcgctacaagattgagaacatccggaggaagcacaactacctgcccttcatcatggagctgctgaagaccctggccgagcaccagcagctgatccccctggtggagaagtttgagaagcactttgagaagaccctgctgggcaagtag

SEQ ID NO: 175106 - DNA, 777 bp, synthetic construct
  misc_feature 1..777: note = Description of Artificial Sequence: Synthetic coding sequence
  source 1..777: mol_type = other DNA
atgagcctgggctggctggagcggcccccagccctgagcagagctgctggctgccgcggggcccaggtggaggagatctggagcctggagcctgagaactttgagaagctgaagcctgtgcacggcctcatcttcctgttcaagtggcagcctggagaggagcccgccggctctgtggtgcaggacagccggctggacaccatcttctttgccaagcaggtgatcaacaatgcctgtgccacccaggccatcgtgtctgtgctgctgaactgcacccaccaggatgtgcacctgggggagaccctgtctgagttcaaggagttcagccagagctttgatgctgccatgaagggcctggccctgagcaacagtgatgtgatccggcaggtgcacaacagctttgcccggcagcagatgtttgaatttgacaccaagaccagcgccaaggaggaggatgccttccactttgtgtcctatgtgcctgtgaatggccgcctgtatgagctggatggcctgcgggagggccccatcgacctgggcgcctgcaaccaggatgactggatctctgctgtgcggcctgtgattgagaagaggatccagaagtacagcgagggggagatccgcttcaacctgatggccatcgtgtctgacaggaagatgatctatgagcagaagattgctgagctgcagaggcagctggccgaggagcccatggacacagaccagggcaacagcatgctgagcgccatccagagcgaggtggccaagaaccagtag

SEQ ID NO: 175107 - DNA, 552 bp, synthetic construct
  misc_feature 1..552: note = Description of Artificial Sequence: Synthetic coding sequence
  source 1..552: mol_type = other DNA
tgacagcagatgtttgaatttgacaccaagaccagcgccaaggaggaggatgccttccactttgtgtcctatgtgcctgtgaatggccgcctgtatgagctggatggcctgcgggagggccccatcgacctgggcgcctgcaaccaggatgactggatctctgctgtgcggcctgtgattgagaagaggatccagaagtacagcgagggggagatccgcttcaacctgatggccatcgtgtctgacaggaagatgatctatgagcagaagattgctgagctgcagaggcagctggccgaggaggagcccatggacacagaccagggcaacagcatgctgagcgccatccagagcgaggtggccaagaaccagatgctgattgaggaggaggtgcagaagctgaagcgctacaagattgagaacatccggaggaagcacaactacctgcccttcatcatggagctgctgaagaccctggccgagcaccagcagctgatccccctggtggagaagtttgagaagcactttgagaagaccctgctgggcaagtag

SEQ ID NO: 175108 - DNA, 348 bp, synthetic construct
  misc_feature 1..348: note = Description of Artificial Sequence: Synthetic coding sequence
  source 1..348: mol_type = other DNA
tgagaaggagagatccgcttcaacctgatggccatcgtgtctgacaggaagatgatctatgagcagaagattgctgagctgcagaggcagctggccgaggagcccatggacacagaccagggcaacagcatgctgagcgccatccagagcgaggtggccaagaaccagatgctgattgaggaggaggtgcagaagctgaagcgctacaagattgagaacatccggaggaagcacaactacctgcccttcatcatggagctgctgaagaccctggccgagcaccagcagctgatccccctggtggagaagtttgagaagcactttgagaagaccctgctgggcaagtag

SEQ ID NO: 175109 - DNA, 582 bp, synthetic construct
  misc_feature 1..582: note = Description of Artificial Sequence: Synthetic coding sequence
  source 1..582: mol_type = other DNA
atgaagggcctggccctgagcaacagtgatgtgatccggcaggtgcacaacagctttgcccggcagcagatgtttgaatttgacaccaagaccagcgccaaggaggaggatgccttccactttgtgtcctatgtgcctgtgaatggccgcctgtatgagctggatggcctgcgggagggccccatcgacctgggcgcctgcaaccaggatgactggatctctgctgtgcggcctgtgattgagaagaggatccagaagtacagcgagggggagatccgcttcaacctgatggccatcgtgtctgacaggaagatgatctatgagcagaagattgctgagctgcagaggcagctggccgaggaggagcccatggacacagaccagggcaacagcatgctgagcgccatccagagcgaggtggccaagaaccagatgctgattgaggaggaggtgcagaagctgaagcgctacaagattgagaacatccggaggaagcacaactacctgcccttcatcatggagctgctgaagaccctggccgagcaccagcagctgatccccctggtggagaagatcttctag

SEQ ID NO: 175110 - DNA, 498 bp, synthetic construct
  misc_feature 1..498: note = Description of Artificial Sequence: Synthetic coding sequence
  source 1..498: mol_type = other DNA
atggccccaaatgccagctgcctgtgtgtgcacgtgcgctctgaggagtgggacctgatgacctttgatgccaacccctatgattctgtgaagaagatcaaggagcacgtgcgcagcaagaccaaggtgcctgtgcaggaccaggtgctgctgctgggcagcaagatcctgaagccccggcgcagcctgagcagctatggcatcgacaaggagaagaccatccacctgaccctgaaggtggtgaagcccagtgatgaggagctgcccctcttcctggtggagagcggagatgaggccaagaggcacctgctgcaggtgagaagaagcagctctgtggcccaggtgaaggccatgattgagaccaagacaggcatcatccctgagacccagatcgtgacctgcaatggcaagaggctggaggatggcaagatgatggctgactatggcatcaggaagggcaacctgctcttcctggcctgctactgcattggaggatag

SEQ ID NO: 175111 - DNA, 498 bp, synthetic construct
  misc_feature 1..498: note = Description of Artificial Sequence: Synthetic coding sequence
  source 1..498: mol_type = other DNA
atggccccaaatgccagctgcctgtgtgtgcacgtgcgctctgaggagtgggacctgatgacctttgatgccaacccctatgattctgtgaagaagatcaaggagcacgtgcgcagcaagaccaaggtgcctgtgcaggaccaggtgctgctgctgggcagcaagatcctgaagccccggcgcagcctgagcagctatggcatcgacaaggagaagaccatccacctgaccctgaaggtggtgaagcccagtgatgaggagctgcccctcttcctggtggagagcggagatgaggccaagaggcacctgctgcaggtgagaagaagcagctctgtggcccaggtgaaggccatgattgagaccaagacaggcatcatccctgagacccagatcgtgacctgcaatggcaagaggctggaggatggcaagatgatggctgactatggcatcaggaagggcaacctgctcttcctggccagctactgcattggaggatag

SEQ ID NO: 175112 - DNA, 498 bp, synthetic construct
  misc_feature 1..498: note = Description of Artificial Sequence: Synthetic coding sequence
  source 1..498: mol_type = other DNA
atggccccaaatgccagctgcctgtgtgtgcacgtgcgctctgaggagtgggacctgatgacctttgatgccaacccctatgattctgtgaagaagatcaaggagcacgtgcgcagcaagaccaaggtgcctgtgcaggaccaggtgctgctgctgggcagcaagatcctgaagccccggcgcagcctgagcagctatggaacagacaaggagaagaccatccacctgaccctgaaggtggtgaagcccagtgatgaggagctgcccctcttcctggtggagagcggagatgaggccaagaggcacctgctgcaggtgagaagaagcagctctgtggcccaggtgaaggccatgattgagaccaagacaggcatcatccctgagacccagatcgtgacctgcaatggcaagaggctggaggatggcaagatgatggctgactatggcatcaggaagggcaacctgctcttcctggccagctactgcattggaggatag

SEQ ID NO: 175113 - DNA, 498 bp, synthetic construct; identical to SEQ ID NO: 175112
  misc_feature 1..498: note = Description of Artificial Sequence: Synthetic coding sequence
  source 1..498: mol_type = other DNA

SEQ ID NO: 175114 - DNA, 498 bp, synthetic construct; identical to SEQ ID NO: 175110
  misc_feature 1..498: note = Description of Artificial Sequence: Synthetic coding sequence
  source 1..498: mol_type = other DNA

SEQ ID NO: 175115 - DNA, 498 bp, synthetic construct; identical to SEQ ID NO: 175112
  misc_feature 1..498: note = Description of Artificial Sequence: Synthetic coding sequence
  source 1..498: mol_type = other DNA

SEQ ID NO: 175116 - DNA, 498 bp, synthetic construct; identical to SEQ ID NO: 175111
  misc_feature 1..498: note = Description of Artificial Sequence: Synthetic coding sequence
  source 1..498: mol_type = other DNA

SEQ ID NO: 175117 - DNA, 705 bp, synthetic construct
  misc_feature 1..705: note = Description of Artificial Sequence: Synthetic coding sequence
  source 1..705: mol_type = other DNA
atgggcggctgtgtgggcgcccagcacgacagcagcggcagcctgaatgaaaattctgagggcaccggggtggccctgggcaggaaccagcccctgaagaaggagaagcccaagtggaagagtgactaccccatgacagatggccagctgcggagcaagagagatgagttctgggacacagccccagcctttgagggcaggaaggagatctgggatgccctgaaggctgctgcccacgcctttgagagcaatgaccacgagctggcccaggccatcattgatggagccaacatcaccctgccccacggggccctgacagaatgttatgatgagctgggcaaccgctaccagctgcctgtgtactgcctggccccacccatcaacatgattgaggagaagagtgacatcgagaccctggacatccctgagcccccacccaacagcggctatgagtgccagctgcggctgcggctgagcacaggcaaggacctgaagctggtggtgcgcagcacagacacagtgttccacatgaagaggcggctgcatgctgctgagggcgtggagcccggcagccagcgctggttcttcagcggccggcccctgacagacaagatgaagtttgaggagctgaagatccccaaggactatgtggtgcaggtgattgtgtcccagcctgtgcagaaccccacccctgtggagaactag

SEQ ID NO: 175118 - DNA, 924 bp, synthetic construct
  misc_feature 1..924: note = Description of Artificial Sequence: Synthetic coding sequence
  source 1..924: mol_type = other DNA
atgttctccttcaacatgtttgaccaccccatccccagggtcttccagaaccgcttcagcacccagtaccgctgcttctctgtgtccatgctggccggccccaatgacagaagtgatgtggagaagggcggcaagatcatcatgcctccttctgccctggaccagctgagccggctgaacatcacctaccccatgctgttcaagctgaccaacaagaacagcgacaggatgacccactgcggcgtgctggagtttgtggctgatgagggcatctgctacctgccccactggatgatgcagaacctgctgctggaggagggcggcctggtgcaggtggagagcgtgaacctgcaggtggccacctacagcaagttccagccccagagcccagacttcctggacatcaccaaccccaaggctgtgctggagaatgccctgaggaactttgcctgcctgaccactggagatgtgattgccatcaactacaatgagaagatctatgagctgcgggtgatggagaccaagccagacaaggctgtgtccatcattgaatgtgacatgaatgtggactttgatgcccccctgggctacaaggagcctgagcggcaggtgcagcacgaggagagcacagaaggagaggccgaccacagcggctacgccggggagctgggcttccgggccttcagcggcagcggcaaccggctggatggcaagaagaagggcgtggagcccagccccagccccatcaagccaggggacatcaagaggggcatccccaactatgagttcaagctgggcaagatcaccttcatccggaacagccggcccctggtgaagaaggtggaggaggatgaggccggcggccgctttgtggccttcagcggggagggccagagcctgaggaagaagggcaggaagccctag

SEQ ID NO: 175119 - DNA, 891 bp, synthetic construct
  misc_feature 1..891: note = Description of Artificial Sequence: Synthetic coding sequence
  source 1..891: mol_type = other DNA
atgttctccttcaacatgtttgaccaccccatccccagggtcttccagaaccgcttcagcacccagtaccgctgcttctctgtgtccatgctggccggccccaatgacagaagtgatgtggagaagggcggcaagagccggctgaacatcacctaccccatgctgttcaagctgaccaacaagaacagcgacaggatgacccactgcggcgtgctggagtttgtggctgatgagggcatctgctacctgccccactggatgatgcagaacctgctgctggaggagggcggcctggtgcaggtggagagcgtgaacctgcaggtggccacctacagcaagttccagccccagagcccagacttcctggacatcaccaaccccaaggctgtgctggagaatgccctgaggaactttgcctgcctgaccactggagatgtgattgccatcaactacaatgagaagatctatgagctgcgggtgatggagaccaagccagacaaggctgtgtccatcattgaatgtgacatgaatgtggactttgatgcccccctgggctacaaggagcctgagcggcaggtgcagcacgaggagagcacagaaggagaggccgaccacagcggctacgccggggagctgggcttccgggccttcagcggcagcggcaaccggctggatggcaagaagaagggcgtggagcccagccccagccccatcaagccaggggacatcaagaggggcatccccaactatgagttcaagctgggcaagatcaccttcatccggaacagccggcccctggtgaagaaggtggaggaggatgaagctgggggccgctttgtggccttctctggagagggccagagcctgaggaagaagggcaggaagccctag

SEQ ID NO: 175120 - DNA, 1032 bp, synthetic construct
  misc_feature 1..1032: note = Description of Artificial Sequence: Synthetic coding sequence
  source 1..1032: mol_type = other DNA
atgttctccttcaacatgtttgaccaccccatccccagggtcttccagaaccgcttcagcacccagtaccgctgcttctctgtgtccatgctggccggccccaatgacagaagtgatgtggagaagggcggcaagatcatcatgcctccttctgccctggaccagctgagccggctgaacatcacctaccccatgctgttcaagctgaccaacaagaacagcgacaggatgacccactgcggcgtgctggagtttgtggctgatgagggcatctgctacctgccccactgggtggtgtaccgcctgagcctggagagagatggcctgaagagcctggaggtggccgaggtgtctggcagtgactacttccccagccccttctgtggcctggaggtgtggatgatgcagaacctgctgctggaggagggcggcctggtgcaggtggagagcgtgaacctgcaggtggccacctacagcaagttccagccccagagcccagacttcctggacatcaccaaccccaaggctgtgctggagaatgccctgaggaactttgcctgcctgaccactggagatgtgattgccatcaactacaatgagaagatctatgagctgcgggtgatggagaccaagccagacaaggctgtgtccatcattgaatgtgacatgaatgtggactttgatgcccccctgggctacaaggagcctgagcggcaggtgcagcacgaggagagcacagaaggagaggccgaccacagcggctacgccggggagctgggcttccgggccttcagcggcagcggcaaccggctggatggcaagaagaagggcgtggagcccagccccagccccatcaagccaggggacatcaagaggggcatccccaactatgagttcaagctgggcaagatcaccttcatccggaacagccggcccctggtgaagaaggtggaggaggatgaggccggcggccgctttgtggccttcagcggggagggccagagcctgaggaagaagggcaggaagccctag

SEQ ID NO: 175121 - DNA, 801 bp, synthetic construct
  misc_feature 1..801: note = Description of Artificial Sequence: Synthetic coding sequence
  source 1..801: mol_type = other DNA
atgttctccttcaacatgtttgaccaccccatccccagggtcttccagaaccgcttcagcacccagtaccgctgcttctctgtgtccatgctggccggccccaatgacagaagtgatgtggagaagggcggcaagatcatcatgcctccttctgccctggaccagctgagccggctgaacatcacctaccccatgctgttcaagctgaccaacaagaacagcgacaggatgacccactgcggcgtgctggagtttgtggctgatgagggcatctgctacctgccccactggatgatgcagaacctgctgctggaggagggcggcctggtgcaggtggagagcgtgaacctgcaggtggccacctacagcaagttccagccccagagcccagacttcctggacatcaccaaccccaaggctgtgctggagaatgccctgaggaactttgcctgcctgaccactggagatgtgattgccatcaactacaatgagaagatctatgagctgcgggtgatggagaccaagccagacaaggctgtgtccatcattgaatgtgacatgaatgtggactttgatgcccccctgggctacaaggagcctgagcggcaggtgcagcacgaggagagcacagaaggagaggccgaccacagcggctacgccggggagctgggcttccgggccttcagcggcagcggcaaccggctggatggcaagaagaagggcgtggagcccagccccagccccatcaagccaggggacatcaagaggggcatccccaactatgagttcaagctgggctag

SEQ ID NO: 175122 - DNA, 1053 bp, synthetic construct
  misc_feature 1..1053: note = Description of Artificial Sequence: Synthetic coding sequence
  source 1..1053: mol_type = other DNA
atgctgcccctgcctgacctggacctgtggcccctggaccggctgcccagccccatcaagaggaagccccagaccctgggcagcctgaagagcagccagggcatcgtggaggagaccagcgaggagggcaacagcgtgcctgccagccagagcgtggccgccctgaccagcaagaggagcctggtgctgatgcctgagagcagcgctgaggagatcaccgtgtgcccagagacccagctgagcagcagcgagacctttgacctggagcgggaggtgtccccaggcagccgggacatcctggatggagtgcgcatcatcatggctgacaaggaggtgggcaacaaggaggatgctgagaaggaggtggccatcagcaccttcagcagcagcaaccaggtgtcctgccccctgtgtgaccagtgcttcccccccaccaagattgaaagacatgccatgtactgcaatggcctgatggaggaggacacagaggtgctgacccggcggcagaaggaggccaagaccaagagtgacagcggcacagctgcccagaccagcctggacatcgacaagaatgagaagtgctacctgtgcaagagcctggtgcccttccgggagtaccagtgccacgtggacagctgcctgcagctggccaaggctgaccagggagatggccctgagggcagcggccgggcctgcagcacagtggagggcaagtggcagcagaggctgaagaaccccaaggagaagggccacagcgagggccgcctgctgtccttcctggagcagagcgagcacaagaccagtgatgctgacatcaagagcagcgagactggagccttccgggtgcccagccctggcatggaggaggccggctgcagccgggagatgcagagcagcttcacccggcgggacctgaatgaaagccctgtgaagagctttgtgtccatcagcgaggccacagactgcctggtggacttcaagaagcaggtgacagtgcagcccggcagcaggaccaggaccaaggccggccggggcagaagaaggaagttctag

SEQ ID NO: 175123 - DNA, 2163 bp, synthetic construct
  misc_feature 1..2163: note = Description of Artificial Sequence: Synthetic coding sequence
  source 1..2163: mol_type = other DNA
atgcccaggaggaagaagaaggtgaaggaggtgtctgagagcaggaacctggagaagaaggatgtggagaccaccagctctgtgtctgtgaagaggaagaggcggctggaggatgccttcatcgtcatcagtgacagtgatggagaggagcccaaggaggagaatggcctgcagaagaccaagaccaagcagagcaacagagccaagtgcctggccaagaggaagatcgcccagatgacagaggaggagcagtttgccctggccctgaagatgtctgagcaggaggcccgggaggtgaacagccaggaggaggaggaggaggagctgctgaggaaggccatcgccgagagcctgaacagctgccggcccagtgatgccagcgccaccaggagccggcccctggccaccggccccagcagccagagccaccaggagaagaccacagacagcggcctgacagagggcatctggcagctggtgccccccagcctcttcaagggcagccacatcagccagggcaatgaggccgaggagcgggaggagccctgggaccacacagagaagacagaggaggagcctgtgtctggcagcagcggctcctgggaccagagcagccagcctgtgtttgaaaatgtgaatgtgaagagctttgaccgctgcaccggccacagcgctgagcacacccagtgtgggaagccccaggagagcacaggccggggcagcgccttcctgaaggctgtgcagggcagcggggacaccagccgccactgcctgcccaccctggctgatgccaagggcctgcaggacaccggcggcaccgtgaactacttctggggcatccccttctgcccagatggagtggaccccaaccagtacaccaaggtgatcctgtgccagctggaggtgtaccagaagagcctgaagatggcccagaggcagctgctgaacaagaagggctttggagagcctgtgctgccccggccccccagcctcatccagaatgaatgtggccagggcgagcaggccagcgagaagaatgaatgcatcagcgaggacatgggagatgaggacaaggaggagcggcaggagagccgggccagtgactggcacagcaagaccaaggacttccaggagagcagcatcaagagcctgaaggagaagctgctgctggaggaggagcccaccaccagccacggccagagcagccagggcatcgtggaggagaccagcgaggagggcaacagcgtgcctgccagccagagcgtggccgccctgaccagcaagaggagcctggtgctgatgcctgagagcagcgctgaggagatcaccgtgtgcccagagacccagctgagcagcagcgagacctttgacctggagcgggaggtgtccccaggcagccgggacatcctggatggagtgcgcatcatcatggctgacaaggaggtgggcaacaaggaggatgctgagaaggaggtggccatcagcaccttcagcagcagcaaccaggtgtcctgccccctgtgtgaccagtgcttcccccccaccaagattgaaagacatgccatgtactgcaatggcctgatggaggaggacacagaggtgctgacccggcggcagaaggaggccaagaccaagagtgacagcggcacagctgcccagaccagcctggacatcgacaagaatgagaagtgctacctgtgcaagagcctggtgcccttccgggagtaccagtgccacgtggacagctgcctgcagctggccaaggctgaccagggagatggccctgagggcagcggccgggcctgcagcacagtggagggcaagtggcagcagaggctgaagaaccccaaggagaagggccacagcgagggccgcctgctgtccttcctggagcagagcgagcacaagaccagtgatgctgacatcaagagcagcgagactggagccttccgggtgcccagccctggcatggaggaggccggctgcagccgggagatgcagagcagcttcacccggcgggacctgaatgaaagccctgtgaagagctttgtgtccatcagcgaggccacagactgcctggtggacttcaagaagcaggtgacagtgcagcccggcagcaggaccaggaccaaggccggccggggcagaagaaggaagttctag

SEQ ID NO: 175124 - DNA, 1929 bp, synthetic construct
  misc_feature 1..1929: note = Description of Artificial Sequence: Synthetic coding sequence
  source 1..1929: mol_type = other DNA
atgacagaggaggagcagtttgccctggccctgaagatgtctgagcaggaggcccgggaggtgaacagccaggaggaggaggaggaggagctgctgaggaaggccatcgccgagagcctgaacagctgccggcccagtgatgccagcgccaccaggagccggcccctggccaccggccccagcagccagagccaccaggagaagaccacagacagcggcctgacagagggcatctggcagctggtgccccccagcctcttcaagggcagccacatcagccagggcaatgaggccgaggagcgggaggagccctgggaccacacagagaagacagaggaggagcctgtgtctggcagcagcggctcctgggaccagagcagccagcctgtgtttgaaaatgtgaatgtgaagagctttgaccgctgcaccggccacagcgctgagcacacccagtgtgggaagccccaggagagcacaggccggggcagcgccttcctgaaggctgtgcagggcagcggggacaccagccgccactgcctgcccaccctggctgatgccaagggcctgcaggacaccggcggcaccgtgaactacttctggggcatccccttctgcccagatggagtggaccccaaccagtacaccaaggtgatcctgtgccagctggaggtgtaccagaagagcctgaagatggcccagaggcagctgctgaacaagaagggctttggagagcctgtgctgccccggccccccagcctcatccagaatgaatgtggccagggcgagcaggccagcgagaagaatgaatgcatcagcgaggacatgggagatgaggacaaggaggagcggcaggagagccgggccagtgactggcacagcaagaccaaggacttccaggagagcagcatcaagagcctgaaggagaagctgctgctggaggaggagcccaccaccagccacggccagagcagccagggcatcgtggaggagaccagcgaggagggcaacagcgtgcctgccagccagagcgtggccgccctgaccagcaagaggagcctggtgctgatgcctgagagcagcgctgaggagatcaccgtgtgcccagagacccagctgagcagcagcgagacctttgacctggagcgggaggtgtccccaggcagccgggacatcctggatggagtgcgcatcatcatggctgacaaggaggtgggcaacaaggaggatgctgagaaggaggtggccatcagcaccttcagcagcagcaaccaggtgtcctgccccctgtgtgaccagtgcttcccccccaccaagattgaaagacatgccatgtactgcaatggcctgatggaggaggacacagaggtgctgacccggcggcagaaggaggccaagaccaagagtgacagcggcacagctgcccagaccagcctggacatcgacaagaatgagaagtgctacctgtgcaagagcctggtgcccttccgggagtaccagtgccacgtggacagctgcctgcagctggccaaggctgaccagggagatggccctgagggcagcggccgggcctgcagcacagtggagggcaagtggcagcagaggctgaagaaccccaaggagaagggccacagcgagggccgcctgctgtccttcctggagcagagcgagcacaagaccagtgatgctgacatcaagagcagcgagactggagccttccgggtgcccagccctggcatggaggaggccggctgcagccgggagatgcagagcagcttcacccggcgggacctgaatgaaagccctgtgaagagctttgtgtccatcagcgaggccacagactgcctggtggacttcaagaagcaggtgacagtgcagcccggcagcaggaccaggaccaaggccggccggggcagaagaaggaagttctag

SEQ ID NO: 175125 - DNA, 2160 bp, synthetic construct
  misc_feature 1..2160: note = Description of Artificial Sequence: Synthetic coding sequence
  source 1..2160: mol_type = other DNA
atgcccaggaggaagaagaaggtgaaggaggtgtctgagagcaggaacctggagaagaaggatgtggagaccaccagctctgtgtctgtgaagaggaagaggcggctggaggatgccttcatcgtcatcagtgacagtgatggagaggagcccaaggaggagaatggcctgcagaagaccaagaccaagcagagcaacagagccaagtgcctggccaagaggaagatcgcccagatgacagaggaggagcagtttgccctggccctgaagatgtctgagcaggaggcccgggaggtgaacagccaggaggaggaggaggaggagctgctgaggaaggccatcgccgagagcctgaacagctgccggcccagtgatgccagcgccaccaggagccggcccctggccaccggccccagcagccagagccaccaggagaagaccacagacagcggcctgacagagggcatctggcagctggtgccccccagcctcttcaagggcagccacatcagccagggcaatgaggccgaggagcgggaggagccctgggaccacacagagaagacagaggaggagcctgtgtctggcagcagcggctcctgggaccagagcagccagcctgtgtttgaaaatgtgaatgtgaagagctttgaccgctgcaccggccacagcgctgagcacacccagtgtgggaagccccaggagagcacaggccggggcagcgccttcctgaaggctgtgcagggcagcggggacaccagccgccactgcctgcccaccctggctgatgccaagggcctgcaggacaccggcggcaccgtgaactacttctggggcatccccttctgcccagatggagtggaccccaaccagtacaccaaggtgatcctgtgccagctggaggtgtaccagaagagcctgaagatggcccagaggcagctgctgaacaagaagggctttggagagcctgtgctgccccggccccccagcctcatccagaatgaatgtggccagggcgagcaggccagcgagaagaatgaatgcatcagcgaggacatgggagatgaggacaaggaggagcggcaggagagccgggccagtgactggcacagcaagaccaaggacttccaggagagcagcatcaagagcctgaaggagaagctgctgctggaggaggagcccaccaccagccacggccagagcagccagggcatcgtggaggagaccagcgaggagggcaacagcgtgcctgccagccagagcgtggccgccctgaccagcaagaggagcctggtgctgatgcctgagagcagcgctgaggagatcaccgtgtgcccagagacccagctgagcagcagcgagacctttgacctggagcgggaggtgtccccaggcagccgggacatcctggatggagtgcgcatcatcatggctgacaaggaggtgggcaacaaggaggatgctgagaaggaggtggccatcagcaccttcagcagcagcaaccaggtgtcctgccccctgtgtgaccagtgcttcccccccaccaagattgaaagacatgccatgtactgcaatggcctgatggaggaggacacagtgctgacccggcggcagaaggaggccaagaccaagagtgacagcggcacagctgcccagaccagcctggacatcgacaagaatgagaagtgctacctgtgcaagagcctggtgcccttccgggagtaccagtgccacgtggacagctgcctgcagctggccaaggctgaccagggagatggccctgagggcagcggccgggcctgcagcacagtggagggcaagtggcagcagaggctgaagaaccccaaggagaagggccacagcgagggccgcctgctgtccttcctggagcagagcgagcacaagaccagtgatgctgacatcaagagcagcgagaccggggccttccgggtgcccagccctggcatggaggaggccggctgcagccgggagatgcagagcagcttcacccggcgggacctgaatgaaagccctgtgaagagctttgtgtccatcagcgaggccacagactgcctggtggacttcaagaagcaggtgacagtgcagcccggcagcaggaccaggaccaaggccggccggggcagaagaaggaagttctag

SEQ ID NO: 175126 - DNA, 96 bp, synthetic construct
  misc_feature 1..96: note = Description of Artificial Sequence: Synthetic coding sequence
  source 1..96: mol_type = other DNA
atgcccaggaggaagaagaaggtgaaggaggtgtctgagagcaggaacctggagaagaaggatgtggagaccaccagctctgtgtctgtgaagtag

SEQ ID NO: 175127 - DNA, 270 bp, synthetic construct
  misc_feature 1..270: note = Description of Artificial Sequence: Synthetic coding sequence
  source 1..270: mol_type = other DNA
atgcccaggaggaagaagaaggtgaaggaggtgtctgagagcaggaacctggagaagaaggatgtggagaccaccagctctgtgtctgtgaagaggaagaggcggctggaggatgccttcatcgtcatcagtgacagtgatggagaggagcccaaggaggagaatggcctgcagaagaccaagaccaagcagagcaacagagccaagtgcctggccaagaggaagatcgcccagatgacagaggaggagcagtttgccctggccctgtag

SEQ ID NO: 175128 - DNA, 474 bp, synthetic construct
  misc_feature 1..474: note = Description of Artificial Sequence: Synthetic coding sequence
  source 1..474: mol_type = other DNA
atgcccaggaggaagaagaaggtgaaggaggtgtctgagagcaggaacctggagaagaaggatgtggagaccaccagctctgtgtctgtgaagaggaagaggcggctggaggatgccttcatcgtcatcagtgacagtgatggagaggagcccaaggaggagaatggcctgcagaagaccaagaccaagcagagcaacagagccaagtgcctggccaagaggaagatcgcccagatgacagaggaggagcagtttgccctggccctgaagatgtctgagcaggaggcccgggaggtgaacagccaggaggaggaggaggaggagctgctgaggaaggccatcgccgagagcctgaacagctgccggcccagtgatgccagcgccaccaggagccggcccctggccaccggccccagcagccagagccaccaggagaagaccacagacagcggcctgacagagggcatctggtag

SEQ ID NO: 175129 - DNA, 2160 bp, synthetic construct; identical to SEQ ID NO: 175125
  misc_feature 1..2160: note = Description of Artificial Sequence: Synthetic coding sequence
  source 1..2160: mol_type = other DNA

SEQ ID NO: 175130 - DNA, 5250 bp, synthetic construct
  misc_feature 1..5250: note = Description of Artificial Sequence: Synthetic coding sequence
  source 1..5250: mol_type = other DNA
atggctgatgaggaggccggcggcacagagaggatggagatctctgctgagctgccccagaccccccagaggctggcctcctggtgggaccagcaggtggacttctacacagccttcctgcaccacctggcccagctggtgcctgagatctactttgctgagatggaccctgacctggagaagcaggaggagagcgtgcagatgagcatcttcacccccctggagtggtacctgtttggagaagatcctgacatctgcctggagaagctgaagcacagcggggccttccagctgtgtggccgggtcttcaagtctggagagaccacctacagctgccgggactgtgccatcgaccccacctgtgtgctgtgcatggactgcttccaggacagcgtgcacaagaaccaccgctacaagatgcacaccagcactggaggcggcttctgtgactgtggggacacagaggcctggaagacaggccccttctgtgtgaaccacgagcccggccgggccggcaccatcaaggagaacagccgctgccccctgaatgaggaggtgattgtgcaggccaggaagatcttccccagcgtcatcaagtatgtggtggagatgaccatctgggaggaggagaaggagctgcccccagagctgcagatccgggagaagaatgaaagatactactgtgtgctcttcaatgatgagcaccacagctatgaccacgtgatctacagcctgcagagggccctggactgtgagctggccgaggcccagctgcacaccacagccatcgacaaggagggccggcgggctgtgaaggccggggcctatgctgcctgccaggaggccaaggaggacatcaagagccacagtgaaaatgtgtcccagcaccccctgcacgtggaggtgctgcacagcgagatcatggcccaccagaagtttgccctgcggctgggctcctggatgaacaagatcatgagctacagcagtgacttccggcagatcttctgccaggcctgcctgcgggaggagccagacagcgagaacccctgcctgatcagccggctgatgctgtgggatgccaagctgtacaagggggccaggaagatcctgcacgagctgatcttcagcagcttcttcatggagatggagtacaagaagctgtttgccatggagtttgtgaagtactacaagcagctgcagaaggagtacatcagtgatgaccatgacaggagcatcagcatcacagccctgtctgtgcagatgttcaccgtgcccaccctggcccggcacctgattgaggagcagaatgtcatcagcgtcatcacagagaccctgctggaggtgctgcctgagtacctggacaggaacaacaagttcaacttccagggctacagccaggacaagctgggccgggtgtatgctgtgatctgtgacctgaagtacatcctgatcagcaagcccaccatctggacagagcggctgaggatgcagttcctggagggcttccgctccttcctgaagatcctgacctgcatgcagggcatggaggagatccggcggcaggtgggccagcacatcgaggtggaccctgactgggaggccgccatcgccatccagatgcagctgaagaacatcctgctgatgttccaggagtggtgtgcctgtgatgaggagctgctgctggtggcctacaaggagtgccacaaggctgtgatgcgctgcagcaccagcttcatcagcagcagcaagacagtggtgcagagctgtggccacagcctggagaccaagagctacagagtgtctgaggacctggtgtccatccacctgcccctgagcaggaccctggccggcctgcacgtgcggctgagccggctgggcgctgtgtcccggctgcacgagtttgtgtcctttgaggacttccaggtggaggtgctggtggagtaccccctgcgctgcctggtgctggtggcccaggtggtggccgagatgtggaggagaaatggcctgagcctcatcagccaggtgttctactaccaggatgtgaagtgccgggaggagatgtatgacaaggacatcatcatgctgcagattggagccagcctgatggaccccaacaagttcctgctgctggtgctgcagagatatgagctggccgaggccttcaacaagaccatcagcaccaaggaccaggacctgatcaagcagtacaacaccctcatcgaggagatgctgcaggtgctgatctacatcgtgggggagagatatgtgcctggggtgggcaatgtgaccaaggaggaggtgaccatgagggagatcatccacctgctgtgcatcgagcccatgccccacagcgccatcgccaagaacctgcctgaaaatgaaaataatgagaccggcctggagaatgtcatcaacaaggtggccaccttcaagaagccaggagtgtctggccacggcgtgtatgagctgaaggatgagagcctgaaggacttcaacatgtacttctaccactacagcaagacccagcacagcaaggccgagcacatgcagaagaagaggaggaagcaggagaacaaggatgaggccctgcccccacctcctcctcctgagttctgcccagccttcagcaaggtgatcaacctgctgaactgtgacatcatgatgtacatcctgaggacagtgtttgagcgggccatcgacacagacagcaacctgtggacagagggcatgctgcagatggccttccacatcctggccctgggcctgctggaggagaagcagcagctgcagaaggcccctgaggaggaggtgacctttgacttctaccacaaggccagccggctgggcagcagcgccatgaacatccagatgctgctggagaagctgaagggcatcccccagctggagggccagaaggacatgatcacctggatcctgcagatgtttgacacagtgaagaggctgcgggagaagagctgcctgattgtggccaccaccagcggcagcgagagcatcaagaatgatgagatcacccatgacaaggagaaggccgagaggaagaggaaggccgaggccgcccggctgcaccggcagaagatcatggcccagatgtctgccctgcagaagaacttcatcgagacccacaagctgatgtatgacaacaccagcgagatgcctgggaaggaggacagcatcatggaggaggagagcaccccagctgtgtctgactacagccgcatcgccctgggccccaagaggggccccagcgtgacagagaaggaggtgctgacctgcatcctgtgccaggaggagcaggaggtgaagattgagaacaatgccatggtgctgagcgcctgtgtgcagaagagcacagccctgacccagcaccggggcaagcccatcgagctgtctggagaggccctggaccccctcttcatggaccctgacctggcctacggcacctacacaggcagctgtggccacgtgatgcatgctgtgtgctggcagaagtactttgaggccgtgcagctgagcagccagcagaggatccacgtggacctgtttgacctggagagcggggagtacctgtgccccctgtgcaagagcctgtgcaacacagtcatccccatcatccccctgcagccccagaagatcaacagtgaaaatgctgatgccctggcccagctgctgaccctggcccgctggatccagacagtgctggcccgcatcagcggctacaacatcagacatgccaagggggagaaccccatccccatcttcttcaaccagggcatgggagacagcaccctggagttccacagcatcctgagctttggagtggagagcagcatcaagtacagcaacagcatcaaggagatggtgatcctgtttgccaccaccatctaccgcatcggcctgaaggtgcccccagatgagcgggacccccgggtgcccatgctgacctggagcacctgtgccttcaccatccaggccatcgagaacctgctgggagatgagggcaagcccctgtttggagccctgcagaaccggcagcacaacggcctgaaggccctgatgcagtttgctgtggcccagaggatcacctgcccccaggtgctgatccagaagcacctggtgcggctgctgtctgtggtgctgcccaacatcaagtctgaggacaccccctgcctgctgagcattgacctcttccacgtgctggtgggcgctgtgctggccttccccagcctgtactgggatgatcctgtggacctgcagcccagctctgtgagcagcagctacaaccacctgtacctgttccacctgatcaccatggcccacatgctgcagatcctgctgactgtggacaccggcctgcccctggcccaggtgcaggaggacagcgaggaggcccacagcgccagcagcttctttgctgagatcagccagtacaccagcggcagcatcggctgtgacatccctggctggtacctgtgggtgtccctgaagaatggcatcaccccctacctgcgctgtgccgccctcttcttccactacctgctgggcgtgaccccacctgaggagctgcacaccaacagcgctgagggggagtacagcgccctgtgcagctacctgagcctgcccaccaacctcttcctgctcttccaggagtactgggacacagtgcggcccctgctgcagcgctggtgtgccgaccctgccctgctgaactgcctgaagcagaagaacacagtggtgcgctaccccaggaagaggaacagcctgattgagctgcctgatgactacagctgcctgctgaaccaggccagccacttccgctgccccaggtctgcagatgatgagaggaagcaccctgtgctgtgcctcttctgtggggccatcctgtgcagccagaacatctgctgccaggagatcgtgaatggagaggaggtgggcgcctgcatcttccacgccctgcactgtggggccggcgtgtgcatcttcctgaagatccgggagtgccgggtggtgctggtggagggcaaggcccggggctgtgcctacccagccccctacctggatgaatatggagaaacagaccccggcctgaagaggggcaaccccctgcacctgagccgggagcgctacaggaagctgcacctggtgtggcagcagcactgcatcatcgaggagatcgcccggagccaggagaccaaccagatgctgtttggcttcaactggcagctgctgtag

SEQ ID NO: 175131 - DNA, 2412 bp, synthetic construct
  misc_feature 1..2412: note = Description of Artificial Sequence: Synthetic coding sequence
  source 1..2412: mol_type = other DNA
atggctgatgaggaggccggcggcacagagaggatggagatctctgctgagctgccccagaccccccagaggctggcctcctggtgggaccagcaggtggacttctacacagccttcctgcaccacctggcccagctggtgcctgagatctactttgctgagatggaccctgacctggagaagcaggaggagagcgtgcagatgagcatcttcacccccctggagtggtacctgtttggagaagatcctgacatctgcctggagaagctgaagcacagcggggccttccagctgtgtggccgggtcttcaagtctggagagaccacctacagctgccgggactgtgccatcgaccccacctgtgtgctgtgcatggactgcttccaggacagcgtgcacaagaaccaccgctacaagatgcacaccagcactggaggcggcttctgtgactgtggggacacagaggcctggaagacaggccccttctgtgtgaaccacgagcccggccgggccggcaccatcaaggagaacagccgctgccccctgaatgaggaggtgattgtgcaggccaggaagatcttccccagcgtcatcaagtatgtggtggagatgaccatctgggaggaggagaaggagctgcccccagagctgcagatccgggagaagaatgaaagatactactgtgtgctcttcaatgatgagcaccacagctatgaccacgtgatctacagcctgcagagggccctggactgtgagctggccgaggcccagctgcacaccacagccatcgacaaggagggccggcgggctgtgaaggccggggcctatgctgcctgccaggaggccaaggaggacatcaagagccacagtgaaaatgtgtcccagcaccccctgcacgtggaggtgctgcacagcgagatcatggcccaccagaagtttgccctgcggctgggctcctggatgaacaagatcatgagctacagcagtgacttccggcagatcttctgccaggcctgcctgcgggaggagccagacagcgagaacccctgcctgatcagccggctgatgctgtgggatgccaagctgtacaagggggccaggaagatcctgcacgagctgatcttcagcagcttcttcatggagatggagtacaagaagctgtttgccatggagtttgtgaagtactacaagcagctgcagaaggagtacatcagtgatgaccatgacaggagcatcagcatcacagccctgtctgtgcagatgttcaccgtgcccaccctggcccggcacctgattgaggagcagaatgtcatcagcgtcatcacagagaccctgctggaggtgctgcctgagtacctggacaggaacaacaagttcaacttccagggctacagccaggacaagctgggccgggtgtatgctgtgatctgtgacctgaagtacatcctgatcagcaagcccaccatctggacagagcggctgaggatgcagttcctggagggcttccgctccttcctgaagatcctgacctgcatgcagggcatggaggagatccggcggcaggtgggccagcacatcgaggtggaccctgactgggaggccgccatcgccatccagatgcagctgaagaacatcctgctgatgttccaggagtggtgtgcctgtgatgaggagctgctgctggtggcctacaaggagtgccacaaggctgtgatgcgctgcagcaccagcttcatcagcagcagcaagacagtggtgcagagctgtggccacagcctggagaccaagagctacagagtgtctgaggacctggtgtccatccacctgcccctgagcaggaccctggccggcctgcacgtgcggctgagccggctgggcgctgtgtcccggctgcacgagtttgtgtcctttgaggacttccaggtggaggtgctggtggagtaccccctgcgctgcctggtgctggtggcccaggtggtggccgagatgtggaggagaaatggcctgagcctcatcagccaggtgttctactaccaggatgtgaagtgccgggaggagatgtatgacaaggacatcatcatgctgcagattggagccagcctgatggaccccaacaagttcctgctgctggtgctgcagagatatgagctggccgaggccttcaacaagaccatcagcaccaaggaccaggacctgatcaagcagtacaacaccctcatcgaggagatgctgcaggtgctgatctacatcgtgggggagagatatgtgcctggggtgggcaatgtgaccaaggaggaggtgaccatgagggagatcatccacctgctgtgcatcgagcccatgccccacagcgccatcgccaagaacctgcctgaaaatgagacccgctgcatccggccctggagcctgtag

SEQ ID NO: 175132 - DNA, 3042 bp, synthetic construct
  misc_feature 1..3042: note = Description of Artificial Sequence: Synthetic coding sequence
  source 1..3042: mol_type = other DNA
atggctgatgaggaggccggcggcacagagaggatggagatctctgctgagctgccccagaccccccagaggctggcctcctggtgggaccagcaggtggacttctacacagccttcctgcaccacctggcccagctggtgcctgagatctactttgctgagatggaccctgacctggagaagcaggaggagagcgtgcagatgagcatcttcacccccctggagtggtacctgtttggagaagatcctgacatctgcctggagaagctgaagcacagcggggccttccagctgtgtggccgggtcttcaagtctggagagaccacctacagctgccgggactgtgccatcgaccccacctgtgtgctgtgcatggactgcttccaggacagcgtgcacaagaaccaccgctacaagatgcacaccagcactggaggcggcttctgtgactgtggggacacagaggcctggaagacaggccccttctgtgtgaaccacgagcccggccgggccggcaccatcaaggagaacagccgctgccccctgaatgaggaggtgattgtgcaggccaggaagatcttccccagcgtcatcaagtatgtggtggagatgaccatctgggaggaggagaaggagctgcccccagagctgcagatccgggagaagaatgaaagatactactgtgtgctcttcaatgatgagcaccacagctatgaccacgtgatctacagcctgcagagggccctggactgtgagctggccgaggcccagctgcacaccacagccatcgacaaggagggccggcgggctgtgaaggccggggcctatgctgcctgccaggaggccaaggaggacatcaagagccacagtgaaaatgtgtcccagcaccccctgcacgtggaggtgctgcacagcgagatcatggcccaccagaagtttgccctgcggctgggctcctggatgaacaagatcatgagctacagcagtgacttccggcagatcttctgccaggcctgcctgcgggaggagccagacagcgagaacccctgcctgatcagccggctgatgctgtgggatgccaagctgtacaagggggccaggaagatcctgcacgagctgatcttcagcagcttcttcatggagatggagtacaagaagctgtttgccatggagtttgtgaagtactacaagcagctgcagaaggagtacatcagtgatgaccatgacaggagcatcagcatcacagccctgtctgtgcagatgttcaccgtgcccaccctggcccggcacctgattgaggagcagaatgtcatcagcgtcatcacagagaccctgctggaggtgctgcctgagtacctggacaggaacaacaagttcaacttccagggctacagccaggacaagctgggccgggtgtatgctgtgatctgtgacctgaagtacatcctgatcagcaagcccaccatctggacagagcggctgaggatgcagttcctggagggcttccgctccttcctgaagatcctgacctgcatgcagggcatggaggagatccggcggcaggtgggccagcacatcgaggtggaccctgactgggaggccgccatcgccatccagatgcagctgaagaacatcctgctgatgttccaggagtggtgtgcctgtgatgaggagctgctgctggtggcctacaaggagtgccacaaggctgtgatgcgctgcagcaccagcttcatcagcagcagcaagacagtggtgcagagctgtggccacagcctggagaccaagagctacagagtgtctgaggacctggtgtccatccacctgcccctgagcaggaccctggccggcctgcacgtgcggctgagccggctgggcgctgtgtcccggctgcacgagtttgtgtcctttgaggacttccaggtggaggtgctggtggagtaccccctgcgctgcctggtgctggtggcccaggtggtggccgagatgtggaggagaaatggcctgagcctcatcagccaggtgttctactaccaggatgtgaagtgccgggaggagatgtatgacaaggacatcatcatgctgcagattggagccagcctgatggaccccaacaagttcctgctgctggtgctgcagagatatgagctggccgaggccttcaacaagaccatcagcaccaaggaccaggacctgatcaagcagtacaacaccctcatcgaggagatgctgcaggtgctgatctacatcgtgggggagagatatgtgcctggggtgggcaatgtgaccaaggaggaggtgaccatgagggagatcatccacctgctgtgcatcgagcccatgccccacagcgccatcgccaagaacctgcctgaaaatgaaaataatgagaccggcctggagaatgtcatcaacaaggtggccaccttcaagaagccaggagtgtctggccacggcgtgtatgagctgaaggatgagagcctgaaggacttcaacatgtacttctaccactacagcaagacccagcacagcaaggccgagcacatgcagaagaagaggaggaagcaggagaacaaggatgaggccctgcccccacctcctcctcctgagttctgcccagccttcagcaaggtgatcaacctgctgaactgtgacatcatgatgtacatcctgaggacagtgtttgagcgggccatcgacacagacagcaacctgtggacagagggcatgctgcagatggccttccacatcctggccctgggcctgctggaggagaagcagcagctgcagaaggcccctgaggaggaggtgacctttgacttctaccacaaggccagccggctgggcagcagcgccatgaacatccagatgctgctggagaagctgaagggcatcccccagctggagggccagaaggacatgatcacctggatcctgcagatgtttgacacagtgaagaggctgcgggagaagagctgcctgattgtggccaccaccagcggcagcgagagcatcaagaatgatgagatcctgcaccactag

SEQ ID NO: 175133 - DNA, 1728 bp, synthetic construct
  misc_feature 1..1728: note = Description of Artificial Sequence: Synthetic coding sequence
  source 1..1728: mol_type = other DNA
atgtatgccggcaacatccccatctacaagacagagagccgcagcagaaatgagcagggcatggaccccatcacccggcaggtgggccagcacatcgagatggagcctgagtgggaggccgccttcaccctgcagatgaagctgacccacgtgatctccatgatgcaggactggtgtgccagtgatgagaaggtgctgattgaggcctacaagaagtgcctggccgtgctgatgcagtgccacggcggctacacagatggagagcagcccatcaccctgagcatctgtggccacagcgtggagaccatccgctactgtgtgtcccaggagaaggtgtccatccacctgcctgtgtcccggctgctggccggcctgcacgtgctgctgagcaagtctgaggtggcctacaagtttcctgagctgctgcccctgtctgagctgagcccccccatgctgattgagcaccccctgcgctgcctggtgctgtgtgcccaggtgcacgccggcatgtggaggagaaatggcttcagcctggtgaaccagatctactactaccacaacgtgaagtgcagaagagagatgtttgacaaggatgtggtgatgctgcagacaggagtgtccatgatggaccccaaccacttcctgatgatcatgctgagcagatttgagctgtaccagatcttcagcaccccagactatggcaagcgcttcagcagcgagatcacccacaaggatgtggtgcagcagaacaacaccctcatcgaggagatgctgtacctgatcatcatgctggtgggggagcgcttcagccctggggtgggccaggtgaatgccacagatgagatcaagcgggagatcatccaccagctgagcatcaagcccatggcccacagcgagctggtgaagagcctgcctgaagatgagaacaaggagaccggcatggagagcgtcatcgaggccgtggcccacttcaagaagccaggcctgaccggccggggcatgtatgagctgaagccagaatgtgccaaggagttcaacctgtacttctaccacttcagcagagctgagcagagcaaggccgaggaggcccagaggaagctgaagaggcagaaccgggaggacacagccctgcccccacctgtgctgccccccttctgccccctgtttgccagcctggtgaacatcctgcagagtgatgtgatgctgtgcatcatgggcaccatcctgcagtgggccgtggagcacaacggctacgcctggagcgagagcatgctgcagagggtgctgcacctgattggcatggccctgcaggaggagaagcagcacctggagaatgtgacagaggagcacgtggtgaccttcaccttcacccagaagatcagcaagccaggagaggcccccaagaacagccccagcatcctggccatgctggagaccctgcagaatgccccctacctggaggtgcacaaggacatgatccgctggatcctgaagaccttcaatgctgtgaagaagatgagggagagcagccccaccagccctgtggccgagacagagggcaccatcatggaggagcacaacttccgggtgcagggcaccaagaccaagctgcggggccgggagaagcagaggctgcctgactgtgccgagaagaggtcctggctgcgctgcctgaagtgcagcggcatcctgctgatgaagaccaagaacagcttcagccgccactag

SEQ ID NO: 175134 - DNA, 5268 bp, synthetic construct
  misc_feature 1..5268: note = Description of Artificial Sequence: Synthetic coding sequence
  source 1..5268: mol_type = other DNA
atggccagcgagctggagcctgaggtgcaggccatcgacaggagcctgctggagtgcagcgctgaggagattgctgggaagtggctgcaggccacagacctgacccgggaggtgtaccagcacctggcccactacgtgcccaagatctactgccggggccccaaccccttcccccagaaggaggacatgctggcccagcacgtgctgctgggccccatggagtggtacctgtgtggggaggaccctgccttcggcttccccaagctggagcaggccaacaagcccagccacctgtgtggccgggtcttcaaggtgggggagcccacctacagctgccgggactgtgctgtggaccccacctgtgtgctgtgcatggagtgcttcctgggcagcatccaccgggaccaccgctacaggatgaccaccagcggcggcggcggcttctgtgactgtggggacacagaggcctggaaggagggcccctactgccagaagcatgagctgaacaccagcgagattgaggaggaggaggaccccctggtgcacctgtctgaagatgtgattgcccggacctacaacatctttgccatcaccttccgctatgctgtggagatcctgacctgggagaaggagagcgagctgcctgctgacctggagatggtggagaagagtgacacctactactgcatgctgttcaatgatgaggtgcacacctatgagcaggtgatctacaccctgcagaaggctgtgaactgcacccagaaggaggccatcggctttgccaccaccgtggacagagatggaagaagatctgtgcgctacggggacttccagtactgtgagcaggccaagtctgtgattgtgaggaacaccagccggcagaccaagcccctgaaggtgcaggtgatgcacagcagcatcgtggcccaccagaactttggcctgaagctgctgtcctggctgggcagcatcatcggctacagtgatggcctgcggcgcatcctgtgccaggtgggcctgcaggagggcccagatggagagaacagcagcctggtggaccggctgatgctgagtgacagcaagctgtggaagggggcccggtctgtgtaccaccagctgttcatgagcagcctgctgatggacctgaagtacaagaagctgtttgctgtgcgctttgccaagaactaccagcagctgcagagggacttcatggaggatgaccacgagagagctgtgtctgtgacagccctgtctgtgcagttcttcaccgcccccaccctggccaggatgctgatcacagaggagaacctgatgagcatcatcatcaagaccttcatggaccacctgcggcacagagatgcccagggccgcttccagtttgagcgctacacagccctgcaggccttcaagttccggcgggtgcagagcctcatcctggacctgaagtatgtgctgatcagcaagcccacagagtggagcgatgagctgcggcagaagttcctggagggctttgatgccttcctggagctgctgaagtgcatgcagggcatggaccccatcacccggcaggtgggccagcacatcgagatggagcctgagtgggaggccgccttcaccctgcagatgaagctgacccacgtgatctccatgatgcaggactggtgtgccagtgatgagaaggtgctgattgaggcctacaagaagtgcctggccgtgctgatgcagtgccacggcggctacacagatggagagcagcccatcaccctgagcatctgtggccacagcgtggagaccatccgctactgtgtgtcccaggagaaggtgtccatccacctgcctgtgtcccggctgctggccggcctgcacgtgctgctgagcaagtctgaggtggcctacaagtttcctgagctgctgcccctgtctgagctgagcccccccatgctgattgagcaccccctgcgctgcctggtgctgtgtgcccaggtgcacgccggcatgtggaggagaaatggcttcagcctggtgaaccagatctactactaccacaacgtgaagtgcagaagagagatgtttgacaaggatgtggtgatgctgcagacaggagtgtccatgatggaccccaaccacttcctgatgatcatgctgagcagatttgagctgtaccagatcttcagcaccccagactatggcaagcgcttcagcagcgagatcacccacaaggatgtggtgcagcagaacaacaccctcatcgaggagatgctgtacctgatcatcatgctggtgggggagcgcttcagccctggggtgggccaggtgaatgccacagatgagatcaagcgggagatcatccaccagctgagcatcaagcccatggcccacagcgagctggtgaagagcctgcctgaagatgagaacaaggagaccggcatggagagcgtcatcgaggccgtggcccacttcaagaagccaggcctgaccggccggggcatgtatgagctgaagccagaatgtgccaaggagttcaacctgtacttctaccacttcagcagagctgagcagagcaaggccgaggaggcccagaggaagctgaagaggcagaaccgggaggacacagccctgcccccacctgtgctgccccccttctgccccctgtttgccagcctggtgaacatcctgcagagtgatgtgatgctgtgcatcatgggcaccatcctgcagtgggccgtggagcacaacggctacgcctggagcgagagcatgctgcagagggtgctgcacctgattggcatggccctgcaggaggagaagcagcacctggagaatgtgacagaggagcacgtggtgaccttcaccttcacccagaagatcagcaagccaggagaggcccccaagaacagccccagcatcctggccatgctggagaccctgcagaatgccccctacctggaggtgcacaaggacatgatccgctggatcctgaagaccttcaatgctgtgaagaagatgagggagagcagccccaccagccctgtggccgagacagagggcaccatcatggaggagagcagccgggacaaggacaaggccgagaggaagaggaaggccgagatcgcccggctgcggcgggagaagatcatggcccagatgtctgagatgcagaggcacttcattgatgagaacaaggagctgttccagcagaccctggagctggatgccagcaccagcgctgtgctggaccacagccctgtggccagtgacatgaccctgacagccctgggccctgcccagacccaggtgcctgagcagaggcagtttgtgacctgcatcctgtgccaggaggagcaggaggtgaaggtggagagccgggccatggtgctggccgcctttgtgcagaggagcacagtgctgagcaagaacagaagcaagttcatccaggaccctgagaagtatgaccccctcttcatgcacccagacctgagctgtggcacccacaccagcagctgtggccacatcatgcacgcccactgctggcagcgctactttgattctgtgcaggccaaggagcagaggcggcagcagaggctgcggctgcacaccagctatgatgtggagaatggagagttcctgtgccccctgtgtgagtgcctgagcaacacagtcatccccctgctgctgccccccaggaacatcttcaacaaccggctgaacttcagtgaccagcccaacctgacccagtggatccgcaccatcagccagcagatcaaggccctgcagttcctgaggaaggaggagagcacccccaacaatgccagcaccaagaacagtgaaaatgtggatgagctgcagctgcctgagggcttccggccagacttccggcccaagatcccctacagcgagagcatcaaggagatgctgaccaccttcggcacagccacctacaaggtgggcctgaaggtgcaccccaatgaggaggacccccgggtgcccatcatgtgctggggcagctgtgcctacaccatccagagcattgagcgcatcctgagtgatgaggacaagcccctgtttggccccctgccctgccgcctggatgactgcctgcggagcctgaccaggtttgctgctgcccactggacagtggcctctgtgtctgtggtgcagggccacttctgcaagctgtttgccagcctggtgcccaatgacagccatgaggagctgccctgcatcctggacatcgacatgttccacctgctggtgggcctggtgctggccttccctgccctgcagtgccaggacttcagcggcatcagcctgggcactggagacctgcacatcttccacctggtgaccatggcccacatcatccagatcctgctgaccagctgcacagaggagaatggcatggaccaggagaaccccccctgtgaggaggagagcgctgtgctggccctgtacaagaccctgcaccagtacacaggcagcgccctgaaggagatccccagcggctggcacctgtggaggtctgtgcgggccggcatcatgcccttcctgaagtgcagcgccctcttcttccactacctgaatggagtgcccagccccccagacatccaggtgcccggcaccagccactttgagcacctgtgcagctacctgagcctgcccaacaacctgatctgcctcttccaggagaacagcgagatcatgaacagcctgattgaatcctggtgcaggaacagcgaggtgaagcgctacctggagggggagagagatgccatccgctacccccgggagagcaacaagctgatcaacctgcctgaggactacagcagcctcatcaaccaggccagcaacttcagctgccccaagagcggcggggacaagagccgggcccccaccctgtgcctggtgtgtggcagcctgctgtgcagccagagctactgctgccagacagagctggagggggaggatgtgggcgcctgcacagcccacacctacagctgtggcagcggcgtgggcatcttcctgcgggtgcgggagtgccaggtgctcttcctggccggcaagaccaagggctgcttctacagccccccctacctggatgattatggagaaacagaccagggcctgcggcggggcaaccccctgcacctgtgcaaggagcgcttcaagaagatccagaagctgtggcaccagcacagcgtgacagaggagattggacatgcccaggaggccaaccagaccctggtgggcatcgactggcagcacctgtag

SEQ ID NO: 175135 - DNA, 5268 bp, synthetic construct
  misc_feature 1..5268: note = Description of Artificial Sequence: Synthetic coding sequence
  source 1..5268: mol_type = other DNA
atggccagcgagctggagcctgaggtgcaggccatcgacaggagcctgctggagtgcagcgctgaggagattgctgggaagtggctgcaggccacagacctgacccgggaggtgtaccagcacctggcccactacgtgcccaagatctactgccggggccccaaccccttcccccagaaggaggacatgctggcccagcacgtgctgctgggccccatggagtggtacctgtgtggggaggaccctgccttcggcttccccaagctggagcaggccaacaagcccagccacctgtgtggccgggtcttcaaggtgggggagcccacctacagctgccgggactgtgctgtggaccccacctgtgtgctgtgcatggagtgcttcctgggcagcatccaccgggaccaccgctacaggatgaccaccagcggcggcggcggcttctgtgactgtggggacacagaggcctggaaggagggcccctactgccagaagcatgagctgaacaccagcgagattgaggaggaggaggaccccctggtgcacctgtctgaagatgtgattgcccggacctacaacatctttgccatcaccttccgctatgctgtggagatcctgacctgggagaaggagagcgagctgcctgctgacctggagatggtggagaagagtgacacctactactgcatgctgttcaatgatgaggtgcacacctatgagcaggtgatctacaccctgcagaaggctgtgaactgcacccagaaggaggccatcggctttgccaccaccgtggacagagatggaagaagatctgtgcgctacggggacttccagtactgtgagcaggccaagtctgtgattgtgaggaacaccagccggcagaccaagcccctgaaggtgcaggtgatgcacagcagcatcgtggcccaccagaactttggcctgaagctgctgtcctggctgggcagcatcatcggctacagtgatggcctgcggcgcatcctgtgccaggtgggcctgcaggagggcccagatggagagaacagcagcctggtggaccggctgatgctgagtgacagcaagctgtggaagggggcccggtctgtgtaccaccagctgttcatgagcagcctgctgatggacctgaagtacaagaagctgtttgctgtgcgctttgccaagaactatgaaaggctgcagagcgactatgtgacagatgaccatgaccgggagttctctgtggccgacctgtctgtgcagatcttcaccgtgcccagcctggccaggatgctgatcacagaggagaacctgatgagcatcatcatcaagaccttcatggaccacctgcggcacagagatgcccagggccgcttccagtttgagcgctacacagccctgcaggccttcaagttccggcgggtgcagagcctcatcctggacctgaagtatgtgctgatcagcaagcccacagagtggagcgatgagctgcggcagaagttcctggagggctttgatgccttcctggagctgctgaagtgcatgcagggcatggaccccatcacccggcaggtgggccagcacatcgagatggagcctgagtgggaggccgccttcaccctgcagatgaagctgacccacgtgatctccatgatgcaggactggtgtgccagtgatgagaaggtgctgattgaggcctacaagaagtgcctggccgtgctgatgcagtgccacggcggctacacagatggagagcagcccatcaccctgagcatctgtggccacagcgtggagaccatccgctactgtgtgtcccaggagaaggtgtccatccacctgcctgtgtcccggctgctggccggcctgcacgtgctgctgagcaagtctgaggtggcctacaagtttcctgagctgctgcccctgtctgagctgagcccccccatgctgattgagcaccccctgcgctgcctggtgctgtgtgcccaggtgcacgccggcatgtggaggagaaatggcttcagcctggtgaaccagatctactactaccacaacgtgaagtgcagaagagagatgtttgacaaggatgtggtgatgctgcagacaggagtgtccatgatggaccccaaccacttcctgatgatcatgctgagcagatttgagctgtaccagatcttcagcaccccagactatggcaagcgcttcagcagcgagatcacccacaaggatgtggtgcagcagaacaacaccctcatcgaggagatgctgtacctgatcatcatgctggtgggggagcgcttcagccctggggtgggccaggtgaatgccacagatgagatcaagcgggagatcatccaccagctgagcatcaagcccatggcccacagcgagctggtgaagagcctgcctgaagatgagaacaaggagaccggcatggagagcgtcatcgaggccgtggcccacttcaagaagccaggcctgaccggccggggcatgtatgagctgaagccagaatgtgccaaggagttcaacctgtacttctaccacttcagcagagctgagcagagcaaggccgaggaggcccagaggaagctgaagaggcagaaccgggaggacacagccctgcccccacctgtgctgccccccttctgccccctgtttgccagcctggtgaacatcctgcagagtgatgtgatgctgtgcatcatgggcaccatcctgcagtgggccgtggagcacaacggctacgcctggagcgagagcatgctgcagagggtgctgcacctgattggcatggccctgcaggaggagaagcagcacctggagaatgtgacagaggagcacgtggtgaccttcaccttcacccagaagatcagcaagccaggagaggcccccaagaacagccccagcatcctggccatgctggagaccctgcagaatgccccctacctggaggtgcacaaggacatgatccgctggatcctgaagaccttcaatgctgtgaagaagatgagggagagcagccccaccagccctgtggccgagacagagggcaccatcatggaggagagcagccgggacaaggacaaggccgagaggaagaggaaggccgagatcgcccggctgcggcgggagaagatcatggcccagatgtctgagatgcagaggcacttcattgatgagaacaaggagctgttccagcagaccctggagctggatgccagcaccagcgctgtgctggaccacagccctgtggccagtgacatgaccctgacagccctgggccctgcccagacccaggtgcctgagcagaggcagtttgtgacctgcatcctgtgccaggaggagcaggaggtgaaggtggagagccgggccatggtgctggccgcctttgtgcagaggagcacagtgctgagcaagaacagaagcaagttcatccaggaccctgagaagtatgaccccctcttcatgcacccagacctgagctgtggcacccacaccagcagctgtggccacatcatgcacgcccactgctggcagcgctactttgattctgtgcaggccaaggagcagaggcggcagcagaggctgcggctgcacaccagctatgatgtggagaatggagagttcctgtgccccctgtgtgagtgcctgagcaacacagtcatccccctgctgctgccccccaggaacatcttcaacaaccggctgaacttcagtgaccagcccaacctgacccagtggatccgcaccatcagccagcagatcaaggccctgcagttcctgaggaaggaggagagcacccccaacaatgccagcaccaagaacagtgaaaatgtggatgagctgcagctgcctgagggcttccggccagacttccggcccaagatcccctacagcgagagcatcaaggagatgctgaccaccttcggcacagccacctacaaggtgggcctgaaggtgcaccccaatgaggaggacccccgggtgcccatcatgtgctggggcagctgtgcctacaccatccagagcattgagcgcatcctgagtgatgaggacaagcccctgtttggccccctgccctgccgcctggatgactgcctgcggagcctgaccaggtttgctgctgcccactggacagtggcctctgtgtctgtggtgcagggccacttctgcaagctgtttgccagcctggtgcccaatgacagccatgaggagctgccctgcatcctggacatcgacatgttccacctgctggtgggcctggtgctggccttccctgccctgcagtgccaggacttcagcggcatcagcctgggcactggagacctgcacatcttccacctggtgaccatggcccacatcatccagatcctgctgaccagctgcacagaggagaatggcatggaccaggagaaccccccctgtgaggaggagagcgctgtgctggccctgtacaagaccctgcaccagtacacaggcagcgccctgaaggagatccccagcggctggcacctgtggaggtctgtgcgggccggcatcatgcccttcctgaagtgcagcgccctcttcttccactacctgaatggagtgcccagccccccagacatccaggtgcccggcaccagccactttgagcacctgtgcagctacctgagcctgcccaacaacctgatctgcctcttccaggagaacagcgagatcatgaacagcctgattgaatcctggtgcaggaacagcgaggtgaagcgctacctggagggggagagagatgccatccgctacccccgggagagcaacaagctgatcaacctgcctgaggactacagcagcctcatcaaccaggccagcaacttcagctgccccaagagcggcggggacaagagccgggcccccaccctgtgcctggtgtgtggcagcctgctgtgcagccagagctactgctgccagacagagctggagggggaggatgtgggcgcctgcacagcccacacctacagctgtggcagcggcgtgggcatcttcctgcgggtgcgggagtgccaggtgctcttcctggccggcaagaccaagggctgcttctacagccccccctacctggatgattatggagaaacagaccagggcctgcggcggggcaaccccctgcacctgtgcaaggagcgcttcaagaagatccagaagctgtggcaccagcacagcgtgacagaggagattggacatgcccaggaggccaaccagaccctggtgggcatcgactggcagcacctgtag

SEQ ID NO: 175136 - DNA, 1320 bp, synthetic construct
  misc_feature 1..1320: note = Description of Artificial Sequence: Synthetic coding sequence
  source 1..1320: mol_type = other DNA
atggccagcgagctggagcctgaggtgcaggccatcgacaggagcctgctggagtgcagcgctgaggagattgctgggaagtggctgcaggccacagacctgacccgggaggtgtaccagcacctggcccactacgtgcccaagatctactgccggggccccaaccccttcccccagaaggaggacatgctggcccagcacgtgctgctgggccccatggagtggtacctgtgtggggaggaccctgccttcggcttccccaagctggagcaggccaacaagcccagccacctgtgtggccgggtcttcaaggtgggggagcccacctacagctgccgggactgtgctgtggaccccacctgtgtgctgtgcatggagtgcttcctgggcagcatccaccgggaccaccgctacaggatgaccaccagcggcggcggcggcttctgtgactgtggggacacagaggcctggaaggagggcccctactgccagaagcatgagctgaacaccagcgagattgaggaggaggaggaccccctggtgcacctgtctgaagatgtgattgcccggacctacaacatctttgccatcaccttccgctatgctgtggagatcctgacctgggagaaggagagcgagctgcctgctgacctggagatggtggagaagagtgacacctactactgcatgctgttcaatgatgaggtgcacacctatgagcaggtgatctacaccctgcagaaggctgtgaactgcacccagaaggaggccatcggctttgccaccaccgtggacagagatggaagaagatctgtgcgctacggggacttccagtactgtgagcaggccaagtctgtgattgtgaggaacaccagccggcagaccaagcccctgaaggtgcaggtgatgcacagcagcatcgtggcccaccagaactttggcctgaagctgctgtcctggctgggcagcatcatcggctacagtgatggcctgcggcgcatcctgtgccaggtgggcctgcaggagggcccagatggagagaacagcagcctggtggaccggctgatgctgagtgacagcaagctgtggaagggggcccggtctgtgtaccaccagctgttcatgagcagcctgctgatggacctgaagtacaagaagctgtttgctgtgcgctttgccaagaactatgaaaggctgcagagcgactatgtgacagatgaccatgaccgggagttctctgtggccgacctgtctgtgcagatcttcaccgtgcccagcctcttcagcatctctgctggccgcagcggcagccccctgtag

SEQ ID NO: 175137 - DNA, 5667 bp, synthetic construct
  misc_feature 1..5667: note = Description of Artificial Sequence: Synthetic coding sequence
  source 1..5667: mol_type = other DNA
atggctgctgctgctgctgctgctgtgggcggccagcagcccagccagcctgagctgcctgcccctggcctggccctggacaaggccgccacagctgcccacctgaaggccgccctgagcaggccagacaacagagctggagctgaggagctgcaggccctgctggagcgggtgctgtctgctgagcggcccctggccgctgctgctggaggagaagatgctgctgctgctgggggcggcggcggccctggagctgctgaggaggaggccctggagtggtgcaagtgcctgctggccggcggcggcggctatgatgagttctgtgccgctgtgcgggcctatgaccctgctgccctgtgtggcctggtgtggacagccaactttgtggcctaccgctgcaggacctgtggcatcagcccctgcatgagcctgtgtgccgagtgcttccaccagggcgaccacactggacatgacttcaacatgttccgcagccaggccggcggggcctgtgactgtggggacagcaatgtgatgagggagagcggcttctgcaagaggcaccagatcaagagcagcagcaacatcccctgtgtgcccaaggacctgctgatgatgtctgaatttgtgctgccccgcttcatcttctgcctgatccagtacctgcgggagggctacaatgaacctgctgctgatggccccagcgagaaggacctgaacaaggtgctgcagctgctggagccccagatctccttcctggaggacctgaccaagatgggcggggccatgaggtctgtgctgacccaggtgctgaccaaccagcagaactacaaggacctgaccagcggcctgggagaaaatgcctgtgtgaagaagagccatgagaagtacctgattgccctgaagagcagcggcctgacctacccagaggacaagctggtgtatggagtgcaggagcccagcgctggcaccagcagcctggccgtgcagggcttcatcggggccaccggcaccctgggccaggtggacagcagtgatgaagatgaccaggacggcagccagggcctgggcaagaggaagagggtgaagctgagcagcggcaccaaggaccagagcatcatggatgtgctgaagcacaagagcttcctggaggagctgctcttctggaccatcaagtatgagttcccccagaagatggtgaccttcctgctgaacatgctgcctgaccaggagtacaaggtggccttcaccaagacctttgtgcagcactacgccttcatcatgaagaccctgaagaagagccatgaaagtgacaccatgagcaacagaattgtgcacatctctgtgcagctgttcagcaatgaggagctggcccggcaggtgacagaggagtgccagctgctggacatcatggtgacagtgctgctgtacatgatggagagctgcctgatcaagtctgagctgcaggatgaggagaacagcctgcacgtggtggtgaactgtggggaggccctgctgaagaacaacacctactggcccctggtgtctgacttcatcaacatcctgagccaccagagcgtggccaagcgcttcctggaggaccacggcctgctggtgacctggatgaactttgtgtccttcttccagggcatgaacctgaacaagcgggagctgaatgagcacgtggagtttgagagccagacctactatgctgcctttgctgctgagctggaggcctgtgcccagcccatgtggggcctgctgagccactgcaaggtgcgggagacccaggagtacaccagaaatgtggtgcgctactgcctggaggccctgcaggactggtttgatgccatcaactttgtggatgagcccgcccccaaccaggtgaccttccacctgcccctgcaccgctactatgccatgttcctgagcaaggctgtgaagtgccaggagctggacctggacagcgtgctgcctgaccaggagatgctgatgaagctgatgatccaccccctgcagatccaggccagcctggccgagatccacagcaacatgtgggtgagaaatggcctgcagatcaagggccaggccatgacctacgtgcagagccacttctgcaacagcatgattgatcctgacatctacctgctgcaggtgtgtgccagccggctggaccctgactacttcatcagctctgtgtttgagcgcttcaaggtggtggacctgctgaccatggccagccagcaccagaacacagtgctggatgctgagcacgagaggtccatgctggagggcgccctgaccttcctggtgatcctgctgagcctgcggctgcacctgggcatgtctgatgatgagatcctgcgggcagagatggtggcccagctgtgcatgaatgacaggacccacagcagcctgctggacctgatccctgagaaccccaaccccaagagcggcatcatccctggcagctacagctttgagagcgtgctgtctgctgtggccgacttcaaggcccctgtgtttgagcccggcggctccatgcagcagggcatgtacacccccaaggccgaggtgtgggaccaggagtttgatcctgtgatggtgatcctgaggacagtgtacagaagagatgtgcagagcgccatggaccgctacacagccttcctgaagcagagcggcaagtttcctggcaacccctggccaccctacaagaagaggaccagcctgcaccccagctacaagggcctgatgaggctgctgcactgcaagaccctgcacatcgtgctcttcaccctgctgtacaagatcctgatggaccaccagaacctgtctgagcacgtgctgtgcatggtgctgtacctgattgagctgggcctggagaacagcgctgaggaggagagtgatgaggaggcctctgtgggcggccctgagcgctgccacgacagctggttccctggcagcaacctggtgagcaacatgaggcacttcatcaactacgtgcgggtgcgggtgcctgagacagcccctgaggtgaagagggacagccctgccagcaccagcagtgacaacctgggcagcctgcagaacagcggcacagcccaggtgttcagcctggtggccgagaggaggaagaagttccaggagatcatcaacagaagcagcagcgaggccaaccaggtggtgcggcccaagaccagcagcaagtggagcgcccctggcagcgccccccagctgaccacagccatcctggagatcaaggagagcatcctgagcctgctgatcaagctgcaccacaagctgagcggcaagcagaacagctactacccaccctggctggatgacatcgagatcctgatccagcctgagatccccaagtacagccatggagatggcatcacagctgtggagcgcatcctgctgaaggccgccagccagagcaggatgaacaagaggatcatcgaggagatctgcaggaaggtgaccccacctgtgccccccaagaaggtgacagctgctgagaagaagaccctggacaaggaggagcggcggcagaaggcccgggagcggcagcagaagctgctggccgagtttgccagccggcagaagagcttcatggagacagccatggatgtggacagcccagaaaatgacatccccatggagatcaccacagctgagccccaggtgtctgaggccgtgtatgactgtgtgatctgtggccagagcggccccagcagtgaagatcggcccaccggcctggtggtgctgctgcaggccagctctgtgctgggccagtgccgggacaacgtggagcccaagaagctgcccatcagcgaggaggagcagatctacccctgggacacctgtgccgctgtgcatgatgtgcggctgagcctgctgcagcgctacttcaaggacagcagctgcctgctggccgtgtccatcggctgggagggcggcgtgtatgtgcagacctgtggccacaccctgcacatcgactgccacaagagctacatggagagcctgagaaatgaccaggtgctgcagggcttctctgtggacaagggggagttcacctgccccctgtgccggcagtttgccaacagcgtgctgccctgctacccaggcagcaatgtggagaacaacccctggcagaggcccagcaacaagagcatccaggacctgatcaaggaggtggaggagctgcagggccggcctggggccttccccagcgagaccaacctgagcaaggagatggagagcgtgatgaaggacatcaagaacaccacccagaagaagtacagagactacagcaagaccccaggcagcccagacaatgacttcctgttcatgtacagcgtggcccggaccaacctggagctggagctgatccacagaggaggcaacctgtgcagcggcggggccagcacagctgggaagaggagctgcctgaaccagctgttccacgtgctggccctgcacatgaggctgtacagcattgacagcgagtacaacccctggaggaagctgacccagctggaggagatgaacccccagctgggctatgaggagcagcagcctgaggtgcccatcctgtaccatgatgtgaccagcctgctgctgatccagatcctgatgatgccccagcccctgaggaaggaccacttcacctgcatcgtgaaggtgctcttcaccctgctgtacacccaggccctggccgccctgtctgtgaagtgcagcgaggaggacagaagtgcctggaagcacgccggggccctgaagaagagcacctgtgatgctgagaagagctatgaggtgctgctgagctttgtgatcagcgagctgttcaagggcaagctgtaccacgaggagggcacccaggagtgtgccatggtgaaccccatcgcctggagccctgagagcatggagaagtgcctgcaggacttctgcctgcccttcctgcgcatcaccagcctgctgcagcaccacctgtttggagaggacctgcccagctgccaggaggaggaggagttctctgtgctggccagctgcctgggcctgctgcccaccttctaccagacagagcaccccttcatcagcgccagctgcctggactggcctgtgcctgcctttgacatcatcacccagtggtgctttgagatcaagagcttcacagaaagacatgctgagcagggcaaggccctgctgatccaggagagcaagtggaagctgccccacctgctgcagctgcctgagaactacaacaccatcttccagtactaccacaggaagacctgcagcgtgtgcaccaaggtgcccaaggaccctgctgtgtgcctggtgtgtggcacctttgtgtgcctgaagggcctgtgctgcaagcagcagagctactgtgaatgtgtgctgcacagccagaactgtggggccggcaccggcatcttcctgctgatcaatgccagcgtcatcatcatcatccggggccaccgcttctgcctgtggggctctgtgtacctggatgcccacggggaggaggaccgggacctgcggcggggcaagcccctgtacatctgcaaggagcgctacaaggtgctggagcagcagtggatcagccacacctttgaccacatcaacaagcgctggggcccccactacaacggcctgtag

SEQ ID NO: 175138 - DNA, 2130 bp, synthetic construct
  misc_feature 1..2130: note = Description of Artificial Sequence: Synthetic coding sequence
  source 1..2130: mol_type = other DNA
atgattgccagcaagcagaggcagttcacagaggtgttccgcatcatgagcagcaccttcagccagagccgcttcctgtatgctgctgtggtgacagacagcccagaaaatgacatccccatggagatcaccacagctgagccccaggtgtctgaggccgtgtatgactgtgtgatctgtggccagagcggccccagcagcgaggaccggcccaccggcctggtggtgctgctgcaggccagctctgtgctgggccagtgccgggacaacgtggagcccaagaagctgcccatcagcgaggaggagcagatctacccctgggacacctgtgccgctgtgcatgatgtgcggctgagcctgctgcagcgctacttcaaggacagcagctgcctgctggccgtgtccatcggctgggagggcggcgtgtatgtgcagacctgtggccacaccctgcacatcgactgccacaagagctacatggagagcctgagaaatgaccaggtgctgcagggcttctctgtggacaagggggagttcacctgccccctgtgccggcagtttgccaacagcgtgctgccctgctacccaggcagcaatgtggagaacaacccctggcagaggcccagcaacaagagcatccaggacctgatcaaggaggtggaggagctgcagggccggcctggggccttccccagcgagaccaacctgagcaaggagatggagagcgtgatgaaggacatcaagaacaccacccagaagaagtacagagactacagcaagaccccaggcagcccagacaatgacttcctgttcatgtacagcgtggcccggaccaacctggagctggagctgatccaccggggcggcaacctgtgcagcggcggggccagcacagctgggaagaggagctgcctgaaccagctgttccacgtgctggccctgcacatgaggctgtacagcattgattctgagtacaacccctggaggaagctgacccagctggaggagatgaacccccagctgggctatgaggagcagcagcctgaggtgcccatcctgtaccatgatgtgaccagcctgctgctgatccagatcctgatgatgccccagcccctgaggaaggaccacttcacctgcatcgtgaaggtgctcttcaccctgctgtacacccaggccctggccgccctgtctgtgaagtgcagtgaagaagatagaagtgcctggaagcatgctggggccctgaagaagagcacctgtgatgctgagaagagctatgaggtgctgctgagctttgtgatcagcgagctgttcaagggcaagctgtaccacgaggagggcacccaggagtgtgccatggtgaaccccatcgcctggagccctgagagcatggagaagtgcctgcaggacttctgcctgcccttcctgcgcatcaccagcctgctgcagcaccacctgtttggagaggacctgcccagctgccaggaggaggaggagttctctgtgctggccagctgcctgggcctgctgcccaccttctaccagacagagcaccccttcatcagcgccagctgcctggactggcctgtgcctgcctttgacatcatcacccagtggtgctttgagatcaagagcttcacagaaagacatgctgagcagggcaaggccctgctgatccaggagagcaagtggaagctgccccacctgctgcagctgcctgagaactacaacaccatcttccagtactaccacaggaagacctgcagcgtgtgcaccaaggtgcccaaggaccctgctgtgtgcctggtgtgtggcacctttgtgtgcctgaagggcctgtgctgcaagcagcagagctactgtgaatgtgtgctgcacagccagaactgtggggccggcaccggcatcttcctgctgatcaatgccagcgtcatcatcatcatccggggccaccgcttctgcctgtggggctctgtgtacctggatgcccatggagaggaggaccgggacctgcggcggggcaagcccctgtacatctgcaaggagcgctacaaggtgctggagcagcagtggatcagccacacctttgaccacatcaacaagcgctggggcccccactacaacggcctgtag

SEQ ID NO: 175139 - DNA, 5667 bp, synthetic construct; identical to SEQ ID NO: 175137
  misc_feature 1..5667: note = Description of Artificial Sequence: Synthetic coding sequence
  source 1..5667: mol_type = other DNA

SEQ ID NO: 175140 - DNA, 5754 bp, synthetic construct
  misc_feature 1..5754: note = Description of Artificial Sequence: Synthetic coding sequence
  source 1..5754: mol_type = other DNA
atggctgctgctgctgctgctgctgtgggcggccagcagcccagccagcctgagctgcctgcccctggcctggccctggacaaggccgccacagctgcccacctgaaggccgccctgagcaggccagacaacagagctggagctgaggagctgcaggccctgctggagcgggtgctgtctgctgagcggcccctggccgctgctgctggaggagaagatgctgctgctgctgggggcggcggcggccctggagctgctgaggaggaggccctggagtggtgcaagtgcctgctggccggcggcggcggctatgatgagttctgtgccgctgtgcgggcctatgaccctgctgccctgtgtggcctggtgtggacagccaactttgtggcctaccgctgcaggacctgtggcatcagcccctgcatgagcctgtgtgccgagtgcttccaccagggcgaccacactggacatgacttcaacatgttccgcagccaggccggcggggcctgtgactgtggggacagcaatgtgatgagggagagcggcttctgcaagaggcaccagatcaagagcagcagcaacatcccctgtgtgcccaaggacctgctgatgatgtctgaatttgtgctgccccgcttcatcttctgcctgatccagtacctgcgggagggctacaatgaacctgctgctgatggccccagcgagaaggacctgaacaaggtgctgcagctgctggagccccagatctccttcctggaggacctgaccaagatgggcggggccatgaggtctgtgctgacccaggtgctgaccaaccagcagaactacaaggacctgaccagcggcctgggagaaaatgcctgtgtgaagaagagccatgagaagtacctgattgccctgaagagcagcggcctgacctacccagaggacaagctggtgtatggagtgcaggagcccagcgctggcaccagcagcctggccgtgcagggcttcatcggggccaccggcaccctgggccaggtggacagcagtgatgaagatgaccaggacggcagccagggcctgggcaagaggaagagggtgaagctgagcagcggcaccaaggaccagagcatcatggatgtgctgaagcacaagagcttcctggaggagctgctcttctggaccatcaagtatgagttcccccagaagatggtgaccttcctgctgaacatgctgcctgaccaggagtacaaggtggccttcaccaagacctttgtgcagcactacgccttcatcatgaagaccctgaagaagagccatgaaagtgacaccatgagcaacagaattgtgcacatctctgtgcagctgttcagcaatgaggagctggcccggcaggtgacagaggagtgccagctgctggacatcatggtgacagtgctgctgtacatgatggagagctgcctgatcaagtctgagctgcaggatgaggagaacagcctgcacgtggtggtgaactgtggggaggccctgctgaagaacaacacctactggcccctggtgtctgacttcatcaacatcctgagccaccagagcgtggccaagcgcttcctggaggaccacggcctgctggtgacctggatgaactttgtgtccttcttccagggcatgaacctgaacaagcgggagctgaatgagcacgtggagtttgagagccagacctactatgctgcctttgctgctgagctggaggcctgtgcccagcccatgtggggcctgctgagccactgcaaggtgcgggagacccaggagtacaccagaaatgtggtgcgctactgcctggaggccctgcaggactggtttgatgccatcaactttgtggatgagcccgcccccaaccaggtgaccttccacctgcccctgcaccgctactatgccatgttcctgagcaaggctgtgaagtgccaggagctggacctggacagcgtgctgcctgaccaggagatgctgatgaagctgatgatccaccccctgcagatccaggccagcctggccgagatccacagcaacatgtgggtgagaaatggcctgcagatcaagggccaggccatgacctacgtgcagagccacttctgcaacagcatgattgatcctgacatctacctgctgcaggtgtgtgccagccggctggaccctgactacttcatcagctctgtgtttgagcgcttcaaggtggtggacctgctgaccatggccagccagcaccagaacacagtgctggatgctgagcacgagaggtccatgctggagggcgccctgaccttcctggtgatcctgctgagcctgcggctgcacctgggcatgtctgatgatgagatcctgcgggcagagatggtggcccagctgtgcatgaatgacaggacccacagcagcctgctggacctgatccctgagaaccccaaccccaagagcggcatcatccctggcagctacagctttgagagcgtgctgtctgctgtggccgacttcaaggcccctgtgtttgagcccggcggctccatgcagcagggcatgtacacccccaaggccgaggtgtgggaccaggagtttgatcctgtgatggtgatcctgaggacagtgtacagaagagatgtgcagagcgccatggaccgctacacagccttcctgaagcagagcggcaagtttcctggcaacccctggccaccctacaagaagaggaccagcctgcaccccagctacaagggcctgatgaggctgctgcactgcaagaccctgcacatcgtgctcttcaccctgctgtacaagatcctgatggaccaccagaacctgtctgagcacgtgctgtgcatggtgctgtacctgattgagctgggcctggagaacagcgctgaggaggagagtgatgaggaggcctctgtgggcggccctgagcgctgccacgacagctggttccctggcagcaacctggtgagcaacatgaggcacttcatcaactacgtgcgggtgcgggtgcctgagacagcccctgaggtgaagagggacagccctgccagcaccagcagtgacaacctgggcagcctgcagaacagcggcacagcccaggtgttcagcctggtggccgagaggaggaagaagttccaggagatcatcaacagaagcagcagcgaggccaaccaggtggtgcggcccaagaccagcagcaagtggagcgcccctggcagcgccccccagctgaccacagccatcctggagatcaaggagagcatcctgagcctgctgatcaagctgcaccacaagctgagcggcaagcagaacagctactacccaccctggctggatgacatcgagatcctgatccagcctgagatccccaagtacagccatggagatggcatcacagctgtggagcgcatcctgctgaaggccgccagccagagcaggatgaacaagaggatcatcgaggagatctgcaggaaggtgaccccacctgtgccccccaagaaggtgacagctgctgagaagaagaccctggacaaggaggagcggcggcagaaggcccgggagcggcagcagaagctgctggccgagtttgccagccggcagaagagcttcatggagacagccatggatgtggacagcccagaaaatgacatccccatggagatcaccacagctgagccccaggtgtctgaggccgtgtatgactgtgtgatctgtggccagagcggccccagcagtgaagatcggcccaccggcctggtggtgctgctgcaggccagctctgtgctgggccagtgccgggacaacgtggagcccaagaagctgcccatcagcgaggaggagcagatctacccctgggacacctgtgccgctgtgcatgatgtgcggctgagcctgctgcagcgctacttcaaggacagcagctgcctgctggccgtgtccatcggctgggagggcggcgtgtatgtgcagacctgtggccacaccctgcacatcgactgccacaagagctacatggagagcctgagaaatgaccaggtgctgcagggcttctctgtggacaagggggagttcacctgccccctgtgccggcagtttgccaacagcgtgctgccctgctacccaggcagcaatgtggagaacaacccctggcagaggcccagcaacaagagcatccaggacctgatcaaggaggtggaggagctgcagggccggcctggggccttccccagcgagaccaacctgagcaaggagatggagagcgtgatgaaggacatcaagaacaccacccagaagaagtacagagactacagcaagaccccaggcagcccagacaatgacttcctgttcatgtacagcgtggcccggaccaacctggagctggagctgatccacagaggaggcaacctgtgcagcggcggggccagcacagctgggaagaggagctgcctgaacttctgcttcatcatcttccccttcaccaagtctgagatcatcctgtgccagtacaggaagagccatgacaaggtgtaccccaagtaccagctgttccacgtgctggccctgcacatgaggctgtacagcattgattctgagtacaacccctggaggaagctgacccagctggaggagatgaacccccagctgggctatgaggagcagcagcctgaggtgcccatcctgtaccatgatgtgaccagcctgctgctgatccagatcctgatgatgccccagcccctgaggaaggaccacttcacctgcatcgtgaaggtgctcttcaccctgctgtacacccaggccctggccgccctgtctgtgaagtgcagtgaagaagatagaagtgcctggaagcatgctggggccctgaagaagagcacctgtgatgctgagaagagctatgaggtgctgctgagctttgtgatcagcgagctgttcaagggcaagctgtaccacgaggagggcacccaggagtgtgccatggtgaaccccatcgcctggagccctgagagcatggagaagtgcctgcaggacttctgcctgcccttcctgcgcatcaccagcctgctgcagcaccacctgtttggagaggacctgcccagctgccaggaggaggaggagttctctgtgctggccagctgcctgggcctgctgcccaccttctaccagacagagcaccccttcatcagcgccagctgcctggactggcctgtgcctgcctttgacatcatcacccagtggtgctttgagatcaagagcttcacagaaagacatgctgagcagggcaaggccctgctgatccaggagagcaagtggaagctgccccacctgctgcagctgcctgagaactacaacaccatcttccagtactaccacaggaagacctgcagcgtgtgcaccaaggtgcccaaggaccctgctgtgtgcctggtgtgtggcacctttgtgtgcctgaagggcctgtgctgcaagcagcagagctactgtgaatgtgtgctgcacagccagaactgtggggccggcaccggcatcttcctgctgatcaatgccagcgtcatcatcatcatccggggccaccgcttctgcctgtggggctctgtgtacctggatgcccatggagaggaggaccgggacctgcggcggggcaagcccctgtacatctgcaaggagcgctacaaggtgctggagcagcagtggatcagccacacctttgaccacatcaacaagcgctggggcccccactacaacggcctgtag

SEQ ID NO: 175141 - DNA, 1278 bp, synthetic construct
  misc_feature 1..1278: note = Description of Artificial Sequence: Synthetic coding sequence
  source 1..1278: mol_type = other DNA
atggccggggctgagggcgccgccggccggcagagcgagctggagcctgtggtgtccctggtggatgtgctggaggaggatgaggagctggagaatgaggcctgtgctgtgctgggcggcagtgacagcgagaagtgcagctacagccagggctctgtgaagaggcaggccctgtatgcctgcagcacctgcaccccagagggggaggagcccgccggcatctgcctggcctgcagctatgaatgtcatggcagccacaagctgtttgagctgtacaccaagaggaacttccgctgtgactgtggcaacagcaagttcaagaacctggagtgcaagctgctgcctgacaaggccaaggtgaacagcggcaacaagtacaatgacaacttcttcggcctgtactgcatctgcaagaggccctacccagaccctgaagatgagatcccagatgagatgatccagtgtgtggtgtgtgaggactggttccacggccgccacctgggcgccatccccccagagagcggggacttccaggagatggtgtgccaggcctgcatgaagcgctgcagcttcctgtgggcctatgctgcccagctggccgtgaccaagatcagcacagaagatgatggcctggtgagaaatattgatggcatcggggaccaggaggtgatcaagccagaaaatggagagcaccaggacagcaccctgaaggaggatgtgcctgagcagggcaaggatgatgtgcgggaggtgaaggtggagcagaacagcgagccctgtgccggcagcagcagcgagagtgacctgcagacagtgttcaagaatgaaagcctgaatgctgagagcaagagcggctgcaagctgcaggagctgaaggccaagcagctgatcaagaaggacacagccacctactggcccctgaactggaggagcaagctgtgcacctgccaggactgcatgaagatgtatggagacctggatgtgctcttcctgacagatgaatatgacacagtgctggcctatgagaacaagggcaagatcgcccaggccacagacagaagtgaccccctgatggacaccctgagctccatgaacagagtgcagcaggtggagctgatctgtgagtacaatgacctgaagacagagctgaaggactacctgaagagatttgctgatgagggcaccgtggtgaagcgggaggacatccagcagttctttgaggagttccagagcaagaagagaagaagagtggatggcatgcagtactactgcagctag

SEQ ID NO: 175142 - DNA, 1050 bp, synthetic construct
  misc_feature 1..1050: note = Description of Artificial Sequence: Synthetic coding sequence
  source 1..1050: mol_type = other DNA
atgaggcgggccctgtcctgggccgccgccacccccaggtctgcccccaccctgaggaacttccgctgtgactgtggcaacagcaagttcaagaacctggagtgcaagctgctgcctgacaaggccaaggtgaacagcggcaacaagtacaatgacaacttcttcggcctgtactgcatctgcaagaggccctacccagaccctgaagatgagatcccagatgagatgatccagtgtgtggtgtgtgaggactggttccacggccgccacctgggcgccatccccccagagagcggggacttccaggagatggtgtgccaggcctgcatgaagcgctgcagcttcctgtgggcctatgctgcccagctggccgtgaccaagatcagcacagaagatgatggcctggtgagaaatattgatggcatcggggaccaggaggtgatcaagccagaaaatggagagcaccaggacagcaccctgaaggaggatgtgcctgagcagggcaaggatgatgtgcgggaggtgaaggtggagcagaacagcgagccctgtgccggcagcagcagcgagagtgacctgcagacagtgttcaagaatgaaagcctgaatgctgagagcaagagcggctgcaagctgcaggagctgaaggccaagcagctgatcaagaaggacacagccacctactggcccctgaactggaggagcaagctgtgcacctgccaggactgcatgaagatgtatggagacctggatgtgctcttcctgacagatgaatatgacacagtgctggcctatgagaacaagggcaagatcgcccaggccacagacagaagtgaccccctgatggacaccctgagctccatgaacagagtgcagcaggtggagctgatctgtgagtacaatgacctgaagacagagctgaaggactacctgaagagatttgctgatgagggcaccgtggtgaagcgggaggacatccagcagttctttgaggagttccagagcaagaagagaagaagagtggatggcatgcagtactactgcagctag

SEQ ID NO: 175143 - DNA, 1083 bp, synthetic construct
  misc_feature 1..1083: note = Description of Artificial Sequence: Synthetic coding sequence
  source 1..1083: mol_type = other DNA
atgaggcgggccctgtcctgggccgccgccacccccaggtctgcccccaccctgaggaacttccgctgtgactgtggcaacagcaagttcaagaacctggagtgcaagctgctgcctgacaaggccaaggtgaacagcggcaacaagtacaatgacaacttcttcggcctgtactgcatctgcaagaggccctacccagaccctgaagatgagatcccagatgagatgatccagtgtgtggtgtgtgaggactggttccacggccgccacctgggcgccatccccccagagagcggggacttccaggagatggtgtgccaggcctgcatgaagcgctgcagcttcctgtgggcctatgctgcccagctggccgtgaccaagatcagcacagaagatgatggcctggtgagaaatattgatggcatcggggaccaggaggtgatcaagccagaaaatggagagcaccaggacagcaccctgaaggaggatgtgcctgagcagggcaaggatgatgtgcgggaggtgaaggtggagcagaacagcgagccctgtgccggcagcagcagcgagagtgacctgcagacagtgttcaagaatgaaagcctgaatgctgagagcaagagcggctgcaagctgcaggagctgaaggccaagcagctgatcaagaaggacacagccacctactggcccctgaactggaggagcaagctgtgcacctgccaggactgcatgaagatgtatggagacctggatgtgctcttcctgacagatgaatatgacacagtgctggcctatgagaacaagggcaagatcgcccaggccacagacagaagtgaccccctgatggacaccctgagctccatgaacagagtgcagcaggtggagctgatctgtgagtacaatgacctgaagacagagctgaaggactacctgaagagatttgctgatgagggcaccgtggtgaagcgggaggacatccagcagttctttgaggagttccagaagaaggagaagaagagcggctgggatgctgtgctgctgcagctggagtggagcatgaagctgagccacagcagccagtag

SEQ ID NO: 175144 - DNA, 2121 bp, synthetic construct
  misc_feature 1..2121: note = Description of Artificial Sequence: Synthetic coding sequence
  source 1..2121: mol_type = other DNA
atggccagccctgctgacagctgcatccagttcaccaggcatgccagtgatgtgctgctgaacctgaaccggctgcggagccgggacatcctgacagatgtggtgattgtggtgtcccgggagcagttccgggcccacaagacagtgctgatggcctgcagcggcctcttctacagcatcttcacagaccagctgaagtgcaacctgagcgtcatcaacctggaccctgagatcaaccctgagggcttctgcatcctgctggacttcatgtacaccagccggctgaacctgcgggagggcaacatcatggctgtgatggccacagccatgtacctgcagatggagcacgtggtggacacctgcaggaagttcatcaaggccagcgaggccgagatggtgtctgccatcaagccaccccgggaggagttcctgaacagcaggatgctgatgccccaggacatcatggcctaccggggccgggaggtggtggagaacaacctgcccctgcggagcgcccctggctgtgagagccgggcctttgcccccagcctgtacagcggcctgagcaccccaccagccagctacagcatgtacagccacctgcctgtgagcagcctgctcttcagtgatgaggagttcagagatgtgaggatgcctgtggccaaccccttccccaaggagcgggccctgccctgtgacagcgcccggcctgtgcctggagagtacagccggcccaccctggaggtgagccccaacgtgtgccacagcaacatctacagccccaaggagaccatccctgaggaggcccggagtgacatgcactacagcgtggccgagggcctgaagccagctgcccccagcgccagaaatgccccctacttcccctgtgacaaggccagcaaggaggaggagcggcccagcagtgaagatgagatcgccctgcactttgagcccccaaatgcccccctgaacaggaagggcctggtgagcccccagagcccccagaagagtgactgccagcccaacagccccacagagagctgcagcagcaagaatgcctgcatcctgcaggccagcggcagccccccagccaagagccccacagaccccaaggcctgcaactggaagaagtacaagttcatcgtgctgaacagcctgaaccagaatgccaagccagagggccctgagcaggccgagctgggccgcctgagcccccgggcctacacagcccccccagcctgccagccccccatggagcctgagaacctggacctgcagagccccaccaagctgagcgccagcggggaggacagcaccatcccccaggccagccggctgaacaacatcgtgaacagatccatgacaggcagccccaggagcagcagcgagagccacagccccctgtacatgcacccccccaagtgcaccagctgtggcagccagagcccccagcacgccgagatgtgcctgcacacagctggccccaccttccctgaggagatgggagagacccagagcgagtacagcgacagcagctgtgaaaatggagccttcttctgcaatgaatgtgactgccgcttcagcgaggaggccagcctgaagaggcacaccctgcagacccacagcgacaagccctacaagtgtgaccgctgccaggccagcttccgctacaagggcaacctggccagccacaagacagtgcacactggagagaagccctaccgctgcaacatctgtggggcccagttcaacagacctgccaacctgaagacccacacccgcatccacagcggggagaagccctacaagtgtgagacctgtggggccaggtttgtgcaggtggcccacctgcgggcccacgtgctgatccacactggagagaagccctacccctgtgagatctgtggcacccgcttccgccacctgcagaccctgaagagccacctgcgcatccacactggagagaagccctaccactgtgagaagtgcaacctgcacttccgccacaagagccagctgcggctgcacctgcggcagaagcatggagccatcaccaacaccaaggtgcagtacagagtgtctgccacagacctgcccccagagctgcccaaggcctgctag

SEQ ID NO: 175145 - DNA, 2619 bp, synthetic construct
  misc_feature 1..2619: note = Description of Artificial Sequence: Synthetic coding sequence
  source 1..2619: mol_type = other DNA
atgaggtctgtgtgccacaggtctggagagccccagagtgatgacatcgaggccagcaggatgaagagagctgctgccaagcacctgattgaaagatactaccaccagctgacagagggctgtggaaatgaggcctgcaccaatgagttctgtgccagctgccccaccttcctgaggatggacaacaatgctgctgccatcaaggccctggagctgtacaagatcaatgccaagctgtgtgacccccaccccagcaagaagggggccagcagcgcctacctggagaacagcaagggggcccccaacaacagctgcagcgagatcaagatgaacaagaagggggccagaattgacttcaaggatgtgacctacctgacagaggagaaggtgtatgagatcctggagctgtgccgggagcgggaggactacagccccctcatccgggtcatcggccgggtcttcagcagcgctgaggccctggtgcagagcttcaggaaggtgaagcagcacaccaaggaggagctgaagagcctgcaggccaaggatgaggacaaggatgaagatgagaaggagaaggccgcctgcagcgctgctgccatggaggaggacagcgaggccagcagcagcagaattggagacagcagccagggcgacaacaacctgcagaagctgggcccagatgatgtgtctgtggacattgatgccatcagaagagtgtacacccggctgctgagcaatgagaagattgaaacagccttcctgaatgccctggtgtacctgagccccaacgtggagtgtgacctgacctaccacaacgtgtacagccgggaccccaactacctgaacctcttcatcatcgtgatggagaacagaaacctgcacagccctgagtacctggagatggccctgcccctcttctgcaaggccatgagcaagctgcccctggccgcccagggcaagctgatccggctgtggagcaagtacaatgctgaccagatccggaggatgatggagaccttccagcagctgatcacctacaaggtgatcagcaatgagttcaacagcaggaacctggtgaatgatgatgatgccatcgtggccgccagcaagtgcctgaagatggtgtactatgccaacgtggtgggcggggaggtggacaccaaccacaatgaggaggatgatgaggagcccatccctgagagcagcgagctgaccctgcaggagctgctgggggaggagaggaggaacaagaagggcccccgggtggaccccctggagacagagctgggcgtgaagaccctggactgcaggaagcccctcatcccctttgaggagttcatcaatgagcccctgaatgaggtgctggagatggacaaggactacaccttcttcaaggtggagacagagaacaagttctccttcatgacctgccccttcatcctgaatgctgtgaccaagaacctgggcctgtactatgacaaccgcatccgcatgtacagcgagcggcgcatcaccgtgctgtacagcctggtgcagggccagcagctgaacccctacctgcggctgaaggtgagaagagaccacatcattgatgatgccctggtgcggctggagatgattgccatggagaacccagctgacctgaagaagcagctgtatgtggagtttgaaggagagcagggcgtggatgaaggaggagtgtccaaggagttcttccagctggtggtggaggagatcttcaacccagacatcggcatgttcacctatgatgagagcaccaagctgttctggttcaaccccagcagctttgaaacagagggccagttcaccctcatcggcatcgtgctgggcctggccatctacaacaactgcatcctggatgtgcacttccccatggtggtgtacaggaagctgatgggcaagaagggcaccttccgggacctgggggacagccaccctgtgctgtaccagagcctgaaggacctgctggagtatgagggcaatgtggaggatgacatgatgatcaccttccagatcagccagacagacctgtttggaaaccccatgatgtatgacctgaaggaaaatggagacaagatccccatcaccaatgaaaataggaaggagtttgtgaacctgtacagcgactacatcctgaacaagtctgtggagaagcagttcaaggccttcagaagaggcttccacatggtgaccaatgaaagccccctgaagtacctgttccggcctgaggagattgagctgctgatctgtggcagcaggaacctggacttccaggccctggaggagaccacagaatatgatggcggctacacccgggacagcgtgctgatccgggagttctgggagatcgtgcacagcttcacagatgagcagaagaggctcttcctgcagttcaccactggaacagaccgggcccctgtgggcggcctgggcaagctgaagatgatcatcgccaagaatggaccagacacagagcggctgcccaccagccacacctgcttcaacgtgctgctgctgcctgagtacagcagcaaggagaagctgaaggagcggctgctgaaggccatcacctacgccaagggcttcggcatgctgtag

SEQ ID NO: 175146 - DNA, 2628 bp, synthetic construct
  misc_feature 1..2628: note = Description of Artificial Sequence: Synthetic coding sequence
  source 1..2628: mol_type = other DNA
atggagaagctgcaccagtgctactggaagtctggagagccccagagtgatgacatcgaggccagcaggatgaagagagctgctgccaagcacctgattgagcgctactaccaccagctgacagagggctgtggaaatgaggcctgcaccaatgagttctgtgccagctgccccaccttcctgaggatggacaacaatgctgctgccatcaaggccctggagctgtacaagatcaatgccaagctgtgtgacccccaccccagcaagaagggggccagcagcgcctacctggagaacagcaaaggagcccccaacaacagctgcagcgagatcaagatgaacaagaagggggccagaattgacttcaaggatgtgacctacctgacagaggagaaggtgtatgagatcctggagctgtgccgggagcgggaggactacagccccctcatccgggtgattggccgggtcttcagcagcgctgaggccctggtgcagagcttcaggaaggtgaagcagcacaccaaggaggagctgaagagcctgcaggccaaggatgaggacaaggatgaagatgagaaggagaaggccgcctgcagcgctgctgccatggaggaggacagcgaggccagcagcagccgcatcggggacagcagccagggcgacaacaacctgcagaagctgggcccagatgatgtgtctgtggacattgatgccatccggcgggtgtacacccggctgctgagcaatgagaagattgaaacagccttcctgaatgccctggtgtacctgagccccaacgtggagtgtgacctgacctaccacaacgtgtacagccgggaccccaactacctgaacctcttcatcatcgtgatggagaacagaaacctgcacagccctgagtacctggagatggccctgcccctcttctgcaaggccatgagcaagctgcccctggccgcccagggcaagctgatccggctgtggagcaagtacaatgctgaccagatccggaggatgatggagaccttccagcagctgatcacctacaaggtgatcagcaatgagttcaacagcaggaacctggtgaatgatgatgatgccatcgtggccgccagcaagtgcctgaagatggtgtactatgccaacgtggtgggcggggaggtggacaccaaccacaatgaagaagatgatgaggagcccatccctgagagcagcgagctgaccctgcaggagctgctgggggaggagaggaggaacaagaagggcccccgggtggaccccctggagacagagctgggcgtgaagaccctggactgcaggaagcccctcatcccctttgaggagttcatcaatgagcccctgaatgaggtgctggagatggacaaggactacaccttcttcaaggtggagacagagaacaagttctccttcatgacctgccccttcatcctgaatgctgtgaccaagaacctgggcctgtactatgacaaccgcatccgcatgtacagcgagcggcgcatcaccgtgctgtacagcctggtgcagggccagcagctgaacccctacctgcggctgaaggtgcggcgggaccacatcattgatgatgccctggtgcggctggagatgattgccatggagaacccagctgacctgaagaagcagctgtatgtggagtttgaaggagagcagggcgtggatgagggcggcgtgtccaaggagttcttccagctggtggtggaggagatcttcaacccagacatcggcatgttcacctatgatgagagcaccaagctgttctggttcaaccccagcagctttgaaacagagggccagttcaccctgattggaattgtgctgggcctggccatctacaacaactgcatcctggatgtgcacttccccatggtggtgtacaggaagctgatgggcaagaagggcaccttccgggacctgggggacagccaccctgtgctgtaccagagcctgaaggacctgctggagtatgagggcaatgtggaggatgacatgatgatcaccttccagatcagccagacagacctgtttggaaaccccatgatgtatgacctgaaggaaaatggagacaagatccccatcaccaatgaaaataggaaggagtttgtgaacctgtacagcgactacatcctgaacaagtctgtggagaagcagttcaaggccttccggcggggcttccacatggtgaccaatgaaagccccctgaagtacctgttccggcctgaggagattgagctgctgatctgtggcagcaggaacctggacttccaggccctggaggagaccacagaatatgatggcggctacacccgggacagcgtgctgatccgggagttctgggagatcgtgcacagcttcacagatgagcagaagaggctcttcctgcagttcaccaccggcacagaccgggcccctgtgggcggcctgggcaagctgaagatgatcatcgccaagaatggaccagacacagagcggctgcccaccagccacacctgcttcaacgtgctgctgctgcctgagtacagcagcaaggagaagctgaaggagcggctgctgaaggccatcacctacgccaagggcttcggcatgctgtag

SEQ ID NO: 175147 - DNA, 2559 bp, synthetic construct
  misc_feature 1..2559: note = Description of Artificial Sequence: Synthetic coding sequence
  source 1..2559: mol_type = other DNA
atgaagagagctgctgccaagcacctgattgaaagatactaccaccagctgacagagggctgtggaaatgaggcctgcaccaatgagttctgtgccagctgccccaccttcctgaggatggacaacaatgctgctgccatcaaggccctggagctgtacaagatcaatgccaagctgtgtgacccccaccccagcaagaagggggccagcagcgcctacctggagaacagcaagggggcccccaacaacagctgcagcgagatcaagatgaacaagaagggggccagaattgacttcaaggatgtgacctacctgacagaggagaaggtgtatgagatcctggagctgtgccgggagcgggaggactacagccccctcatccgggtcatcggccgggtcttcagcagcgctgaggccctggtgcagagcttcaggaaggtgaagcagcacaccaaggaggagctgaagagcctgcaggccaaggatgaggacaaggatgaagatgagaaggagaaggccgcctgcagcgctgctgccatggaggaggacagcgaggccagcagcagcagaattggagacagcagccagggcgacaacaacctgcagaagctgggcccagatgatgtgtctgtggacattgatgccatcagaagagtgtacacccggctgctgagcaatgagaagattgaaacagccttcctgaatgccctggtgtacctgagccccaacgtggagtgtgacctgacctaccacaacgtgtacagccgggaccccaactacctgaacctcttcatcatcgtgatggagaacagaaacctgcacagccctgagtacctggagatggccctgcccctcttctgcaaggccatgagcaagctgcccctggccgcccagggcaagctgatccggctgtggagcaagtacaatgctgaccagatccggaggatgatggagaccttccagcagctgatcacctacaaggtgatcagcaatgagttcaacagcaggaacctggtgaatgatgatgatgccatcgtggccgccagcaagtgcctgaagatggtgtactatgccaacgtggtgggcggggaggtggacaccaaccacaatgaggaggatgatgaggagcccatccctgagagcagcgagctgaccctgcaggagctgctgggggaggagaggaggaacaagaagggcccccgggtggaccccctggagacagagctgggcgtgaagaccctggactgcaggaagcccctcatcccctttgaggagttcatcaatgagcccctgaatgaggtgctggagatggacaaggactacaccttcttcaaggtggagacagagaacaagttctccttcatgacctgccccttcatcctgaatgctgtgaccaagaacctgggcctgtactatgacaaccgcatccgcatgtacagcgagcggcgcatcaccgtgctgtacagcctggtgcagggccagcagctgaacccctacctgcggctgaaggtgagaagagaccacatcattgatgatgccctggtgcggctggagatgattgccatggagaacccagctgacctgaagaagcagctgtatgtggagtttgaaggagagcagggcgtggatgaaggaggagtgtccaaggagttcttccagctggtggtggaggagatcttcaacccagacatcggcatgttcacctatgatgagagcaccaagctgttctggttcaaccccagcagctttgaaacagagggccagttcaccctcatcggcatcgtgctgggcctggccatctacaacaactgcatcctggatgtgcacttccccatggtggtgtacaggaagctgatgggcaagaagggcaccttccgggacctgggggacagccaccctgtgctgtaccagagcctgaaggacctgctggagtatgagggcaatgtggaggatgacatgatgatcaccttccagatcagccagacagacctgtttggaaaccccatgatgtatgacctgaaggaaaatggagacaagatccccatcaccaatgaaaataggaaggagtttgtgaacctgtacagcgactacatcctgaacaagtctgtggagaagcagttcaaggccttcagaagaggcttccacatggtgaccaatgaaagccccctgaagtacctgttccggcctgaggagattgagctgctgatctgtggcagcaggaacctggacttccaggccctggaggagaccacagaatatgatggcggctacacccgggacagcgtgctgatccgggagttctgggagatcgtgcacagcttcacagatgagcagaagaggctcttcctgcagttcaccactggaacagaccgggcccctgtgggcggcctgggcaagctgaagatgatcatcgccaagaatggaccagacacagagcggctgcccaccagccacacctgcttcaacgtgctgctgctgcctgagtacagcagcaaggagaagctgaaggagcggctgctgaaggccatcacctacgccaagggcttcggcatgctgtag

SEQ ID NO: 175148 - DNA, 2559 bp, synthetic construct; identical to SEQ ID NO: 175147
  misc_feature 1..2559: note = Description of Artificial Sequence: Synthetic coding sequence
  source 1..2559: mol_type = other DNA

SEQ ID NO: 175149 - DNA, 3252 bp, synthetic construct
  misc_feature 1..3252: note = Description of Artificial Sequence: Synthetic coding sequence
  source 1..3252: mol_type = other DNA
atgttctcctttgaaggagacttcaagacccggcccaaggtgtccctgggcggggccagcaggaaggaggagaaggccagcctgctgcacaggacccaggaggagaggaggaagcgggaggaggagcggcggcggctgaagaatgccatcatcatccagagcttcatccggggctacagagacaggaagcagcagtacagcatccagaggtctgcctttgacagatgtgccaccctgagccagagcggcggggccttccccatcgccaacggccccaacctgaccctgctggtgcggcagctgctcttcttctacaagcagaatgaagacagcaagaggctcatctggctgtaccagaacctgatcaagcacagcagcctgtttgtgaagcagctggatggcagcgagcggctgacctgcctcttccagatcaagaggctgatgagcctgtgctgccgcctgctgcagaactgcaatgatgacagcctgaatgtggccctgcccatgaggatgctggaggtgttcagcagcgagaacacctacctgcctgtgctgcaggatgccagctatgtggtgtctgtgattgagcagatcctgcactacatgatccacaacggctactaccgcagcctgtacctgctgatcaacagcaagctgcccagcagcattgagtacagcgacctgagccgggtgcccatcgccaagatcctgctggagaatgtgctgaagcccctgcacttcacctacaacagctgcccagagggcgcccggcagcaggtgttcaccgccttcacagaggagttcctggccgcccccttcacagaccagatcttccacttcatcatcccagccctggctgatgcccagaccgtcttcccctatgagcccttcctgaatgccctgctgctgattgagagccgctgcagcaggaagagcggcggggccccctggctgttctactttgtgctgactgtgggggagaactacctgggcgccctgtctgaggagggcctgctggtgtacctgcgggtgctgcagaccttcctgagccagctgcctgtgtccccagccagcgccagctgccacgacagcgccagtgacagcgaggaggagagcgaggaggccgacaagcccagcagcccagaagatggccgcctgtctgtgtcctacatcacagaggagtgcctgaagaagctggacaccaagcagcagaccaacaccctgctgaacctggtgtggagggacagcgccagcgaggaggtgttcaccaccatggcctctgtgtgccacaccctgatggtgcagcacaggatgatggtgcccaaggtgcggctgctgtacagcctggccttcaatgcccgcttcctgcggcacctgtggttcctgatcagctccatgagcaccaggatgatcaccggctccatggtgcccctgctgcaggtgatcagccggggcagccccatgagctttgaggacagcagccgcatcatccccctcttctacctgttcagcagcctcttcagccacagcctcatcagcatccatgacaatgagttcttcggggaccccatcgaggtggtgggccagaggcagagctccatgatgcccttcaccctggaggagctgatcatgctgagccgctgcctgagagatgcctgcctgggcatcatcaagctggcctacccagagaccaagccagaggtgcgggaggagtacatcacagccttccagagcattggagtgaccaccagcagcgagatgcagcagtgcatccagatggagcagaagcgctggatccagctgttcaaggtgatcaccaacctggtgaagatgctgaagagccgggacaccaggaggaacttctgcccccccaaccactggctgtctgagcaggaggacatcaaggctgacaaggtgacccagctgtatgtgcctgccagcagacatgtgtggaggttccggaggatgggcagaattggccccctgcagagcaccctggatgtgggcctggagagcccccccctgtctgtgtctgaggagcggcagctggccgtgctgacagagctgccctttgtggtgccctttgaggagcgggtgaagatcttccagaggctcatctatgctgacaagcaggaggtgcagggagatggccccttcctggatggcatcaacgtgaccatcagaagaaactacatctatgaagatgcctatgacaagctgagcccagaaaatgaaccagacctgaagaagaggatccgggtgcacctgctgaatgcccacggcctggatgaagctggcattgatggcggcggcatcttccgggagttcctgaatgagctgctgaagagcggcttcaaccccaaccagggcttcttcaagaccaccaatgaaggcctgctgtaccccaacccagctgcccagatgctggtgggggacagctttgcccggcactactacttcctgggccgcatgctgggcaaggccctgtatgagaacatgctggtggagctgccctttgctggcttcttcctgagcaagctgctgggcaccagcgcagatgtggacatccaccacctggccagcctggaccctgaggtgtacaagaacctgctcttcctgaagagctatgaagatgatgtggaggagctgggcctgaacttcaccgtggtgaacaatgacctgggggaggcccaggtggtggagctgaagtttggaggcaaggacatccctgtgaccagcgccaacagaattgcctacatccacctggtggccgactaccgcctgaaccggcagatccggcagcactgcctggccttccggcagggcctggccaacgtggtgtccctggagtggctgaggatgtttgaccagcaggagatccaggtgctgatcagcggggcccaggtgcccatcagcctggaggacctgaagagcttcaccaactacagcggcggctacagcgctgaccaccctgtgatcaaggtgttctggagggtggtggagggcttcacagatgaggagaagaggaagctgctgaagtttgtgaccagctgcagcaggcctcccctgctgggcttcaaggagctgtacccagccttctgcatccacaatggaggcagtgacctggagcggctgcccacagccagcacctgcatgaacctgctgaagctgcctgagttctatgatgagaccctgctgcggagcaagctgctgtatgccattgaatgtgccgccggctttgagctgtcctag

SEQ ID NO: 175150 - DNA, 1215 bp, synthetic construct
  misc_feature 1..1215: note = Description of Artificial Sequence: Synthetic coding sequence
  source 1..1215: mol_type = other DNA
atgttctcctttgaaggagacttcaagacccggcccaaggtgtccctgggcggggccagcaggaagtacagcatccagaggtctgcctttgacagatgtgccaccctgagccagagcggcggggccttccccatcgccaacggccccaacctgaccctgctggtgcggcagctgctcttcttctacaagcagaatgaagacagcaagaggctcatctggctgtaccagaacctgatcaagcacagcagcctgtttgtgaagcagctggatggcagcgagcggctgacctgcctcttccagatcaagaggctgatgagcctgtgctgccgcctgctgcagaactgcaatgatgacagcctgaatgtggccctgcccatgaggatgctggaggtgttcagcagcgagaacacctacctgcctgtgctgcaggatgccagctatgtggtgtctgtcatcgagcagatcctgcactacatgatccacaacggctactaccgcagcctgtacctgctgatcaacagcaagctgcccagcagcattgagtacagcgacctgagccgggtgcccatcgccaagatcctgctggagaatgtgctgaagcccctgcacttcacctacaacagctgcccagagggcgcccggcagcaggtgttcaccgccttcacagaggagttcctggccgcccccttcacagaccagatcttccacttcatcatcccagccctggctgatgcccagacagtgttcccctatgagcccttcctgaatgccctgctgctgattgagagccgctgcagcaggaagtctggaggagccccctggctgttctactttgtgctgactgtgggggagaactacctgggcgccctgtctgaggagggcctgctggtgtacctgcgggtgctgcagaccttcctgagccagctgcctgtgtccccagccagcgccagctgccatgattctgccagtgacagcgaggaggagagcgaggaggccgacaagcccagcagcccagaagatggccgcctgtctgtgtcctacatcacagaagaatgtctgaagaagctggacaccaagcagcagaccaacaccctgctgaacctggtgtggagggacagcgccagcgaggaggtgttcaccaccatggcctctgtgtgccacaccctgatggtgcagcacaggatgatggtgcccaaggtgcgggtgtacaagtag

SEQ ID NO: 175151 - DNA, 192 bp, synthetic construct
  misc_feature 1..192: note = Description of Artificial Sequence: Synthetic coding sequence
  source 1..192: mol_type = other DNA
atggccgcccccctgtctgtggaggtggagtttggcagcagccctggctgcctcttcctgtggagcagctttgctgaggtggtgcgcagcagctgcctgactgtgctgagaaatattgagagcctgtgcctggacagaagaaatcctggcaccagcggcacctgcagcagcggcagccgccgcatctgctag

SEQ ID NO: 175152 - DNA, 192 bp, synthetic construct
  misc_feature 1..192: note = Description of Artificial Sequence: Synthetic coding sequence
  source 1..192: mol_type = other DNA
atggccgcccccctgtctgtggaggtggagtttggaggcggcgctgagctgctgtttgatggcatcaagaagcaccgggtgaccctgcccggccaggaggagccctgggacatccggaacctgctgatctggatcaagaagaacctgctgaaggagaggcctgagctgttcatccagggcgacagcgtgtag

SEQ ID NO: 175153 - DNA, 306 bp, synthetic construct
  misc_feature 1..306: note = Description of Artificial Sequence: Synthetic coding sequence
  source 1..306: mol_type = other DNA
atggccgcccccctgtctgtggaggtggagtttggaggcggcgctgagctgctgtttgatggcatcaagaagcaccgggtgaccctgcccggccaggaggagccctgggacatccggaacctgctgatctggatcaagaagaacctgctgaaggagaggcctgagctgttcatccagggcgacagcgtgcggcccggcatcctggtgctgatcaatgatgctgactgggagctgctgggggagctggactaccagctgcaggaccaggacagcgtgctcttcatcagcaccctgcatggaggatag

SEQ ID NO: 175154 - DNA, 441 bp, synthetic construct
  misc_feature 1..441: note = Description of Artificial Sequence: Synthetic coding sequence
  source 1..441: mol_type = other DNA
atggccgcccccctgtctgtggaggtggagtttggaggcggcgctgagctgctgtttgatggcatcaagaagcaccgggtgaccctgcccggccaggaggagccctgggacatccggaacctgctgatctggatcaagaagaacctgctgaaggagaggcctgagctgttcatccagggcgacagcgtgcggcccggcatcctggtgctgatcaatgatgctgactgggagctgctggtgtccaccctgggggacatccccccaccagccccagccctggccgcctctgtgggcaagcgctgggccagcccccaggcccacatcgagtggctgggcaaccccccaccccacagcagccccaccctgcggctgctggagagccccaccccaggagaggagggcatgggctcctggggccacggcagcaccccacccagctag

SEQ ID NO: 175155 - DNA, 2358 bp, synthetic construct
  misc_feature 1..2358: note = Description of Artificial Sequence: Synthetic coding sequence
  source 1..2358: mol_type = other DNA
atgcctggggtcatccccagcgagagcaatggcctgagccggggcagccccagcaagaagaaccggctgagcctgaagttcttccagaagaaggagaccaagagggccctggacttcacagacagccaggagaatgaggagaaggccagcgagtaccgggccagcgagattgaccaggtggtgcctgctgcccagagcagccccatcaactgtgagaagcgggagaacctgctgccctttgtgggcctgaacaacctgggcaacacctgctacctgaacagcatcctgcaggtgctgtacttctgccccggcttcaagtctggagtgaagcacctgttcaacatcatcagcaggaagaaggaggccctgaaggatgaggccaaccagaaggacaagggcaactgcaaggaggacagcctggccagctatgagctgatctgcagcctgcagagcctcatcatctctgtggagcagctgcaggccagcttcctgctgaaccctgagaagtacacagatgagctggccacccagccccggcggctgctgaacaccctgcgggagctgaaccccatgtatgagggctacctgcagcatgatgcccaggaggtgctgcagtgcatcctgggcaacatccaggagacctgccagctgctgaagaaggaggaggtgaagaatgtggccgagctgcccaccaaggtggaggagatcccccaccccaaggaggagatgaatggcatcaacagcattgagatggacagcatgaggcacagcgaggacttcaaggagaagctgcccaagggaaatggcaagaggaagagtgacacagaatttggaaacatgaagaagaaggtgaagctgagcaaggagcaccagagcctggaggagaaccagaggcagaccaggagcaagaggaaggccaccagtgacaccctggagagcccccccaagatcatccccaagtacatcagtgaaaatgaaagcccccggcccagccagaagaagagccgggtgaagatcaactggctgaagagcgccaccaagcagcccagcatcctgagcaagttctgcagcctgggcaagatcaccaccaaccagggcgtgaagggccagagcaaagaaaatgaatgtgaccctgaggaggacctgggcaaatgtgagagtgacaacaccaccaacggctgcggcctggagagccctggcaacacagtgacccctgtgaatgtgaatgaggtgaagcccatcaacaagggggaggagcagattggatttgagctggtggagaagctgttccagggccagctggtgctgcggacccgctgcctggagtgtgagagcctgacagaaagaagagaggacttccaggacatctctgtgcctgtgcaggaggatgagctgagcaaggtggaggagagcagcgagatcagccctgagcccaagacagagatgaagaccctgcgctgggccatcagccagtttgcctctgtggagcgcatcgtgggggaggacaagtacttctgtgagaactgccaccactacacagaagctgagaggagcctgctgtttgacaagatgcctgaggtgatcaccatccacctgaagtgctttgctgccagcggcctggagtttgactgctatggaggcggcctgagcaagatcaacacccccctgctgacccccctgaagctgagcctggaggagtggagcaccaagcccaccaatgacagctatggcctgtttgctgtggtgatgcacagcggcatcaccatcagcagcggccactacacagcctctgtgaaggtgacagacctgaacagcctggagctggacaagggcaactttgtggtggaccagatgtgtgaaattggcaagccagagcccctgaatgaggaggaggcccggggcgtggtggagaactacaatgatgaggaggtgtccatccgggtgggcggcaacacccagcccagcaaggtgctgaacaagaagaatgtggaggccatcggcctgctgggcggccagaagagcaaggctgactatgagctgtacaacaaggccagcaacccagacaaggtggccagcacagcctttgctgaaaatagaaattctgagaccagtgacaccaccggcacccatgaaagtgacaggaacaaggagagcagtgaccagacaggcatcaacatcagcggctttgagaacaagatctcctatgtggtgcagagcctgaaggagtatgagggcaagtggctgctgtttgatgattctgaggtgaaggtgacagaggagaaggacttcctgaacagcctgagccccagcaccagccccaccagcaccccctacctgctcttctacaagaagctgtag

SEQ ID NO: 175156 - DNA, 2358 bp, synthetic construct; identical to SEQ ID NO: 175155
  misc_feature 1..2358: note = Description of Artificial Sequence: Synthetic coding sequence
  source 1..2358: mol_type = other DNA

SEQ ID NO: 175157 - DNA, 264 bp, synthetic construct
  misc_feature 1..264: note = Description of Artificial Sequence: Synthetic coding sequence
  source 1..264: mol_type = other DNA
atgcctggggtcatccccagcgagagcaatggcctgagccggggcagccccagcaagaagaaccggctgagcctgaagttcttccagaagaaggagaccaagagggccctggacttcacagacagccaggagaatgaggagaaggccagcgagtaccgggccagcgagattgaccaggtggtgcctgctgcccagagcagccccatcaactgtgagaagcgggagaacctgctgccctttgtgggcctgaacaacctgggctag

SEQ ID NO: 175158 - DNA, 561 bp, synthetic construct
  misc_feature 1..561: note = Description of Artificial Sequence: Synthetic coding sequence
  source 1..561: mol_type = other DNA
atgcctggggtcatccccagcgagagcaatggcctgagccggggcagccccagcaagaagaaccggctgagcctgaagttcttccagaagaaggagaccaagagggccctggacttcacagacagccaggagaatgaggagaaggccagcgagtaccgggccagcgagattgaccaggtggtgcctgctgcccagagcagccccatcaactgtgagaagcgggagaacctgctgccctttgtgggcctgaacaacctgggcaacacctgctacctgaacagcatcctgcaggtgctgtacttctgccccggcttcaagtctggagtgaagcacctgttcaacatcatcagcaggaagaaggaggccctgaaggatgaggccaaccagaaggacaagggcaactgcaaggaggacagcctggccagctatgagctgatctgcagcctgcagagcctcatcatctctgtggagcagctgcaggccagcttcctgctgaaccctgagaagtacacagatgagctggccacccagccccggcggctgctgaacaccctgaggtag

SEQ ID NO: 175159 - DNA, 663 bp, synthetic construct
  misc_feature 1..663: note = Description of Artificial Sequence: Synthetic coding sequence
  source 1..663: mol_type = other DNA
atgcccctgactggagtgggccctggcagctgccggcggcagatcatccgggccctgtgcctgctgctgctgctgctgcacgccggcagcgccaagaacatctggaagagggccctgcctgcccggctggccgagaagagcagagctgaggaggccggggcccctgggggcccccggcagcccagggctgaccgctgccccccaccacccaggaccctgcccccaggggcctgccaggccgcccgctgccaggccgacagcgagtgccccaggcaccggcgctgctgctacaacggctgtgcctatgcctgcctggaggccgtgcccccacctcctgtgctggactggctggtgcagcccaagccccgctggctgggcggcaatggctggctgctggatggccctgaggaggtgctgcaggccgaggcctgcagcaccacagaagatggagctgagcccctgctgtgccccagcggctatgagtgccacatcctgagccctggagatgtggccgagggcatccccaacagaggccagtgtgtgaagcagaggcggcaggctgatggccgcatcctgcggcacaagctgtacaaggagtacccagagggggacagcaagaatgtggccgagcccggccggggccagcagaagcacttccagtag

SEQ ID NO: 175160 - DNA, 687 bp, synthetic construct
  misc_feature 1..687: note = Description of Artificial Sequence: Synthetic coding sequence
  source 1..687: mol_type = other DNA
atgtaccacctgatgaagttcatccccctgtacagcaaggtgcagaggccctgcaccagcacccccatgattgacagctttgtgcggctgatgaatgagttcaccaacatgcctgtgccccccaagccccggcaggccctgggggacaagatcgtgcgggacatccggcctggagctgcctttgagcccacctacatctaccgcctgctgactgtgaacaagagcagcctgtctgagaagggccggcaggaggatgctgaggagtacctgggcttcatcctgaatggcctgcacgaggagatgctgaacctgaagaagctgctgagccccagcaatgagaagctgaccatcagcaatggccccaagaaccacagcgtgaatgaggaggagcaggaggagcagggcgagggctctgaagatgagtgggagcaggtgggccccaggaacaagacctctgtgacccggcaggccgactttgtgcagacccccatcaccggcttctggtggacccaccaggtgtgtggcctgcctgctgagttcaagaggatctgccactttgctgccatcttccacgtggccgtgggctaccctgtgcggcaggacacccacagccctggctgcaccggggagctgggcggcaagaggatctgcccccggctgtaccacaagaaccagacccggggctag

SEQ ID NO: 175161 - DNA, 189 bp, synthetic construct
  misc_feature 1..189: note = Description of Artificial Sequence: Synthetic coding sequence
  source 1..189: mol_type = other DNA
atggccctgcacagcccccagtacatctttggagacttctccccagatgagttcaaccagttctttgtgacccccaggagctctgtggaggacaagaacatccgggagctgagcctggtgtccatgaagagcctgaaccctgtgaccctgtgccgggagcccccagccaccgtcttccaggcccactag

SEQ ID NO: 175162 - DNA, 2472 bp, synthetic construct
  misc_feature 1..2472: note = Description of Artificial Sequence: Synthetic coding sequence
  source 1..2472: mol_type = other DNA
atgaagaggcacaggcctgtgagcagcagtgacagcagtgatgagagccccagcaccagcttcaccagcggctccatgtaccgcatcaagagcaagatccccaatgagcacaagaagccagctgaggtgttcaggaaggacctgatcagcgccatgaagctgcctgacagccaccacatcaacccagacagctactacctgtttgctgacacctggaaggaggagtgggagaagggcgtgcaggtgcctgccagcccagacacagtgccccagcccagcctgcgcatcatcgccgagaaggtgaaggatgtgctcttcatccggcccaggaagtacatccactgcagcagcccagacaccacagagcccggctacatcaacatcatggagctggccgcctctgtgtgccgctatgacctggatgacatggacatcttctggctgcaggagctgaatgaagacctggccgagatgggctgcggccctgtggatgagaacctgatggagaagacagtggaggtgctggagcggcactgccacgagaacatgaaccacgccattgaaacagaggagggcctgggcattgaatatgatgaagatgtgatctgtgatgtgtgccgcagcccagattctgaggagggcaatgacatggtgttctgtgacaagtgcaatgtgtgtgtgcaccaggcctgctacggcatcctgaaggtgcctgagggctcctggctgtgccgcagctgtgtgctgggcatctacccccagtgtgtgctgtgccccaagaagggcggggccctgaagaccaccaagacaggcaccaagtgggcccacgtgtcctgtgccctgtggatccctgaggtgtccatcgcctgcccagagaggatggagcccatcaccaagatcagccacatcccccccagccgctgggccctggtgtgcaacctgtgcaagctgaagacaggagcctgcatccagtgcagcatcaagagctgcatcacagccttccacgtgacctgtgcctttgagcacggcctggagatgaagaccatcctggatgaaggagatgaggtgaagttcaagagctactgcctgaagcacagccagaaccggcagaagctgggggaggccgagtacccccaccaccgggccaaggagcagagccaggccaagtctgagaagaccagcctgcgggcccagaagctgcgggagctggaggaggagttctacagcctggtgcgggtggaggatgtggccgctgagctgggcatgcccaccctggccgtggacttcatctacaactactggaagctgaagaggaagagcaacttcaacaagcccctcttcccccccaaggaggatgaggagaatggcctggtgcagcccaaggaggagagcatccacaccaggatgaggatgttcatgcacctgcggcaggacctggagcgggtgaggaacctgtgctacatgatcagcagaagagagaagctgaagctgagccacaacaagatccaggagcagatcttcggcctgcaggtgcagctgctgaaccaggagattgatgctggcctgcccctgaccaatgccctggagaacagcctcttctaccccccaccccgcatcaccctgaagctgaagatgcccaagagcaccccagaggaccacaggaacagcagcacagaaacagaccagcagccccacagcccagacagcagcagctctgtgcacagcatccggaacatgcaggtgccccaggagagcctggagatgaggaccaagagctacccccgctaccccctggagagcaagaacaaccggctgctggccagcctgagccacagccgctctgaggccaaggagagcagccctgcctggaggacccccagcagcgagtgctaccacggccagagcctgggcaagcccctggtgctgcaggccgccctgcacggccagagcagcattggaaatggcaagagccagcccaacagcaagtttgccaagagcaatggcctggagggctcctggagcggaaatgtgacccagaaggacagcagcagcgagatgttctgtgaccaggagcccgtcttcagcccccacctggtgtcccagggcagcttcaggaagagcacagtggagcacttcagccgctccttcaaggagaccaccaaccgctgggtgaagaacacagaggacctgcagtgctacgtgaagcccaccaagaacatgagccccaaggagcagttctggggccggcaggtgctgcggcgctctgctggccgggccccctaccaggagaatgatggctactgcccagacctggagctgagtgacagcgaggccgagagtgatggcaacaaggagaaggtgcgggtgaggaaggacagcagtgacagagaaaatcctcctcatgacagccggcgggactgccacggcaagagcaagacccaccccctgagccacagctccatgcagaggtag

SEQ ID NO: 175163 - DNA, 2763 bp, synthetic construct
  misc_feature 1..2763: note = Description of Artificial Sequence: Synthetic coding sequence
  source 1..2763: mol_type = other DNA
atggccaccgtggccgccaacccagctgctgctgctgctgctgtggccgctgctgctgctgtgacagaagatcgggagccccagcacgaggagctgcccggcctggacagccagtggaggcagattgaaaatggagagagcggccgggagcggcccctgcgggccggggagagctggttcctggtggagaagcactggtacaagcagtgggaggcctacgtgcagggcggggaccaggacagcagcaccttccctggctgcatcaacaatgccaccctcttccaggatgagatcaactggaggctgaaggagggcctggtggagggggaggactatgtgctgctgcctgctgctgcctggcactacctggtgtcctggtacggcctggagcacggccagccccccatcgagaggaaggtgattgagctgcccaacatccagaaggtggaggtgtaccctgtggagctgctgctggtgcgccacaatgacctgggcaagagccacacagtgcagttcagccacacagacagcatcggcctggtgctgaggacagcccgggagcgcttcctggtggagccccaggaggacacccggctgtgggccaagaacagcgagggcagcctggaccggctgtatgacacccacatcaccgtgctggatgctgccctggagaccggccagctgatcatcatggagaccaggaagaaggatggcacctggcccagcgcccagctgcacgtgatgaacaacaacatgtctgaagaagatgaggacttcaagggccagcccggcatctgtggcctgaccaacctgggcaacacctgcttcatgaacagcgccctgcagtgcctgagcaatgtgccccagctgacagagtacttcctgaacaactgctacctggaggagctgaacttcaggaaccccctgggcatgaagggggagattgctgaggcctatgctgacctggtgaagcaggcctggagcggccaccacaggagcatcgtgccccacgtgttcaagaacaaggtgggccactttgccagccagttcctgggctaccagcagcacgacagccaggagctgctgtccttcctgctggatggcctgcacgaggacctgaacagagtgaagaagaaggagtatgtggagctgtgtgatgctgctggccgcccagaccaggaggtggcccaggaggcctggcagaaccacaagagaagaaatgattctgtgattgtggacaccttccacggcctcttcaagagcaccctggtgtgcccagactgtggaaatgtgtctgtgacctttgaccccttctgctacctgtctgtgcccctgcccatcagccacaagagggtgctggaggtgttcttcatccccatggaccccaggaggaagccagagcagcaccggctggtggtgcccaagaagggcaagatcagtgacctgtgtgtggccctgagcaagcacacaggcatcagccctgagaggatgatggtggctgatgtgttcagccaccgcttctacaagctgtaccagctggaggagcccctgagcagcatcctggacagagatgacatctttgtgtatgaggtgtctggaagaattgaggccatcgagggcagcagagaagatattgtggtgcctgtgtacctgcgggagaggaccccagcccgggactacaacaacagctactacggcctgatgctgtttggccaccccctgctggtgtctgtgccccgggaccgcttcacctgggagggcctgtacaacgtgctgatgtaccgcctgagccgctacgtgaccaagcccaacagtgatgatgaagatgatggagatgagaaggaggatgatgaggaggacaaggatgatgtgcccggccccagcactggaggcagcctgcgggaccctgagcctgagcaggccggccccagcagtggagtgaccaaccgctgccccttcctgctggacaactgcctgggcaccagccagtggcccccaagaagaagaaggaagcagctgttcaccctgcagacagtgaacagcaatggcaccagtgacaggaccaccagccctgaggaggtgcacgcccagccctacatcgccatcgactgggagcctgagatgaagaagcgctactatgatgaggtggaggccgagggctacgtgaagcatgactgtgtgggctacgtgatgaagaaggcccctgtgcggctgcaggagtgcatcgagctgttcaccaccgtggagaccctggagaaggagaacccctggtactgccccagctgcaagcagcaccagctggccaccaagaagctggacctgtggatgctgcctgagatcctgatcatccacctgaagcgcttctcctacaccaagttcagccgggagaagctggacaccctggtggagttccccatccgggacctggacttcagcgagtttgtgatccagccccagaatgaaagcaaccctgagctgtacaagtatgacctgattgctgtgagcaaccactacggcggcatgagagatggccactacaccacctttgcctgcaacaaggacagcggccagtggcactactttgatgacaacagcgtgtcccctgtgaatgaaaaccagatcgagagcaaggccgcctacgtgctcttctaccagaggcaggatgtggcccggcggctgctgagccctgctggcagcagcggggccccagccagccctgcctgcagcagcccccccagcagcgagttcatggatgtgaactag

SEQ ID NO: 175164 - DNA, 1113 bp, synthetic construct
  misc_feature 1..1113: note = Description of Artificial Sequence: Synthetic coding sequence
  source 1..1113: mol_type = other DNA
atggagatcctgatgacagtgtccaagtttgccagcatctgcaccatgggcgccaatgccagcgccctggagaaggagatcggccctgagcagtttcctgtgaatgagcactacttcggcctggtgaactttggaaacacctgctactgcaacagcgtgctgcaggccctgtacttctgccggcccttccgggagaaggtgctggcctacaagagccagcccaggaagaaggagagcctgctgacctgcctggccgacctcttccacagcatcgccacccagaagaagaaggtgggcgtcatcccccccaagaagttcatcacccggctgaggaaagaaaatgagctgtttgacaactacatgcagcaggatgcccacgagttcctgaactacctgctgaacaccatcgctgacatcctgcaggaggagaggaagcaggagaagcagaatggccgcctgcccaatggaaacatcgacaatgaaaacaacaacagcaccccagaccccacctgggtgcatgagatcttccagggcaccctgaccaatgagacccgctgcctgacctgtgagaccatcagcagcaaggatgaggacttcctggacctgtctgtggatgtggagcagaacaccagcatcacccactgcctgcggggcttcagcaacacagagaccctgtgcagcgagtacaagtactactgtgaagaatgtcgcagcaagcaggaggcccacaagaggatgaaggtgaagaagctgcccatgatcctggccctgcacctgaagcgcttcaagtacatggaccagctgcaccgctacaccaagctgagctacagagtggtgttccccctggagctgcggctcttcaacaccagcggagatgccaccaacccagacaggatgtatgacctggtggccgtggtggtgcactgcggcagcggccccaacagaggccactacatcgccatcgtgaagagccatgacttctggctgctgtttgatgatgacatcgtggagaagattgatgcccaggccatcgaggagttctacggcctgaccagtgacatcagcaagaacagcgagagcggctacatcctcttctaccagagccgggactag

SEQ ID NO: 175165 - DNA, 2592 bp, synthetic construct
  misc_feature 1..2592: note = Description of Artificial Sequence: Synthetic coding sequence
  source 1..2592: mol_type = other DNA
atgcagaggagaggagccctgtttggcatgcctgggggcagcggcggcaggaagatggctgctggggacatcggggagctgctggtgccccacatgcccaccatccgggtgcccaggtctggggacagagtgtacaagaatgaatgtgccttctcctatgacagccccaacagcgagggcggcctgtatgtgtgcatgaacaccttcctggccttcggccgggagcacgtggagcggcacttcaggaagacaggccagagcgtgtacatgcacctgaagagacatgtgcgggagaaggtgcggggggccagcggcggggccctgcccaagagaagaaacagcaagatcttcctggacctggacacagatgatgacctgaacagtgatgattatgaatatgaagatgaggccaagctggtgatcttcccagaccactatgagatcgccctgcccaacatcgaggagctgcctgccctggtgaccatcgcctgtgatgctgtgctgagcagcaagagcccctacaggaagcaggaccctgacacctgggagaatgagctgcctgtgtccaaatatgccaacaacctgacccagctggacaacggggtgcgcatccccccatctggctggaagtgtgcccgctgtgacctgcgggagaacctgtggctgaacctgacagatggctctgtgctgtgtgggaagtggttctttgacagcagcggcggcaatggccacgccctggagcactacagagacatgggctaccccctggccgtgaagctgggcaccatcaccccagatggagcagatgtgtacagcttccaggaggaggagcctgtgctggacccccacctggccaagcacctggcccactttggaattgacatgctgcacatgcatggaacagaaaatggcctgcaggacaatgacatcaagctgcgggtgtctgagtgggaggtgatccaggagagcggcaccaagctgaagcccatgtatggccctggctacacaggcctgaagaacctgggcaacagctgctacctgagctctgtgatgcaggccatcttcagcatccctgagttccagagggcctacgtgggcaacctgccccgcatctttgactacagccccctggaccccacccaggacttcaacacccagatgaccaagctgggccacggcctgctgagcggccagtacagcaagccccctgtgaagtctgagctgattgagcaggtgatgaaggaggagcacaagccccagcagaatggcatcagccccaggatgttcaaggcctttgtgtccaagagccaccctgagttcagcagcaaccggcagcaggatgcccaggagttcttcctgcacctggtgaacctggtggagaggaaccgcatcggcagcgagaaccccagtgatgtgttccgcttcctggtggaggagcgcatccagtgctgccagaccaggaaggtgcgctacacagagcgggtggactacctgatgcagctgcctgtggccatggaggccgccaccaacaaggatgagctgattgcctatgagctgacccggcgggaggccgaggccaacagaagacccctgcctgagctggtgcgggccaagatccccttcagcgcctgcctgcaggccttcagcgagccagaaaatgtggatgacttctggagcagcgccctgcaggccaagtctgctggggtgaagaccagcagatttgccagcttccctgagtacctggtggtgcagatcaagaagttcaccttcggcctggactgggtgcccaagaagtttgatgtgtccattgacatgccagacctgctggacatcaaccacctgcgggcccggggcctgcagcctggagaggaggagctgcctgacatcagcccccccatcgtcatcccagatgacagcaaggaccggctgatgaaccagctgattgaccccagcgacattgatgagagctctgtgatgcagctggccgagatgggcttccccctggaggcctgcaggaaggctgtgtacttcaccggcaacatgggcgctgaggtggccttcaactggatcatcgtgcacatggaggagccagactttgctgagcccctgaccatgcctggctacggcggggccgccagcgctggggcctctgtgtttggagccagcggcctggacaaccagcccccagaggagatcgtggccatcatcacctccatgggcttccagaggaaccaggccatccaggccctgcgggccaccaacaacaacctggagcgggccctggactggatcttcagccaccctgagtttgaggaggacagcgactttgtgattgagatggagaacaatgccaatgccaacatcatcagcgaggccaagccagagggcccccgggtgaaggatggcagcggcacctatgagctgtttgccttcatcagccacatgggcaccagcaccatgagcggccactacatctgccacatcaagaaggagggccgctgggtgatctacaatgaccacaaggtgtgtgccagcgagcggccccccaaggacctgggctacatgtacttctaccgccgcatccccagctag

SEQ ID NO: 175166 - DNA, 1485 bp, synthetic construct
  misc_feature 1..1485: note = Description of Artificial Sequence: Synthetic coding sequence
  source 1..1485: mol_type = other DNA
atgcccctgtacagcgtgacagtgaagtggggcaaggagaagtttgaaggagtggagctgaacacagatgagccccccatggtgttcaaggcccagctgtttgccctgactggagtgcagcctgcccggcagaaggtgatggtgaagggcggcaccctgaaggatgatgactggggcaacatcaagatcaagaatggcatgaccctgctgatgatgggcagcgcagatgccctgcctgaggagcccagcgccaagacagtgtttgtggaggacatgacagaggagcagctggccagcgccatggagctgccctgtggcctgaccaacctgggcaacacctgctacatgaatgccaccgtgcagtgcatccgctctgtgcctgagctgaaggatgccctgaagagatatgctggggccctgcgggccagcggggagatggccagcgcccagtacatcacagctgccctgcgggacctgtttgacagcatggacaagaccagcagcagcatcccccccatcatcctgctgcagttcctgcacatggccttcccccagtttgctgagaagggggagcagggccagtacctgcagcaggatgccaatgaatgctggatccagatgatgagggtgctgcagcagaagctggaggccattgaagatgacagcgtgaaggagacagacagcagcagcgccagcgctgccacccccagcaagaagaagagcctgattgaccagttctttggagtggagtttgagaccaccatgaagtgcacagagagcgaggaggaggaggtgaccaagggcaaggagaaccagctgcagctgagctgcttcatcaaccaggaggtgaagtacctgttcaccggcctgaagctgcggctgcaggaggagatcaccaagcagagccccaccctgcagagaaatgccctgtacatcaagagcagcaagatcagccggctgcctgcctacctgaccatccagatggtgcgcttcttctacaaggagaaggagagcgtgaatgccaaggtgctgaaggatgtgaagttccccctgatgctggacatgtatgagctgtgcaccccagagctgcaggagaagatggtgtccttccgcagcaagttcaaggacctggaggacaagaaggtgaaccagcagcccaacaccagtgacaagaagagcagcccccagaaggaggtgaagtatgagcccttctcctttgctgatgacatcggcagcaacaactgtggctactatgacctgcaggccgtgctgacccaccagggccgcagcagcagcagcggccactacgtgtcctgggtgaagaggaagcaggatgagtggatcaagtttgatgatgacaaggtgtccatcgtgaccccagaggacatcctgcggctgagcggcggcggggactggcacatcgcctacgtgctgctgtatggccccaggagagtggagatcatggaggaggagagcgagcagtag

SEQ ID NO: 175167 - DNA, 1380 bp, synthetic construct
  misc_feature 1..1380: note = Description of Artificial Sequence: Synthetic coding sequence
  source 1..1380: mol_type = other DNA
atgcccctgtacagcgtgacagtgaagtggggcaaggagaagtttgaaggagtggagctgaacacagatgagccccccatggtgttcaaggcccagctgtttgccctgactggagtgcagcctgcccggcagaaggtgatggtgaagggcggcaccctgaaggatgatgactggggcaacatcaagatcaagaacatggagctgccctgtggcctgaccaacctgggcaacacctgctacatgaatgccaccgtgcagtgcatccgctctgtgcctgagctgaaggatgccctgaagagatatgctggggccctgcgggccagcggggagatggccagcgcccagtacatcacagctgccctgcgggacctgtttgacagcatggacaagaccagcagcagcatcccccccatcatcctgctgcagttcctgcacatggccttcccccagtttgctgagaagggggagcagggccagtacctgcagcaggatgccaatgaatgctggatccagatgatgagggtgctgcagcagaagctggaggccattgaagatgattctgtgaaggagacagacagcagcagcgccagcgctgccacccccagcaagaagaagagcctgattgaccagttcttcggcgtggagtttgagaccaccatgaagtgcacagaaagtgaggaggaggaggtgaccaagggcaaggagaaccagctgcagctgagctgcttcatcaaccaggaggtgaagtacctgttcaccggcctgaagctgcggctgcaggaggagatcaccaagcagagccccaccctgcagagaaatgccctgtacatcaagagcagcaagatcagccggctgcctgcctacctgaccatccagatggtgcgcttcttctacaaggagaaggagagcgtgaatgccaaggtgctgaaggatgtgaagttccccctgatgctggacatgtatgagctgtgcaccccagagctgcaggagaagatggtgtccttccgcagcaagttcaaggacctggaggacaagaaggtgaaccagcagcccaacaccagtgacaagaagagcagcccccagaaggaggtgaagtatgagcccttctcctttgctgatgacatcggcagcaacaactgtggctactatgacctgcaggccgtgctgacccaccagggccgcagcagcagcagcggccactacgtgtcctgggtgaagaggaagcaggatgagtggatcaagtttgatgatgacaaggtgtccatcgtgaccccagaggacatcctgcggctgagcggcggcggggactggcacatcgcctacgtgctgctgtatggcccccggcgggtggagatcatggaggaggagagcgagcagtag

SEQ ID NO: 175168 - DNA, 1452 bp, synthetic construct
  misc_feature 1..1452: note = Description of Artificial Sequence: Synthetic coding sequence
  source 1..1452: mol_type = other DNA
atgcccctgtacagcgtgacagtgaagtggggcaaggagaagtttgaaggagtggagctgaacacagatgagccccccatggtgttcaaggcccagctgtttgccctgactggagtgcagcctgcccggcagaaggtgatggtgaagggcggcaccctgaagggcatgaccctgctgatgatgggcagcgcagatgccctgcctgaggagcccagcgccaagacagtgtttgtggaggacatgacagaggagcagctggccagcgccatggagctgccctgtggcctgaccaacctgggcaacacctgctacatgaatgccaccgtgcagtgcatccgctctgtgcctgagctgaaggatgccctgaagagatatgctggggccctgcgggccagcggggagatggccagcgcccagtacatcacagctgccctgcgggacctgtttgacagcatggacaagaccagcagcagcatcccccccatcatcctgctgcagttcctgcacatggccttcccccagtttgctgagaagggggagcagggccagtacctgcagcaggatgccaatgaatgctggatccagatgatgagggtgctgcagcagaagctggaggccattgaagatgattctgtgaaggagacagacagcagcagcgccagcgctgccacccccagcaagaagaagagcctgattgaccagttcttcggcgtggagtttgagaccaccatgaagtgcacagaaagtgaggaggaggaggtgaccaagggcaaggagaaccagctgcagctgagctgcttcatcaaccaggaggtgaagtacctgttcaccggcctgaagctgcggctgcaggaggagatcaccaagcagagccccaccctgcagagaaatgccctgtacatcaagagcagcaagatcagccggctgcctgcctacctgaccatccagatggtgcgcttcttctacaaggagaaggagagcgtgaatgccaaggtgctgaaggatgtgaagttccccctgatgctggacatgtatgagctgtgcaccccagagctgcaggagaagatggtgtccttccgcagcaagttcaaggacctggaggacaagaaggtgaaccagcagcccaacaccagtgacaagaagagcagcccccagaaggaggtgaagtatgagcccttctcctttgctgatgacatcggcagcaacaactgtggctactatgacctgcaggccgtgctgacccaccagggccgcagcagcagcagcggccactacgtgtcctgggtgaagaggaagcaggatgagtggatcaagtttgatgatgacaaggtgtccatcgtgaccccagaggacatcctgcggctgagcggcggcggggactggcacatcgcctacgtgctgctgtatggcccccggcgggtggagatcatggaggaggagagcgagcagtag

SEQ ID NO: 175169 - DNA, 1380 bp, synthetic construct; identical to SEQ ID NO: 175167
  misc_feature 1..1380: note = Description of Artificial Sequence: Synthetic coding sequence
  source 1..1380: mol_type = other DNA

SEQ ID NO: 175170 - DNA, 2382 bp, synthetic construct
  misc_feature 1..2382: note = Description of Artificial Sequence: Synthetic coding sequence
  source 1..2382: mol_type = other DNA
atgcctgctggccctgtgcaggccgtgcccccacctcctcctgtgcccacagagcccaagcagcccacagaggaggaggccagcagcaaagaagattctgcccccagcaagcctgtggtgggcatcatctacccacctcctgaggtgaggaacatcgtggacaagacagccagctttgtggccagaaatggacctgagtttgaggcccgcatccggcagaatgagatcaacaaccccaagttcaacttcctgaaccccaatgacccctaccacgcctactaccgccacaaggtgtctgagttcaaggagggcaaggcccaggagcccagcgctgccatccccaaggtgatgcagcagcagcagcagaccacccagcagcagctgccccagaaggtgcaggcccaggtgatccaggagaccatcgtgcccaaggagcccccacctgagtttgagttcatcgctgacccccccagcatcagcgcctttgacctggatgtggtgaagctgacagcccagtttgtggccagaaatggccggcagttcctgacccagctgatgcagaaggagcagaggaactaccagtttgacttcctgcggccccagcacagcctcttcaactacttcaccaagctggtggagcagtacaccaagatcctgatcccccccaagggcctcttcagcaagctgaagaaggaggccgagaacccccgggaggtgctggaccaggtgtgctacagagtggagtgggccaagttccaggagcgggagaggaagaaggaggaggaggagaaggagaaggagcgggtggcctatgcccagattgactggcatgactttgtggtggtggagaccgtggacttccagcccaatgagcagggcaacttccccccacccaccaccccagaggagctgggcgcccgcatcctgatccaggagagatatgagaagtttggagagagcgaggaggtggagatggaggtggagagtgatgaggaggatgacaagcaggagaaggccgaggagccccccagccagctggaccaggacacccaggtgcaggacatggatgagggcagtgatgatgaggaggagggccagaaggtgcccccacctcctgagacccccatgcccccacccctgccccccaccccagaccaggtgattgtgaggaaggactatgaccccaaggccagcaagcccctgcccccagccccagccccagatgagtacctggtgagccccatcaccggggagaagatcccagccagcaagatgcaggagcacatgagaattggcctgctggacccccgctggctggagcagagggacaggagcatccgggagaagcagagtgatgatgaggtgtatgcccctggcctggacatcgagagcagcctgaagcagctggccgagaggagaacagacatctttggagtggaggagacagccatcggcaagaagatcggggaggaggagatccagaagccagaggagaaggtgacctgggatggccacagcggctccatggcccggacccagcaggccgcccaggccaacatcaccctgcaggagcagatcgaggccatccacaaggccaagggcctggtgcctgaagatgacaccaaggagaagattggccccagcaagcccaatgagatcccccagcagcccccaccacccagcagcgccaccaacatccccagcagcgccccacccatcacctctgtgcccaggcctcccaccatgcctcctcctgtgaggaccaccgtggtgtctgctgtgcctgtgatgccccggccccccatggcctctgtggtgcggctgcccccaggcagcgtcatcgcccccatgccacccatcatccacgccccccgcatcaacgtggtgcccatgccacccagcgccccacccatcatggccccccggcccccacccatgattgtgcccacagcctttgtgcctgcccctcctgtggcccctgtgcctgccccagcccccatgcctcctgtgcaccccccaccacccatggaggatgagcccaccagcaagaagctgaagacagaggacagcctgatgcctgaggaggagttcctgcggaggaacaagggccctgtgtccatcaaggtgcaggtgcccaacatgcaggacaagacagagtggaagctgaatggccaggtgctggtgttcaccctgcccctgacagaccaggtgtctgtcatcaaggtgaagatccacgaggccaccggcatgcctgctgggaagcagaagctgcagtatgagggcatcttcatcaaggacagcaacagcctggcctactacaacatggccaatggagctgtgatccacctggccctgaaggagcggggcggcaggaagaagtag

SEQ ID NO: 175171 - DNA, 732 bp, synthetic construct
  misc_feature 1..732: note = Description of Artificial Sequence: Synthetic coding sequence
  source 1..732: mol_type = other DNA
accatccgggtgaaggacagcctcatctgtgtggactgtgccatggagagcagcaggaacagctccatgctgaccctgcccctgagcctgtttgatgtggacagcaagcccctgaagaccctggaggatgccctgcactgcttcttccagccccgggagctgagcagcaagagcaagtgcttctgtgagaactgtgggaagaagacccggggcaagcaggtgctgaagctgacccacctgccccagaccctgaccatccacctgatgaggttcagcatccggaacagccagaccaggaagatctgccacagcctgtacttcccccagagcctggacttcagccagatcctgcccatgaagcgggagagctgtgatgctgaggagcagagcggcggccagtatgagctgtttgctgtgattgcccacgtgggcatggctgacagcggccactactgtgtgtacatcagaaatgctgtggatggcaagtggttctgcttcaatgacagcaacatctgcctggtgtcctgggaggacatccagtgcacctacggcaaccccaactaccactggccacccttcctgtgccacgcctgcatcctgattgaagatggagagtacctgcggctcttccggcctgccaacatccggcagttcaccagccgggaggagacctgggtggagtgctggtgtgtgctgaccctgcagtgcaagcagctgcagcaggtgtggtag

SEQ ID NO: 175172 - DNA, 1698 bp, synthetic construct
  misc_feature 1..1698: note = Description of Artificial Sequence: Synthetic coding sequence
  source 1..1698: mol_type = other DNA
atgccccaggccagcgagcaccggctgggccgcacccgggagccccctgtgaacatccagccccgggtgggcagcaagctgccctttgccccccgggcccggagcaaggagaggagaaatcctgccagcggccccaaccccatgctgcggcccctgcccccccggcccggcctgcctgatgagcggctgaagaagctggagctgggccggggccgcaccagcggcccccggccccggggccccctgcgggctgaccacggcgtgcccctgcccggcagccccccacccaccgtggccctgcccctgcccagcaggaccaacctggcccggagcaagtctgtgagcagcggggacctgcggcccatgggcatcgccctgggcggccaccggggcaccggggagctgggcgccgccctgagccggctggccctgcggcctgagccccccaccctgcggcgcagcaccagcctgcggcggctgggcggcttccctggcccccccaccctcttcagcatcagaacagagcccccagccagccacggcagcttccacatgatcagcgcccggagcagcgagcccttctacagtgatgacaagatggcccaccacaccctgctgctgggcagcggccacgtgggcctgaggaacctgggcaacacctgcttcctgaatgctgtgctgcagtgcctgagcagcacccggcccctgcgggacttctgcctgcggcgggacttccggcaggaggtgcctgggggcggccgggcccaggagctgacagaggcctttgctgatgtgattggagccctgtggcacccagacagctgtgaggccgtgaaccccacccgcttccgggctgtgttccagaagtatgtgcccagcttcagcggctacagccagcaggatgcccaggagttcctgaagctgctgatggagcggctgcacctggagatcaacagaagaggccggcgggccccacccatcctggccaacggccctgtgcccagccccccccggcggggcggggccctgctggaggagcctgagctgagtgatgatgaccgggccaacctgatgtggaagcgctacctggagcgggaggacagcaagatcgtggacctgtttgtgggccagctgaagagctgcctgaagtgccaggcctgtggctaccgcagcaccacctttgaggtgttctgtgacctgagcctgcccatccccaagaagggctttgctgggggcaaggtgtccctgcgggactgcttcaacctcttcaccaaggaggaggagctggagagtgaaaatgcccctgtgtgtgaccgctgccggcagaagaccaggagcaccaagaagctgactgtgcagcgcttcccccgcatcctggtgctgcacctgaaccgcttcagcgccagccggggcagcatcaagaagagctctgtgggcgtggacttccccctgcagaggctgagcctgggggactttgccagtgacaaggccggcagccctgtgtaccagctgtatgccctgtgcaaccacagcggctctgtgcactacggccactacacagccctgtgccgctgccagacaggctggcacgtgtacaatgacagccgggtgtcccctgtgtctgagaaccaggtggccagcagcgagggctacgtgctcttctaccagctgatgcaggagcccccacgctgcctgtag

SEQ ID NO: 175173 - DNA, 1656 bp, synthetic construct
  misc_feature 1..1656: note = Description of Artificial Sequence: Synthetic coding sequence
  source 1..1656: mol_type = other DNA
atgccccaggccagcgagcaccggctgggccgcacccgggagccccctgtgaacatccagccccgggtgggcagcaagctgccctttgccccccgggcccggagcaaggagaggagaaatcctgccagcggccccaaccccatgctgcggcccctgcccccccggcccggcctgcctgatgagcggctgaagaagctggagctgggccggggccgcaccagcggcccccggccccggggccccctgcgggctgaccacggcgtgcccctgcccggcagccccccacccaccgtggccctgcccctgcccagcaggaccaacctggcccggagcaagtctgtgagcagcggggacctgcggcccatgggcatcgccctgggcggccaccggggcaccggggagctgggcgccgccctgagccggctggccctgcggcctgagccccccaccctgcggcgcagcaccagcctgcggcggctgggcggcttccctggcccccccaccctcttcagcatcagaacagagcccccagccagccacggcagcttccacatgatcagcgcccggagcagcgagcccttctacagtgatgacaagatggcccaccacaccctgctgctgggcagcggccacgtgggcctgaggaacctgggcaacacctgcttcctgaatgctgtgctgcagtgcctgagcagcacccggcccctgcgggacttctgcctgcggcgggacttccggcaggaggtgcctgggggcggccgggcccaggagctgacagaggcctttgctgatgtgattggagccctgtggcacccagacagctgtgaggccgtgaaccccacccgcttccgggctgtgttccagaagtatgtgcccagcttcagcggctacagccagcaggatgcccaggagttcctgaagctgctgatggagcggctgcacctggagatcaacagaagaggccggcgggccccacccatcctggccaacggccctgtgcccagccccccccggcggggcggggccctgctggaggagcctgagctgagtgatgatgaccgggccaacctgatgtggaagcgctacctggagcgggaggacagcaagatcgtggacctgtttgtgggccagctgaagagctgcctgaagtgccaggcctgtggctaccgcagcaccacctttgaggtgttctgtgacctgagcctgcccatccccaagaagggctttgctgggggcaaggtgtccctgcgggactgcttcaacctcttcaccaaggaggaggagctggagagtgaaaatgcccctgtgtgtgaccgctgccggcagaagaccaggagcaccaagaagctgactgtgcagcgcttcccccgcatcctggtgctgcacctgaaccgcttcagcgccagccggggcagcatcaagaagagctctgtgggcgtggacttccccctgcagaggctgagcctgggggactttgccagtgacaaggccggctctgtgcactacggccactacacagccctgtgccgctgccagacaggctggcacgtgtacaatgacagccgggtgtcccctgtgtctgagaaccaggtggccagcagcgagggctacgtgctcttctaccagctgatgcaggagcccccacgctgcctgtag

SEQ ID NO: 175174 - DNA, 1698 bp, synthetic construct; identical to SEQ ID NO: 175172
  misc_feature 1..1698: note = Description of Artificial Sequence: Synthetic coding sequence
  source 1..1698: mol_type = other DNA

SEQ ID NO: 175175 - DNA, 1578 bp, synthetic construct
  misc_feature 1..1578: note = Description of Artificial Sequence: Synthetic coding sequence
  source 1..1578: mol_type = other DNA
atggtgtccaggcctgagcctgagggggaggccatggatgctgagctggccgtggcccctcctggctgcagccacctgggcagcttcaaggtggacaactggaagcagaacctgcgggccatctaccagtgctttgtgtggagcggcacagctgaggccaggaagaggaaggccaagagctgcatctgccacgtgtgtggggtgcacctgaaccggctgcacagctgcctgtactgtgtgttcttcggctgcttcaccaagaagcacatccatgaacatgccaaggccaagaggcacaacctggccatcgacctgatgtatggaggcatctactgcttcctgtgccaggactacatctatgacaaggacatggagatcatcgccaaggaggagcagaggaaggcctggaagatgcagggcgtgggggagaagttcagcacctgggagcccaccaagcgggagctggagctgctgaagcacaaccccaagaggaggaagatcaccagcaactgcaccatcggcctgcggggcctcatcaacctgggcaacacctgcttcatgaactgcatcgtgcaggccctgacccacacccccctgctgcgggacttcttcctgagtgacagacaccgctgtgagatgcagagccccagcagctgcctggtgtgtgagatgagcagcctcttccaggagttctacagcggccacaggagcccccacatcccctacaagctgctgcacctggtgtggacccacgcccggcacctggccggctatgagcagcaggatgcccacgagttcctgattgctgccctggatgtgctgcaccgccactgcaagggagatgacaatggcaagaaggccaacaaccccaaccactgcaactgcatcatcgaccagatcttcaccggcggcctgcagagtgatgtgacctgccaggtgtgccacggcgtgtccaccaccatcgaccccttctgggacatcagcctggacctgcccggcagcagcacccccttctggcccctgagccctggcagcgagggcaatgtggtgaatggagagagccacgtgtctggcaccaccaccctgacagactgcctgcggcgcttcaccaggcctgagcacctgggcagcagcgccaagatcaagtgcagcggctgccacagctaccaggagagcaccaagcagctgaccatgaagaagctgcccatcgtggcctgcttccacctgaagagatttgagcacagcgccaagctgcggaggaagatcaccacctacgtgtccttccccctggagctggacatgacccccttcatggccagcagcaaggagagcaggatgaatggccagtaccagcagcccacagacagcctgaacaatgacaacaagtacagcctgtttgctgtggtgaaccaccagggcaccctggagagcggccactacaccagcttcatccggcagcacaaggaccagtggttcaagtgtgatgatgccatcatcaccaaggccagcatcaaggatgtgctggacagcgagggctacctgctcttctaccacaagcagttcctggagtatgaatag

SEQ ID NO: 175176 - DNA, 1782 bp, synthetic construct
  misc_feature 1..1782: note = Description of Artificial Sequence: Synthetic coding sequence
  source 1..1782: mol_type = other DNA
gctgctgctgcccggggccgctgcctgccctgcagcctgcccagcgccatcgcccagccccacctgtgcccagccagcgccctgtgcagcagaagacctggcctgggccagcccggccagccccccagcagcccccatgctgccctggccagcagcagcccccccagccccccacctccagcccggggccgggccctgccccccatggtgtccaggcctgagcctgagggggaggccatggatgctgagctggccgtggcccctcctggctgcagccacctgggcagcttcaaggtggacaactggaagcagaacctgcgggccatctaccagtgctttgtgtggagcggcacagctgaggccaggaagaggaaggccaagagctgcatctgccacgtgtgtggggtgcacctgaaccggctgcacagctgcctgtactgtgtgttcttcggctgcttcaccaagaagcacatccatgaacatgccaaggccaagaggcacaacctggccatcgacctgatgtatggaggcatctactgcttcctgtgccaggactacatctatgacaaggacatggagatcatcgccaaggaggagcagaggaaggcctggaagatgcagggcgtgggggagaagttcagcacctgggagcccaccaagcgggagctggagctgctgaagcacaaccccaagaggaggaagatcaccagcaactgcaccatcggcctgcggggcctcatcaacctgggcaacacctgcttcatgaactgcatcgtgcaggccctgacccacacccccctgctgcgggacttcttcctgagtgacagacaccgctgtgagatgcagagccccagcagctgcctggtgtgtgagatgagcagcctcttccaggagttctacagcggccacaggagcccccacatcccctacaagctgctgcacctggtgtggacccacgcccggcacctggccggctatgagcagcaggatgcccacgagttcctgattgctgccctggatgtgctgcaccgccactgcaagggagatgacaatggcaagaaggccaacaaccccaaccactgcaactgcatcatcgaccagatcttcaccggcggcctgcagagtgatgtgacctgccaggtgtgccacggcgtgtccaccaccatcgaccccttctgggacatcagcctggacctgcccggcagcagcacccccttctggcccctgagccctggcagcgagggcaatgtggtgaatggagagagccacgtgtctggcaccaccaccctgacagactgcctgcggcgcttcaccaggcctgagcacctgggcagcagcgccaagatcaagtgcagcggctgccacagctaccaggagagcaccaagcagctgaccatgaagaagctgcccatcgtggcctgcttccacctgaagagatttgagcacagcgccaagctgcggaggaagatcaccacctacgtgtccttccccctggagctggacatgacccccttcatggccagcagcaaggagagcaggatgaatggccagtaccagcagcccacagacagcctgaacaatgacaacaagtacagcctgtttgctgtggtgaaccaccagggcaccctggagagcggccactacaccagcttcatccggcagcacaaggaccagtggttcaagtgtgatgatgccatcatcaccaaggccagcatcaaggatgtgctggacagcgagggctacctgctcttctaccacaagcagttcctggagtatgaatag

SEQ ID NO: 175177 - DNA, 1542 bp, synthetic construct
  misc_feature 1..1542: note = Description of Artificial Sequence: Synthetic coding sequence
  source 1..1542: mol_type = other DNA
atggcccctggctggcccagcctgtctgctggcagccggcaggaggccccccagctggccgccggcggcagcgcctaccaggccgtgggccggcagttccagccccgggccacagccctgcagggccccagccaggccaagagctgcatctgccacgtgtgtggggtgcacctgaaccggctgcacagctgcctgtactgtgtgttcttcggctgcttcaccaagaagcacatccatgaacatgccaaggccaagaggcacaacctggccatcgacctgatgtatggaggcatctactgcttcctgtgccaggactacatctatgacaaggacatggagatcatcgccaaggaggagcagaggaaggcctggaagatgcagggcgtgggggagaagttcagcacctgggagcccaccaagcgggagctggagctgctgaagcacaaccccaagaggaggaagatcaccagcaactgcaccatcggcctgcggggcctcatcaacctgggcaacacctgcttcatgaactgcatcgtgcaggccctgacccacacccccctgctgcgggacttcttcctgagtgacagacaccgctgtgagatgcagagccccagcagctgcctggtgtgtgagatgagcagcctcttccaggagttctacagcggccacaggagcccccacatcccctacaagctgctgcacctggtgtggacccacgcccggcacctggccggctatgagcagcaggatgcccacgagttcctgattgctgccctggatgtgctgcaccgccactgcaagggagatgacaatggcaagaaggccaacaaccccaaccactgcaactgcatcatcgaccagatcttcaccggcggcctgcagagtgatgtgacctgccaggtgtgccacggcgtgtccaccaccatcgaccccttctgggacatcagcctggacctgcccggcagcagcacccccttctggcccctgagccctggcagcgagggcaatgtggtgaatggagagagccacgtgtctggcaccaccaccctgacagactgcctgcggcgcttcaccaggcctgagcacctgggcagcagcgccaagatcaagtgcagcggctgccacagctaccaggagagcaccaagcagctgaccatgaagaagctgcccatcgtggcctgcttccacctgaagagatttgagcacagcgccaagctgcggaggaagatcaccacctacgtgtccttccccctggagctggacatgacccccttcatggccagcagcaaggagagcaggatgaatggccagtaccagcagcccacagacagcctgaacaatgacaacaagtacagcctgtttgctgtggtgaaccaccagggcaccctggagagcggccactacaccagcttcatccggcagcacaaggaccagtggttcaagtgtgatgatgccatcatcaccaaggccagcatcaaggatgtgctggacagcgagggctacctgctcttctaccacaagcagttcctggagtatgaatag

SEQ ID NO: 175178 - DNA, 7863 bp, synthetic construct
  misc_feature 1..7863: note = Description of Artificial Sequence: Synthetic coding sequence
  source 1..7863: mol_type = other DNA
atggagagcgaggaggagcagcacatgaccaccctgctgtgcatgggcttcagtgaccctgccaccatcaggaaggccctgcggctggccaagaatgacatcaatgaagctgtggccctgctgaccaatgaaagacctggcctggactatggaggctatgagcccatggacagcggcggcggccccagccctggccctgggggcggccccagaggagatggcggcggagatggcggcggcggcggccccagccggggcggcagcactggaggcggcggcggctttgatcctcctccagcctaccacgaggtggtggatgctgagaagaatgatgaaaatggaaactgcagcggggagggcatcgagttccccaccaccaacctgtatgagctggagagccgggtgctgacagaccactggagcatcccctacaagcgggaggagagcctgggcaagtgcctgctggccagcacctacctggcccggctgggcctgtctgagagtgatgagaactgccgccgcttcatggaccgctgcatgcctgaggccttcaagaagctgctgaccagcagcgctgtgcacaagtggggcacagagatccacgagggcatctacaacatgctgatgctgctgattgagctggtggccgagcgcatcaagcaggaccccatccccaccggcctgctgggcgtgctgaccatggccttcaacccagacaatgagtaccacttcaagaacaggatgaaggtgtcccagaggaactgggccgaggtgtttggagagggcaacatgtttgctgtgtcccctgtgtccaccttccagaaggagccccacggctgggtggtggacctggtgaacaagtttggagagctgggcggctttgctgccatccaggccaagctgcacagcgaggacatcgagctgggcgctgtgtctgccctgatccagcccctgggcgtgtgtgccgagtacctgaacagctctgtggtgcagcccatgctggaccccgtcatcctgaccaccatccaggatgtgcgctctgtggaggagaaggacctgaaggacaagaggctggtgtccatccctgagctgctgtctgctgtgaagctgctgtgcatgaggttccagcctgacctggtgaccatcgtggatgacctgcggctggacatcctgctgaggatgctgaagagcccccacttcagcgccaagatgaacagcctgaaggaggtgaccaagctgattgaggacagcaccctgagcaagtctgtgaagaatgccatcgacacagaccggctgctggactggctggtggagaacagcgtgctgagcatcgccctggagggcaacatcgaccaggcccagtactgtgaccgcatcaagggcatcatcgagctgctgggcagcaagctgagcctggatgagctgaccaagatctggaagatccagagcggccagagcagcacagtgattgagaacatccacaccatcatcgctgctgctgctgtgaagttcaacagcgaccagctgaaccacctgtttgtgctgatccagaagtcctgggagacagaaagtgacagagtgcggcagaagctgctgagcctgattggccgcatcggccgggaggccaggtttgagaccaccagcggcaaggtgctggatgtgctgtgggagctggcccacctgcccaccctgcccagcagcctcatccagcaggccctggaggagcacctgaccatcctgagtgatgcctatgctgtgaaggaggccatcaagaggagctacatcatcaagtgcatcgaggacatcaagaggcctggagagtggagcggcctggagaagaacaagaaggatggcttcaagagcagccagctgaacaacccccagtttgtgtgggtggtgcctgccctgcggcagctgcacgagatcaccaggagcttcatcaagcagacctaccagaagcaggacaagagcatcatccaggacctgaagaagaactttgagatcgtgaagctggtgacaggcagcctgattgcctgccaccggctggccgctgctgtggccggccctgggggcctgagcggcagcaccctggtggatggccgctacacctaccgggagtacctggaggcccacctgaagttcctggccttcttcctgcaggaggccaccctgtacctgggctggaacagagccaaggagatctgggagtgcctggtgacaggccaggatgtgtgtgagctggaccgggagatgtgctttgagtggttcaccaagggccagcacgacctggagagtgatgtgcagcagcagctgttcaaggagaagatcctgaagctggagagctatgagatcaccatgaatggcttcaacctcttcaagaccttctttgaaaatgtgaacctgtgtgaccaccggctgaagaggcagggcgcccagctgtatgtggagaagctggagctgattggcatggacttcatctggaagatcgccatggagagcccagatgaggagatcgccaatgaggccatccagctgatcatcaactacagctacatcaacctgaacccccggctgaagaaggacagcgtgtccctgcacaagaagttcatcgctgactgctacacccggctggaggccgccagcagcgccctgggcggccccaccctgacccatgctgtgacccgggccaccaagatgctgacagccacagccatgcccaccgtggccacctctgtgcagagcccctaccgcagcaccaagctggtgatcatcgagcggctgctgctgctggccgagcgctacgtgatcaccatcgaggacttctacagcgtgcccaggaccatcctgccccatggagccagcttccacggccacctgctgaccctgaatgtgacctatgagagcaccaaggacaccttcaccgtggaggcccacagcaatgagaccatcggctctgtgcgctggaagatcgccaagcagctgtgcagccctgtggacaacatccagatcttcaccaatgacagcctgctgactgtgaacaaggaccagaagctgctgcaccagctgggcttcagtgatgagcagatcctgactgtgaagaccagcggcagcggcaccccatctggcagcagcgctgacagcagcaccagcagcagcagcagcagcagcggggtcttcagcagcagctatgccatggagcaggagaagagcctgcccggggtggtgatggccctggtgtgcaatgtgtttgacatgctgtaccagctggccaacctggaggagccccgcatcaccctgcgggtgaggaagctgctgctgctgatccccacagatcctgccatccaggaggccctggaccagctggacagcctgggcaggaagaagaccctgctgtctgagagcagcagccagagcagcaagagccccagcctgagcagcaagcagcagcaccagcccagcgccagcagcatcctggagagcctcttccgcagctttgcccctggcatgagcaccttccgggtgctgtacaacctggaggtgctgagcagcaagctgatgcccacagcagatgatgacatggcccggagctgtgccaagagcttctgtgagaacttcctgaaggccggcggcctgagcctggtggtgaatgtgatgcagagggacagcatccccagcgaggtggactatgagacccggcagggcgtgtacagcatctgcctgcagctggcccgcttcctgctggtgggccagaccatgcccaccctgctggatgaggacctgaccaaggatggcatcgaggccctgagcagccggcccttcagaaatgtgtcccggcagaccagccggcagatgagcctgtgtggcaccccagagaagagcagctaccggcagctgtctgtgtctgacaggagcagcatccgggtggaggagatcatcccagctgcccgggtggccatccagaccatggaggtgtctgacttcaccagcacagtggcctgcttcatgaggctgtcctgggccgctgctgctggccgcctggacctggtgggcagcagccagcccatcaaggagagcaacagcctgtgcccagctggcatccggaaccggctgagcagcagcggcagcaactgcagcagcggcagcgagggggagcctgtggccctgcacgccggcatctgtgtgcggcagcagagcgtgtccaccaaggacagcctgattgctggggaggccctgagcctgctggtgacctgcctgcagctgcggagccagcagctggccagcttctacaacctgccctgtgtggccgacttcatcatcgacatcctgctgggcagccccagcgctgagatcagaagagtggcctgtgaccagctgtacaccctgagccagacagacaccagcgcccacccagatgtgcagaagcccaaccagttcctgctgggcgtcatcctgacagcccagctgcccctgtggagccccaccagcatcatgagaggagtgaaccagaggctgctgagccagtgcatggagtactttgacctgcgctgccagctgctggatgacctgaccaccagcgagatggagcagctgcgcatcagccctgccaccatgctggaggatgagatcacctggctggacaactttgagcccaacagaacagcagaatgtgagaccagcgaggccgacaacatcctgctggccggccacctgcggctcatcaagaccctgctgagcctgtgtggggctgagaaggagatgctgggcagcagcctcatcaagcccctgctggatgacttcctgttccgggccagccgcatcatcctgaacagccacagccctgctggcagcgctgccatcagccagcaggacttccaccccaagtgcagcacagccaacagccggctggccgcctatgaggtgctggtgatgctggccgacagcagccccagcaacctgcagatcatcatcaaggagctgctgtccatgcaccaccagcctgaccctgccctgaccaaggagtttgactacctgccccctgtggacagccgcagcagcagcggctttgtgggcctgagaaatggaggagccacctgctacatgaatgctgtgttccagcagctgtacatgcagcccggcctgcctgagagcctgctgtctgtggatgatgacacagacaacccagatgacagcgtcttctaccaggtgcagagcctgtttggccacctgatggagagcaagctgcagtactacgtgcctgagaacttctggaagatcttcaagatgtggaacaaggagctgtatgtgcgggagcagcaggatgcctatgagttcttcaccagcctgattgaccagatggatgagtacctgaagaagatgggccgggaccagatcttcaagaacaccttccagggcatctacagcgaccagaagatctgcaaggactgcccccacagatatgagcgggaggaggccttcatggccctgaacctgggcgtgaccagctgccagagcctggagatcagcctggaccagtttgtgcggggggaggtgctggagggcagcaatgcctactactgtgagaagtgcaaggagaagaggatcaccgtgaagaggacctgcatcaagagcctgcccagcgtgctggtgatccacctgatgagatttggatttgactgggagagcggccgcagcatcaagtatgatgagcagatccgcttcccctggatgctgaacatggagccctacacagtgtctggcatggcccggcaggacagcagcagcgaggtgggagaaaatggccgctctgtggaccagggcggcggcggcagccccaggaagaaggtggccctgacagagaactatgagctggtgggcgtcatcgtgcacagcggccaggcccacgccggccactactacagcttcatcaaggaccggcggggctgtgggaagggcaagtggtacaagttcaatgacaccgtcatcgaggagtttgacctgaatgatgagaccctggagtatgaatgttttggaggagagtaccggcccaaggtgtatgaccagaccaacccctacacagatgtgagaagacgctactggaatgcctacatgctgttctaccagagggtgtctgaccagaacagccctgtgctgcccaagaagagccgggtgtctgtggtgcggcaggaggccgaggacctgagcctgagcgcccccagcagccctgagatcagcccccagagcagcccccggccccaccggcccaacaatgaccggctgagcatcctgaccaagctggtgaagaagggggagaagaagggcctgtttgtggagaagatgcctgcccgcatctaccagatggtgagagatgagaacctgaagttcatgaagaacagagatgtgtacagcagtgactacttctcctttgtgctgagcctggccagcctgaatgccaccaagctgaagcacccctactacccctgcatggccaaggtgtccctgcagctggccatccagttcctgttccagacctacctgcggaccaagaagaagctgcgggtggacacagaggagtggatcgccaccatcgaggccctgctgagcaagagctttgatgcctgccagtggctggtggagtacttcatcagcagcgagggccgggagctgatcaagatcttcctgctggagtgcaatgtgcgggaggtgcgggtggccgtggccaccatcctggagaagaccctggacagcgccctcttctaccaggacaagctgaagagcctgcaccagctgctggaggtgctgctggccctgctggacaaggatgtgcctgagaactgcaagaactgtgcccagtacttcttcctgttcaacacctttgtgcagaagcagggcatccgggccggggacctgctgctgcggcacagcgccctgcggcacatgatctccttcctgctgggcgccagccggcagaacaaccagatccgccgctggagcagcgcccaggcccgggagtttggaaacctgcacaacacagtggccctgctggtgctgcacagtgatgtgagcagccagagaaatgtggcccctggcatcttcaagcagaggcctcccatcagcatcgcccccagcagccccctgctgcccctgcacgaggaggtggaggccctgctcttcatgtctgagggcaagccctacctgctggaggtgatgtttgccctgcgggagctgaccggcagcctgctggccctgattgagatggtggtgtactgctgcttctgcaatgagcacttctccttcaccatgctgcacttcatcaagaaccagctggagacagcccctcctcatgagctgaagaacaccttccagctgctgcacgagatcctggtgattgaggaccccatccaggtggagcgggtgaagtttgtgtttgaaacagaaaatggcctgctggccctgatgcaccacagcaaccacgtggacagcagccgctgctaccagtgtgtgaagttcctggtgaccctggcccagaagtgcccagctgccaaggagtacttcaaggagaacagccaccactggagctgggccgtgcagtggctgcagaagaagatgtctgagcactactggaccccccagagcaatgtgtccaatgagaccagcacaggcaagaccttccagaggaccatcagcgcccaggacaccctggcctatgccacagccctgctgaatgagaaggagcagagcggcagcagcaatggaagtgagagcagccctgccaatgaaaatggagacagacacctgcagcagggcagcgagagccccatgatgattggagagctgcggagtgacctggatgatgtggacccctag

SEQ ID NO: 175179 - DNA, 7383 bp, synthetic construct
  misc_feature 1..7383: note = Description of Artificial Sequence: Synthetic coding sequence
  source 1..7383: mol_type = other DNA
atgaccaccctgctgtgcatgggcttcagtgaccctgccaccatcaggaaggccctgcggctggccaagaatgacatcaatgaagctgtggccctgctgaccaatgaaagacctggcctggactatggaggctatgagcccatggacagcggcggcctgtctgagagtgatgagaactgccgccgcttcatggaccgctgcatgcctgaggccttcaagaagctgctgaccagcagcgctgtgcacaagtggggcacagagatccacgagggcatctacaacatgctgatgctgctgattgagctggtggccgagcgcatcaagcaggaccccatccccaccggcctgctgggcgtgctgaccatggccttcaacccagacaatgagtaccacttcaagaacaggatgaaggtgtcccagaggaactgggccgaggtgtttggagagggcaacatgtttgctgtgtcccctgtgtccaccttccagaaggagccccacggctgggtggtggacctggtgaacaagtttggagagctgggcggctttgctgccatccaggccaagctgcacagcgaggacatcgagctgggcgctgtgtctgccctgatccagcccctgggcgtgtgtgccgagtacctgaacagctctgtggtgcagcccatgctggaccccgtcatcctgaccaccatccaggatgtgcgctctgtggaggagaaggacctgaaggacaagaggctggtgtccatccctgagctgctgtctgctgtgaagctgctgtgcatgaggttccagcctgacctggtgaccatcgtggatgacctgcggctggacatcctgctgaggatgctgaagagcccccacttcagcgccaagatgaacagcctgaaggaggtgaccaagctgattgaggacagcaccctgagcaagtctgtgaagaatgccatcgacacagaccggctgctggactggctggtggagaacagcgtgctgagcatcgccctggagggcaacatcgaccaggcccagtactgtgaccgcatcaagggcatcatcgagctgctgggcagcaagctgagcctggatgagctgaccaagatctggaagatccagagcggccagagcagcacagtgattgagaacatccacaccatcatcgctgctgctgctgtgaagttcaacagcgaccagctgaaccacctgtttgtgctgatccagaaggtgctggatgtgctgtgggagctggcccacctgcccaccctgcccagcagcctcatccagcaggccctggaggagcacctgaccatcctgagtgatgcctatgctgtgaaggaggccatcaagaggagctacatcatcaagtgcatcgaggacatcaagaggagcagccagctgaacaacccccagtttgtgtgggtggtgcctgccctgcggcagctgcacgagatcaccaggagcttcatcaagcagacctaccagaagcaggacaagagcatcatccaggacctgaagaagaactttgagatcgtgaagctggtgacaggcagcctgattgcctgccaccggctggccgctgctgtggccggccctgggggcctgagcggcagcaccctggtggatggccgctacacctaccgggagtacctggaggcccacctgaagttcctggccttcttcctgcaggaggccaccctgtacctgggctggaacagagccaaggagatctgggagtgcctggtgacaggccaggatgtgtgtgagctggaccgggagatgtgctttgagtggttcaccaagggccagcacgacctggagagtgatgtgcagcagcagctgttcaaggagaagatcctgaagctggagagctatgagatcaccatgaatggcttcaacctcttcaagaccttctttgaaaatgtgaacctgtgtgaccaccggctgaagaggcagggcgcccagctgtatgtggagaagctggagctgattggcatggacttcatctggaagatcgccatggagagcccagatgaggagatcgccaatgaggccatccagctgatcatcaactacagctacatcaacctgaacccccggctgaagaaggacagcgtgtccctgcacaagaagttcatcgctgactgctacacccggctggaggccgccagcagcgccctgggcggccccaccctgacccatgctgtgacccgggccaccaagatgctgacagccacagccatgcccaccgtggccacctctgtgcagagcccctaccgcagcaccaagctggtgatcatcgagcggctgctgctgctggccgagcgctacgtgatcaccatcgaggacttctacagcgtgcccaggaccatcctgccccatggagccagcttccacggccacctgctgaccctgaatgtgacctatgagagcaccaaggacaccttcaccgtggaggcccacagcaatgagaccatcggctctgtgcgctggaagatcgccaagcagctgtgcagccctgtggacaacatccagatcttcaccaatgacagcctgctgactgtgaacaaggaccagaagctgctgcaccagctgggcttcagtgatgagcagatcctgactgtgaagaccagcggcagcggcaccccatctggcagcagcgctgacagcagcaccagcagcagcagcagcagcagcggggtcttcagcagcagctatgccatggagcaggagaagagcctgcccggggtggtgatggccctggtgtgcaatgtgtttgacatgctgtaccagctggccaacctggaggagccccgcatcaccctgcgggtgaggaagctgctgctgctgatccccacagatcctgccatccaggaggccctggaccagctggacagcctgggcaggaagaagaccctgctgtctgagagcagcagccagagcagcaagagccccagcctgagcagcaagcagcagcaccagcccagcgccagcagcatcctggagagcctcttccgcagctttgcccctggcatgagcaccttccgggtgctgtacaacctggaggtgctgagcagcaagctgatgcccacagcagatgatgacatggcccggagctgtgccaagagcttctgtgagaacttcctgaaggccggcggcctgagcctggtggtgaatgtgatgcagagggacagcatccccagcgaggtggactatgagacccggcagggcgtgtacagcatctgcctgcagctggcccgcttcctgctggtgggccagaccatgcccaccctgctggatgaggacctgaccaaggatggcatcgaggccctgagcagccggcccttcagaaatgtgtcccggcagaccagccggcagatgagcctgtgtggcaccccagagaagagcagctaccggcagctgtctgtgtctgacaggagcagcatccgggtggaggagatcatcccagctgcccgggtggccatccagaccatggaggtgtctgacttcaccagcacagtggcctgcttcatgaggctgtcctgggccgctgctgctggccgcctggacctggtgggcagcagccagcccatcaaggagagcaacagcctgtgcccagctggcatccggaaccggctgagcagcagcggcagcaactgcagcagcggcagcgagggggagcctgtggccctgcacgccggcatctgtgtgcggcagcagagcgtgtccaccaaggacagcctgattgctggggaggccctgagcctgctggtgacctgcctgcagctgcggagccagcagctggccagcttctacaacctgccctgtgtggccgacttcatcatcgacatcctgctgggcagccccagcgctgagatcagaagagtggcctgtgaccagctgtacaccctgagccagacagacaccagcgcccacccagatgtgcagaagcccaaccagttcctgctgggcgtcatcctgacagcccagctgcccctgtggagccccaccagcatcatgagaggagtgaaccagaggctgctgagccagtgcatggagtactttgacctgcgctgccagctgctggatgacctgaccaccagcgagatggagcagctgcgcatcagccctgccaccatgctggaggatgagatcacctggctggacaactttgagcccaacagaacagcagaatgtgagaccagcgaggccgacaacatcctgctggccggccacctgcggctcatcaagaccctgctgagcctgtgtggggctgagaaggagatgctgggcagcagcctcatcaagcccctgctggatgacttcctgttccgggccagccgcatcatcctgaacagccacagccctgctggcagcgctgccatcagccagcaggacttccaccccaagtgcagcacagccaacagccggctggccgcctatgaggtgctggtgatgctggccgacagcagccccagcaacctgcagatcatcatcaaggagctgctgtccatgcaccaccagcctgaccctgccctgaccaaggagtttgactacctgccccctgtggacagccgcagcagcagcggctttgtgggcctgagaaatggaggagccacctgctacatgaatgctgtgttccagcagctgtacatgcagcccggcctgcctgagagcctgctgtctgtggatgatgacacagacaacccagatgacagcgtcttctaccaggtgcagagcctgtttggccacctgatggagagcaagctgcagtactacgtgcctgagaacttctggaagatcttcaagatgtggaacaaggagctgtatgtgcgggagcagcaggatgcctatgagttcttcaccagcctgattgaccagatggatgagtacctgaagaagatgggccgggaccagatcttcaagaacaccttccagggcatctacagcgaccagaagatctgcaaggactgcccccacagatatgagcgggaggaggccttcatggccctgaacctgggcgtgaccagctgccagagcctggagatcagcctggaccagtttgtgcggggggaggtgctggagggcagcaatgcctactactgtgagaagtgcaaggagaagaggatcaccgtgaagaggacctgcatcaagagcctgcccagcgtgctggtgatccacctgatgagatttggatttgactgggagagcggccgcagcatcaagtatgatgagcagatccgcttcccctggatgctgaacatggagccctacacagtgtctggcatggcccggcaggacagcagcagcgaggtgggagaaaatggccgctctgtggaccagggcggcggcggcagccccaggaagaaggtggccctgacagagaactatgagctggtgggcgtcatcgtgcacagcggccaggcccacgccggccactactacagcttcatcaaggaccggcggggctgtgggaagggcaagtggtacaagttcaatgacaccgtcatcgaggagtttgacctgaatgatgagaccctggagtatgaatgttttggaggagagtaccggcccaaggtgtatgaccagaccaacccctacacagatgtgagaagacgctactggaatgcctacatgctgttctaccagagggtgtctgaccagaacagccctgtgctgcccaagaagagccgggtgtctgtggtgcggcaggaggccgaggacctgagcctgagcgcccccagcagccctgagatcagcccccagagcagcccccggccccaccggcccaacaatgaccggctgagcatcctgaccaagctggtgaagaagggggagaagaagggcctgtttgtggagaagatgcctgcccgcatctaccagatggtgagagatgagaacctgaagttcatgaagaacagagatgtgtacagcagtgactacttctcctttgtgctgagcctggccagcctgaatgccaccaagctgaagcacccctactacccctgcatggccaaggtgtccctgcagctggccatccagttcctgttccagacctacctgcggaccaagaagaagctgcgggtggacacagaggagtggatcgccaccatcgaggccctgctgagcaagagctttgatgcctgccagtggctggtggagtacttcatcagcagcgagggccgggagctgatcaagatcttcctgctggagtgcaatgtgcgggaggtgcgggtggccgtggccaccatcctggagaagaccctggacagcgccctcttctaccaggacaagctgaagagcctgcaccagctgctggaggtgctgctggccctgctggacaaggatgtgcctgagaactgcaagaactgtgcccagtacttcttcctgttcaacacctttgtgcagaagcagggcatccgggccggggacctgctgctgcggcacagcgccctgcggcacatgatctccttcctgctgggcgccagccggcagaacaaccagatccgccgctggagcagcgcccaggcccgggagtttggaaacctgcacaacacagtggccctgctggtgctgcacagtgatgtgagcagccagagaaatgtggcccctggcatcttcaagcagaggcctcccatcagcatcgcccccagcagccccctgctgcccctgcacgaggaggtggaggccctgctcttcatgtctgagggcaagccctacctgctggaggtgatgtttgccctgcgggagctgaccggcagcctgctggccctgattgagatggtggtgtactgctgcttctgcaatgagcacttctccttcaccatgctgcacttcatcaagaaccagctggagacagcccctcctcatgagctgaagaacaccttccagctgctgcacgagatcctggtgattgaggaccccatccaggtggagcgggtgaagtttgtgtttgaaacagaaaatggcctgctggccctgatgcaccacagcaaccacgtggacagcagccgctgctaccagtgtgtgaagttcctggtgaccctggcccagaagtgcccagctgccaaggagtacttcaaggagaacagccaccactggagctgggccgtgcagtggctgcagaagaagatgtctgagcactactggaccccccagagcaatgtgtccaatgagaccagcacaggcaagaccttccagaggaccatcagcgcccaggacaccctggcctatgccacagccctgctgaatgagaaggagcagagcggcagcagcaatggaagtgagagcagccctgccaatgaaaatggagacagacacctgcagcagggcagcgagagccccatgatgattggagagctgcggagtgacctggatgatgtggacccctag

SEQ ID NO: 175180 - DNA, 2742 bp, synthetic construct
  misc_feature 1..2742: note = Description of Artificial Sequence: Synthetic coding sequence
  source 1..2742: mol_type = other DNA
atggccgccctcttcctgcggggctttgtgcagatcggcaactgcaagacaggcatcagcaagagcaaggaggccttcattgaagctgtggagaggaagaagaaggaccggctggtgctgtacttcaagagcggcaagtacagcaccttccggctgagtgacaacatccagaatgtggtgctgaagagctaccggggcaaccagaaccacctgcacctgaccctgcagaacaacaacggcctcttcatcgagggcctgagcagcacagatgctgagcagctgaagatcttcctggacagagtgcaccagaatgaggtgcagccccctgtgcggcctgggaagggcggctctgtgttcagcagcaccacccagaaggagatcaacaagaccagcttccacaaggtggatgagaagagcagcagcaagagctttgagatcgccaagggcagcggcaccggggtgctgcagaggatgcccctgctgaccagcaagctgaccctgacctgtggggagctgtctgagaaccagcacaagaagaggaagaggatgctgagcagcagcagcgagatgaatgaggagttcctgaaggagaacaacagcgtggagtacaagaagagcaaggctgactgcagccgctgtgtgtcctacaaccgggagaagcagctgaagctgaaggagctggaggagaacaagaagctggagtgtgagagcagctgcatcatgaatgccaccggcaacccctacctggatgacatcggcctgctgcaggccctgacagagaagatggtgctggtgttcctgctgcagcagggctacagtgatggctacaccaagtgggacaagctgaagctgttctttgagctgtttcctgagaagatctgccacggcctgcccaacctgggcaacacctgctacatgaatgctgtgctgcagagcctgctgagcatccccagctttgctgatgacctgctgaaccagagcttcccctggggcaagatccccctgaatgccctgaccatgtgcctggcccggctgctcttcttcaaggacacctacaacatcgagatcaaggagatgctgctgctgaacctgaagaaggccatctctgctgctgctgagatcttccacggcaatgcccagaatgatgcccacgagttcctggcccactgcctggaccagctgaaggacaacatggagaagctgaacaccatctggaagcccaagtcagaatttggagaggacaacttccccaagcaggtgtttgctgatgatcctgacaccagcggcttcagctgccctgtgatcaccaactttgagctggagctgctgcacagcatcgcctgcaaggcctgtggccaggtgatcctgaagacagagctgaacaactacctgagcatcaacctgccccagaggatcaaggcccaccccagcagcatccagagcacctttgacctcttctttggagctgaggagctggagtacaagtgtgccaagtgtgagcacaagacctctgtgggcgtgcacagcttcagccggctgccccgcatcctgattgtgcacctgaagcgctacagcctgaatgagttctgtgccctgaagaagaatgaccaggaggtgatcatcagcaagtacctgaaggtgagcagccactgcaatgaaggcaccaggcctcccctgcccctgtctgaagatggagagatcacagacttccagctgctgaaggtgatcaggaagatgaccagcggcaacatctctgtgtcctggccagccaccaaggagagcaaggacatcctggccccccacatcggcagtgacaaggagagcgagcagaagaagggccagacagtgttcaagggggccagccggcggcagcagcagaagtacctgggcaagaacagcaagcccaatgagctggagagcgtgtacagcggggaccgggccttcatcgagaaggagcccctggcccacctgatgacctacctggaggacaccagcctgtgccagttccacaaggccggcggcaagccagccagcagccctggcacccccctgagcaaggtggacttccagacagtgcctgagaaccccaagaggaagaagtatgtgaagaccagcaagtttgtggcctttgaccgcatcatcaaccccaccaaggacctgtatgaggacaagaacatccgcatccctgagcgcttccagaaggtgtctgagcagacccagcagtgtgatggcatgaggatctgtgagcaggccccccagcaggccctgccccagagcttccccaagccaggcacccagggccacaccaagaacctgctgcggcccaccaagctgaacctgcagaagagcaacagaaacagcctgctggccctgggcagcaacaagaaccccaggaacaaggacatcctggacaagatcaagagcaaggccaaggagaccaagagaaatgatgacaagggggaccacacctaccgcctcatctctgtggtgagccacctgggcaagaccctgaagagcggccactacatctgtgatgcctatgactttgagaagcagatctggttcacctatgatgacatgagggtgctgggcatccaggaggcccagatgcaggaggaccggcgctgcaccggctacatcttcttctacatgcacaatgagatctttgaggagatgctgaagcgggaggagaatgcccagctgaacagcaaggaggtggaggagaccctgcagaaggagtag

SEQ ID NO: 175181 - DNA, 2742 bp, synthetic construct; identical to SEQ ID NO: 175180
  misc_feature 1..2742: note = Description of Artificial Sequence: Synthetic coding sequence
  source 1..2742: mol_type = other DNA

SEQ ID NO: 175182 - DNA, 3234 bp, synthetic construct
  misc_feature 1..3234: note = Description of Artificial Sequence: Synthetic coding sequence
  source 1..3234: mol_type = other DNA
atgacagctgagctgcagcaggatgatgctgctggagctgctgatggccacggcagcagctgccagatgctgctgaaccagctgcgggagatcaccggcatccaggaccccagcttcctgcacgaggccctgaaggccagcaatggagacatcacccaggccgtgtccctgctgacagatgagcgggtgaaggagcccagccaggacacagtggccacagagcccagcgaggtggagggcagcgctgccaacaaggaggtgctggccaaggtgattgacctgacccatgacaacaaggatgacctgcaggccgccatcgccctgagcctgctggagagccccaagatccaggctgatggccgggacctgaacaggatgcatgaggccaccagcgctgagaccaagaggagcaagaggaagagatgtgaggtgtggggcgagaaccccaaccccaatgactggaggagagtggatggctggcctgtgggcctgaagaatgtgggcaacacctgctggttctctgctgtgatccagagcctcttccagctgcctgagttccggcggctggtgctgagctacagcctgccccagaatgtgctggagaactgccgcagccacacagagaagaggaacatcatgttcatgcaggagctgcagtacctgtttgccctgatgatgggcagcaacaggaagtttgtggaccccagcgctgccctggacctgctgaagggggccttccgcagcagcgaggagcagcagcaggatgtgtctgagttcacccacaagctgctggactggctggaggatgccttccagctggccgtgaatgtgaacagccccaggaacaagtctgagaaccccatggtgcagctgttctacggcaccttcctgacagagggcgtgcgggagggcaagcccttctgcaacaatgagaccttcggccagtaccccctgcaggtgaatggctacagaaacctggatgagtgcctggagggcgccatggtggagggagatgtggagctgctgcccagcgaccacagcgtgaagtatggccaggagcgctggttcaccaagctgccccctgtgctgacctttgagctgagcagatttgagttcaaccagagcctgggccagcctgagaagatccacaacaagctggagttcccccagatcatctacatggaccgctacatgtaccgcagcaaggagctgatccggaacaagcgggagtgcatcaggaagctgaaggaggagatcaagatcctgcagcagaagctggagagatatgtgaagtatggcagcggccctgcccgcttccccctgcctgacatgctgaagtatgtgattgaatttgccagcaccaagccagccagcgagagctgccccccagagagtgacacccacatgaccctgcccctgagctctgtgcactgcagcgtgtctgaccagaccagcaaggagagcaccagcacagagagcagcagccaggatgtggagagcaccttcagcagccctgaggacagcctgcccaagagcaagcccctgaccagcagccgcagctccatggagatgcccagccagcctgcccccaggacagtgacagatgaggagatcaactttgtgaagacctgcctgcagcgctggaggagtgaaattgagcaggacatccaggacctgaagacctgcatcgccagcaccacccagaccatcgagcagatgtactgtgaccccctgctgcggcaggtgccctaccgcctgcatgctgtgctggtgcatgagggccaggccaatgccggccactactgggcctacatctacaaccagccccggcagagctggctgaagtacaatgacatctctgtgacagagagctcctgggaggaggtggagcgggacagctatggaggcctgagaaatgtgtctgcctactgcctgatgtacatcaatgacaagctgccctacttcaatgctgaggccgcccccacagaaagtgaccagatgtctgaggtggaggccctgtctgtggagctgaagcactacatccaggaggacaactggaggtttgagcaggaggtggaggagtgggaggaggagcagagctgcaagatcccccagatggagagcagcaccaacagcagcagccaggactacagcaccagccaggagcccagcgtggccagcagccatggagtgcgctgcctgagcagcgagcacgctgtgattgtgaaggagcagacagcccaggccatcgccaacacagcccgggcctatgagaagagcggcgtggaggccgccctgtctgaggtgatgctgagccctgccatgcagggcgtcatcctggccatcgccaaggcccggcagacctttgacagagatggcagcgaggccggcctcatcaaggccttccacgaggagtacagccggctgtaccagctggccaaggagacccccaccagccacagcgacccccggctgcagcacgtgctggtgtacttcttccagaatgaggcccccaagagggtggtggagaggaccctgctggagcagtttgctgacaagaacctgtcctatgatgagaggagcatcagcatcatgaaggtggcccaggccaagctgaaggagattggaccagatgacatgaacatggaggagtacaagaagtggcatgaggactacagcctcttcaggaaggtgtctgtgtacctgctgaccggcctggagctgtaccagaagggcaagtaccaggaggccctgagctacctggtgtatgcctaccagagcaatgctgccctgctgatgaagggccccaggagaggagtgaaggagagcgtgattgccctgtacagaaggaagtgcctgctggagctgaatgccaaggccgccagcctgtttgagaccaatgatgaccacagcgtgacagagggcatcaacgtgatgaatgagctgatcatcccctgcatccacctgatcatcaacaatgacatcagcaaggatgacctggatgccatcgaggtgatgaggaaccactggtgcagctacctgggccaggacattgctgagaacctgcagctgtgcctgggggagttcctgccccggctgctggaccccagcgctgagatcatcgtgctgaaggagccccccaccatccggcccaacagcccctatgacctgtgcagcagatttgctgctgtgatggagagcatccagggcgtgtccacagtgacagtgaagtag

SEQ ID NO: 175183 - DNA, 3138 bp, synthetic construct
  misc_feature 1..3138: note = Description of Artificial Sequence: Synthetic coding sequence
  source 1..3138: mol_type = other DNA
atgacagctgagctgcagcaggatgatgctgctggagctgctgatggccacggcagcagctgccagatgctgctgaaccagctgcgggagatcaccggcatccaggaccccagcttcctgcacgaggccctgaaggccagcaatggagacatcacccaggccgtgtccctgctgacagatgagcgggtgaaggagcccagccaggacacagtggccacagagcccagcgaggtggagggcagcgctgccaacaaggaggtgctggccaaggtgattgacctgacccatgacaacaaggatgacctgcaggccgccatcgccctgagcctgctggagagccccaagatccaggctgatggccgggacctgaacaggatgcatgaggccaccagcgctgagaccaagaggagcaagaggaagagatgtgaggtgtggggcgagaaccccaaccccaatgactggaggagagtggatggctggcctgtgggcctgaagaatgtgggcaacacctgctggttctctgctgtgatccagagcctcttccagctgcctgagttccggcggctggtgctgagctacagcctgccccagaatgtgctggagaactgccgcagccacacagagaagaggaacatcatgttcatgcaggagctgcagtacctgtttgccctgatgatgggcagcaacaggaagtttgtggaccccagcgctgccctggacctgctgaagggggccttccgcagcagcgaggagcagcagcaggatgtgtctgagttcacccacaagctgctggactggctggaggatgccttccagctggccgtgaatgtgaacagccccaggaacaagtctgagaaccccatggtgcagctgttctacggcaccttcctgacagagggcgtgcgggagggcaagcccttctgcaacaatgagaccttcggccagtaccccctgcaggtgaatggctacagaaacctggatgagtgcctggagggcgccatggtggagggagatgtggagctgctgcccagcgaccacagcgtgaagtatggccaggagcgctggttcaccaagctgccccctgtgctgacctttgagctgagcagatttgagttcaaccagagcctgggccagcctgagaagatccacaacaagctggagttcccccagatcatctacatggaccgctacatgtaccgcagcaaggagctgatccggaacaagcgggagtgcatcaggaagctgaaggaggagatcaagatcctgcagcagaagctggagagatatgtgaagtatggcagcggccctgcccgcttccccctgcctgacatgctgaagtatgtgattgaatttgccagcaccaagccagccagcgagagctgccccccagagagtgacacccacatgaccctgcccctgagctctgtgcactgcagcgtgtctgaccagaccagcaaggagagcaccagcacagagagcagcagccaggatgtggagagcaccttcagcagccctgaggacagcctgcccaagagcaagcccctgaccagcagccgcagctccatggagatgcccagccagcctgcccccaggacagtgacagatgaggagatcaactttgtgaagacctgcctgcagcgctggaggagtgaaattgagcaggacatccaggacctgaagacctgcatcgccagcaccacccagaccatcgagcagatgtactgtgaccccctgctgcggcaggtgccctaccgcctgcatgctgtgctggtgcatgagggccaggccaatgccggccactactgggcctacatctacaaccagccccggcagagctggctgaagtacaatgacatctctgtgacagagagctcctgggaggaggtggagcgggacagctatggaggcctgagaaatgtgtctgcctactgcctgatgtacatcaatgacaagctgccctacttcaatgctgaggccgcccccacagaaagtgaccagatgtctgaggtggaggccctgtctgtggagctgaagcactacatccaggaggacaactggaggtttgagcaggaggtggaggagtgggaggaggagcagagctgcaagatcccccagatggagagcagcaccaacagcagcagccaggactacagcaccagccaggagcccagcgtggccagcagccatggagtgcgctgcctgagcagcgagcacgctgtgattgtgaaggagcagacagcccaggccatcgccaacacagcccgggcctatgagaagagcggcgtggaggccgccctgtctgaggccttccacgaggagtacagccggctgtaccagctggccaaggagacccccaccagccacagcgacccccggctgcagcacgtgctggtgtacttcttccagaatgaggcccccaagagggtggtggagaggaccctgctggagcagtttgctgacaagaacctgtcctatgatgagaggagcatcagcatcatgaaggtggcccaggccaagctgaaggagattggaccagatgacatgaacatggaggagtacaagaagtggcatgaggactacagcctcttcaggaaggtgtctgtgtacctgctgaccggcctggagctgtaccagaagggcaagtaccaggaggccctgagctacctggtgtatgcctaccagagcaatgctgccctgctgatgaagggccccaggagaggagtgaaggagagcgtgattgccctgtacagaaggaagtgcctgctggagctgaatgccaaggccgccagcctgtttgagaccaatgatgaccacagcgtgacagagggcatcaacgtgatgaatgagctgatcatcccctgcatccacctgatcatcaacaatgacatcagcaaggatgacctggatgccatcgaggtgatgaggaaccactggtgcagctacctgggccaggacattgctgagaacctgcagctgtgcctgggggagttcctgccccggctgctggaccccagcgctgagatcatcgtgctgaaggagccccccaccatccggcccaacagcccctatgacctgtgcagcagatttgctgctgtgatggagagcatccagggcgtgtccacagtgacagtgaagtag

SEQ ID NO: 175184 - DNA, 1497 bp, synthetic construct
  misc_feature 1..1497: note = Description of Artificial Sequence: Synthetic coding sequence
  source 1..1497: mol_type = other DNA
atgcagagccccccccacctggccgtgtgccgcagcaacaagagcccctgggtgtgcctgacctgcagctctgtgcactgcggccgctacgtgaatggccacgccaagaagcactatgaagatgcccaggtgcccctgaccaaccacaagaagtctgagaagcaggacaaggtgcagcacacagtgtgcatggactgcagcagctacagcacctactgctaccgctgtgatgactttgtggtgaatgacaccaagctgggcctggtgcagaaggtgcgggagcacctgcagaacctggagaacagcgccttcaccgctgacagacacaagaagaggaagctgctggagaacagcaccctgaacagcaagctgctgaaggtgaatggcagcaccacagccatctgtgccaccggcctgaggaacctgggcaacacctgcttcatgaatgccatcctgcagagcctgagcaacatcgagcagttctgctgctacttcaaggagctgcctgctgtggagctgagaaatggcaagacagctggaagaaggacctaccacaccaggagccagggcgacaacaacgtgtccctggtggaggagttcaggaagaccctgtgtgccctgtggcagggcagccagacagccttcagccctgagagcctcttctacgtggtgtggaagatcatgcccaacttccggggctaccagcagcaggatgcccacgagttcatgagatacctgctggaccacctgcacctggagctgcagggcggcttcaatggagtgagccgcagcgccatcctgcaggagaacagcaccctgagcgccagcaacaagtgctgcatcaacggggccagcacagtggtgacagccatctttggaggcatcctgcagaatgaggtgaactgcctgatctgtggcacagagagcaggaagtttgaccccttcctggacctgagcctggacatccccagccagttccgcagcaagaggagcaagaaccaggagaatggacctgtgtgcagcctgcgggactgcctgcggagcttcacagacctggaggagctggatgaaacagagctgtacatgtgccacaagtgcaagaagaagcagaagagcaccaagaagttctggatccagaagctgcccaaggtgctgtgcctgcacctgaagcgcttccactggacagcctacctgaggaacaaggtggacacctacgtggagttccccctgcggggcctggacatgaagtgctacctgctggagccagaaaattctggccctgagagctgcctgtatgacctggccgctgtggtggtgcaccacggcagcggcgtgggcagcggccactacacagcctatgccacccatgagggccgctggttccacttcaatgacagcacagtgaccctgacagatgaggagaccgtggtgaaggccaaggcctacatcctcttctacgtggagcaccaggccaaggccggcagtgacaagctgtag

SEQ ID NO: 175185 - DNA, 1563 bp, synthetic construct
  misc_feature 1..1563: note = Description of Artificial Sequence: Synthetic coding sequence
  source 1..1563: mol_type = other DNA
atggagtgcccccacctgagcagctctgtgtgcatcgccccagacagcgccaagttccccaacggcagccccagctcctggtgctgcagcgtgtgccgcagcaacaagagcccctgggtgtgcctgacctgcagctctgtgcactgcggccgctacgtgaatggccacgccaagaagcactatgaagatgcccaggtgcccctgaccaaccacaagaagtctgagaagcaggacaaggtgcagcacacagtgtgcatggactgcagcagctacagcacctactgctaccgctgtgatgactttgtggtgaatgacaccaagctgggcctggtgcagaaggtgcgggagcacctgcagaacctggagaacagcgccttcaccgctgacagacacaagaagaggaagctgctggagaacagcaccctgaacagcaagctgctgaaggtgaatggcagcaccacagccatctgtgccaccggcctgaggaacctgggcaacacctgcttcatgaatgccatcctgcagagcctgagcaacatcgagcagttctgctgctacttcaaggagctgcctgctgtggagctgagaaatggcaagacagctggaagaaggacctaccacaccaggagccagggcgacaacaacgtgtccctggtggaggagttcaggaagaccctgtgtgccctgtggcagggcagccagacagccttcagccctgagagcctcttctacgtggtgtggaagatcatgcccaacttccggggctaccagcagcaggatgcccacgagttcatgagatacctgctggaccacctgcacctggagctgcagggcggcttcaatggagtgagccgcagcgccatcctgcaggagaacagcaccctgagcgccagcaacaagtgctgcatcaacggggccagcacagtggtgacagccatctttggaggcatcctgcagaatgaggtgaactgcctgatctgtggcacagagagcaggaagtttgaccccttcctggacctgagcctggacatccccagccagttccgcagcaagaggagcaagaaccaggagaatggacctgtgtgcagcctgcgggactgcctgcggagcttcacagacctggaggagctggatgaaacagagctgtacatgtgccacaagtgcaagaagaagcagaagagcaccaagaagttctggatccagaagctgcccaaggtgctgtgcctgcacctgaagcgcttccactggacagcctacctgaggaacaaggtggacacctacgtggagttccccctgcggggcctggacatgaagtgctacctgctggagccagaaaattctggccctgagagctgcctgtatgacctggccgctgtggtggtgcaccacggcagcggcgtgggcagcggccactacacagcctatgccacccatgagggccgctggttccacttcaatgacagcacagtgaccctgacagatgaggagaccgtggtgaaggccaaggcctacatcctcttctacgtggagcaccaggccaaggccggcagtgacaagctgtag

SEQ ID NO: 175186 - DNA, 471 bp, synthetic construct
  misc_feature 1..471: note = Description of Artificial Sequence: Synthetic coding sequence
  source 1..471: mol_type = other DNA
atggagtgcccccacctgagcagctctgtgtgcatcgccccagacagcgccaagttccccaacggcagccccagctcctggtgctgcagcgtgtgccgcagcaacaagagcccctgggtgtgcctgacctgcagctctgtgcactgcggccgctacgtgaatggccacgccaagaagcactatgaagatgcccaggtgcccctgaccaaccacaagaagtctgagaagcaggacaaggtgcagcacacagtgtgcatggactgcagcagctacagcacctactgctaccgctgtgatgactttgtggtgaatgacaccaagctgggcctggtgcagaaggtgcgggagcacctgcagaacctggagaacagcgccttcaccgctgacagacacaagaagaggaagctgctggagaacagcaccctgaacagcaagctgctgaaggtgaatgtgtttggccggcgggtgtag

SEQ ID NO: 175187 - DNA, 1071 bp, synthetic construct
  misc_feature 1..1071: note = Description of Artificial Sequence: Synthetic coding sequence
  source 1..1071: mol_type = other DNA
atggactgcagcagctacagcacctactgctaccgctgtgatgactttgtggtgaatgacaccaagctgggcctggtgcagaaggtgcgggagcacctgcagaacctggagaacagcgccttcaccgctgacagacacaagaagaggaagctgctggagaacagcaccctgaacagcaagctgctgaaggtgaatggcagcaccacagccatctgtgccaccggcctgaggaacctgggcaacacctgcttcatgaatgccatcctgcagagcctgagcaacatcgagcagttctgctgctacttcaaggagctgcctgctgtggagctgagaaatggcaagacagctggccgccgcacctaccacaccaggagccagggcgacaacaacgtgtccctggtggaggagttcaggaagaccctgtgtgccctgtggcagggcagccagacagccttcagccctgagagcctcttctacgtggtgtggaagatcatgcccaacttccggggctaccagcagcaggatgcccacgagttcatgagatacctgctggaccacctgcacctggagctgcagggcggcttcaacggggtgagccgcagcgccatcctgcaggagaacagcaccctgagcgccagcaacaagtgctgcatcaatggagccagcacagtggtgacagccatctttggaggcatcctgcagaatgaggtgaactgcctgatctgtggcacagagagcaggaagtttgaccccttcctggacctgagcctggacatccccagccagttccgcagcaagaggagcaagaaccaggagaatggacctgtgtgcagcctgcgggactgcctgcgctccttcacagacctggaggagctggatgaaacagagctgtacatgtgccacaagtgcaagaagaagcagaagagcaccaagaagttctggatccagaagctgcccaaggtgctgtgcctgcacctgaagcgcttccactggacagcctacctgaggaacaaggtggacacctacgtggagttccccctgcggggcctggacatgaagtgctactactag

SEQ ID NO: 175188 - DNA, 816 bp, synthetic construct
  misc_feature 1..816: note = Description of Artificial Sequence: Synthetic coding sequence
  source 1..816: mol_type = other DNA
atgcccaacttccggggctaccagcagcaggatgcccacgagttcatgagatacctgctggaccacctgcacctggagctgcagggcggcttcaacggggtgagccgcagcgccatcctgcaggagaacagcaccctgagcgccagcaacaagtgctgcatcaatggagccagcacagtggtgacagccatctttggaggcatcctgcagaatgaggtgaactgcctgatctgtggcacagagagcaggaagtttgaccccttcctggacctgagcctggacatccccagccagttccgcagcaagaggagcaagaaccaggagaatggacctgtgtgcagcctgcgggactgcctgcgctccttcacagacctggaggagctggatgaaacagagctgtacatgtgccacaagtgcaagaagaagcagaagagcaccaagaagttctggatccagaagctgcccaaggtgctgtgcctgcacctgaagcgcttccactggacagcctacctgaggaacaaggtggacacctacgtggagttccccctgcggggcctggacatgaagtgctacctgctggagcctgagaacagcggccctgagagctgcctgtatgacctggccgctgtggtggtgcaccacggcagcggcgtgggcagcggccactacacagcctatgccacccatgagggccgctggttccacttcaatgacagcacagtgaccctgacagatgaggagaccgtggtgaaggccaaggcctacatcctcttctacgtggagcaccaggccaaggccggcagtgacaagctgtag

SEQ ID NO: 175189 - DNA, 1431 bp, synthetic construct
  misc_feature 1..1431: note = Description of Artificial Sequence: Synthetic coding sequence
  source 1..1431: mol_type = other DNA
atggagtgcccccacctgagcagctctgtgtgcatcgccccagacagcgccaagttccccaacggcagccccagctcctggtgctgcagcgtgtgccgcagcaacaagagcccctgggtgtgcctgacctgcagctctgtgcactgcggcagctaccgctgtgatgactttgtggtgaatgacaccaagctgggcctggtgcagaaggtgcgggagcacctgcagaacctggagaacagcgccttcaccgctgacagacacaagaagaggaagctgctggagaacagcaccctgaacagcaagctgctgaaggtgaatggcagcaccacagccatctgtgccaccggcctgaggaacctgggcaacacctgcttcatgaatgccatcctgcagagcctgagcaacatcgagcagttctgctgctacttcaaggagctgcctgctgtggagctgagaaatggcaagacagctggaagaaggacctaccacaccaggagccagggcgacaacaacgtgtccctggtggaggagttcaggaagaccctgtgtgccctgtggcagggcagccagacagccttcagccctgagagcctcttctacgtggtgtggaagatcatgcccaacttccggggctaccagcagcaggatgcccacgagttcatgagatacctgctggaccacctgcacctggagctgcagggcggcttcaatggagtgagccgcagcgccatcctgcaggagaacagcaccctgagcgccagcaacaagtgctgcatcaacggggccagcacagtggtgacagccatctttggaggcatcctgcagaatgaggtgaactgcctgatctgtggcacagagagcaggaagtttgaccccttcctggacctgagcctggacatccccagccagttccgcagcaagaggagcaagaaccaggagaatggacctgtgtgcagcctgcgggactgcctgcggagcttcacagacctggaggagctggatgaaacagagctgtacatgtgccacaagtgcaagaagaagcagaagagcaccaagaagttctggatccagaagctgcccaaggtgctgtgcctgcacctgaagcgcttccactggacagcctacctgaggaacaaggtggacacctacgtggagttccccctgcggggcctggacatgaagtgctacctgctggagccagaaaattctggccctgagagctgcctgtatgacctggccgctgtggtggtgcaccacggcagcggcgtgggcagcggccactacacagcctatgccacccatgagggccgctggttccacttcaatgacagcacagtgaccctgacagatgaggagaccgtggtgaaggccaaggcctacatcctcttctacgtggagcaccaggccaaggccggcagtgacaagctgtag

SEQ ID NO: 175190 - DNA, 168 bp, synthetic construct
  misc_feature 1..168: note = Description of Artificial Sequence: Synthetic coding sequence
  source 1..168: mol_type = other DNA
atggagtgcccccacctgagcagctctgtgtgcatcgccccagacagcgccaagttccccaacggcagccccagctcctggtgctgcagcgtgtgccgcagcaacaagagcccctgggtgtgcctgacctgcagctctgtgcactgcggccgcatctggggcacctag

SEQ ID NO: 175191 - DNA, 1554 bp, synthetic construct
  misc_feature 1..1554: note = Description of Artificial Sequence: Synthetic coding sequence
  source 1..1554: mol_type = other DNA
atgctgagcagcagagctgaggccgccatgacagctgctgaccgggccatccagcgcttcctgaggactggagctgctgtgcgctacaaggtgatgaagaactggggcgtcatcggcggcattgctgctgccctggccgccggcatctacgtgatctggggccccatcacagagaggaagaagaggaggaagggcctggtgcccggcctggtgaacctgggcaacacctgcttcatgaacagcctgctgcagggcctgagcgcctgcccagccttcatccgctggctggaggagttcaccagccagtacagccgggaccagaaggagccccccagccaccagtacctgagcctgaccctgctgcacctgctgaaggccctgagctgccaggaggtgacagatgatgaggtgctggatgccagctgcctgctggatgtgctgaggatgtaccgctggcagatcagcagctttgaggagcaggatgcccacgagctgttccacgtgatcaccagcagcctggaggatgagcgggaccggcagccccgggtgacccacctgtttgatgtgcacagcctggagcagcagagcgagatcacccccaagcagatcacctgcaggacccggggcagcccccaccccaccagcaaccactggaagagccagcaccccttccacggccgcctgaccagcaacatggtgtgcaagcactgtgagcaccagagccctgtgcgctttgacacctttgacagcctgagcctgagcatcccagctgccacctggggccaccccctgaccctggaccactgcctgcaccacttcatcagcagcgagagcgtgagagatgtggtgtgtgacaactgcaccaagattgaggccaagggcaccctgaatggagagaaggtggagcaccagaggaccacctttgtgaagcagctgaagctgggcaagctgccccagtgcctgtgcatccacctgcagaggctgtcctggagcagccacggcacccccctgaagagacatgagcacgtgcagttcaatgagttcctgatgatggacatctacaagtaccacctgctgggccacaagcccagccagcacaaccccaagctgaacaagaaccctggccccaccctggagctgcaggacggccctggggcccccacccctgtgctgaaccagcccggggcccccaagacccagatcttcatgaatggagcctgcagccccagcctgctgcccaccctgagcgcccccatgcccttccccctgcctgtggtgcctgactacagcagcagcacctacctgttccggctgatggctgtggtggtgcaccacggggacatgcacagcggccactttgtgacctacagaagaagcccccccagcgccaggaaccccctgagcaccagcaaccagtggctgtgggtgtctgatgacacagtgaggaaggccagcctgcaggaggtgctgagcagcagcgcctacctgctcttctatgagcgggtgctgagcaggatgcagcaccagagccaggagtgcaagtctgaggagtag

SEQ ID NO: 175192 - DNA, 4815 bp, synthetic construct
  misc_feature 1..4815: note = Description of Artificial Sequence: Synthetic coding sequence
  source 1..4815: mol_type = other DNA
atgggcgccaaggagagccgcatcggcttcctgtcctatgaggaggccctgcggcgggtgacagatgtggagctgaagaggctgaaggatgccttcaagaggacctgtggcctgagctactacatgggccagcactgcttcatccgggaggtgctgggagatggagtgccccccaaggtggccgaggtgatctactgcagctttggaggcaccagcaagggcctgcacttcaacaacctgattgtgggcctggtgctgctgacccggggcaaggatgaggagaaggccaagtacatcttcagcctcttcagcagcgagagcggcaactacgtgatccgggaggagatggagaggatgctgcacgtggtggatggcaaggtgcctgacaccctgaggaagtgcttcagcgagggggagaaggtgaactatgagaagttcaggaactggctgttcctgaacaaggatgccttcaccttcagccgctggctgctgtctggaggagtgtatgtgaccctgacagatgacagcgacacccccaccttctaccagaccctggccggcgtgacccacctggaggagagtgacatcatcgacctggagaagcgctactggctgctgaaggcccagagcaggacaggccgctttgacctggagaccttcggccccctggtgagcccccccatccggcccagcctgtctgagggcctcttcaatgcctttgatgagaacagagacaaccacatcgacttcaaggagatcagctgtggcctgagcgcctgctgccggggccccctggccgagcggcagaagttctgcttcaaggtgtttgatgtggacagagatggagtgctgagccgggtggagctgcgggacatggtggtggccctgctggaggtgtggaaggacaacagaacagatgacatccctgagctgcacatggacctgagtgacatcgtggagggcatcctgaatgcccatgacaccaccaagatgggccacctgaccctggaggactaccagatctggagcgtgaagaatgtgctggccaatgagttcctgaacctgctcttccaggtgtgccacatcgtgctgggcctgcggcctgccaccccagaggaggagggccagatcatccggggctggctggagcgggagagccgctatggcctgcaggccggccacaactggttcatcatctccatgcagtggtggcagcagtggaaggagtatgtgaagtatgatgccaaccctgtggtgattgagcccagctctgtgctgaatggaggcaagtacagctttggaacagctgcccaccccatggagcaggtggaggacagaattggcagcagcctgtcctatgtgaacaccacagaggagaagttcagtgacaacatcagcacagccagcgaggccagcgagacagctggcagcggcttcctgtacagcgccaccccaggagcagatgtgtgctttgcccggcagcacaacaccagtgacaacaacaaccagtgcctgctgggcgccaatggaaacatcctgctgcacctgaacccccagaagccaggggccatcgacaaccagcccctggtgacccaggagcctgtgaaggccaccagcctgaccctggagggcggccgcctgaagaggaccccccagctgattcatggccgggactatgagatggtgcctgagcctgtgtggagggccctgtaccactggtacggggccaacctggccctgcccaggcctgtgatcaagaacagcaagacagacatccctgagctggagctgttcccccgctacctgctcttcctgcggcagcagcctgccaccaggacccagcagagcaacatctgggtgaacatgggaaatgtgcccagccccaatgcccccctgaagagggtgctggcctacacaggctgcttcagcaggatgcagaccatcaaggagatccacgagtacctgagccagaggctgcgcatcaaggaggaggacatgaggctgtggctgtacaacagcgagaactacctgaccctgctggatgatgaggaccacaagctggagtacctgaagatccaggatgagcagcacctggtgattgaggtgaggaacaaggacatgtcctggccagaggagatgtccttcatcgccaacagcagcaagattgacagacacaaggtgcccacagagaagggggccaccggcctgagcaacctgggcaacacctgcttcatgaacagcagcatccagtgtgtgagcaacacccagcccctgacccagtacttcatcagcggccgccacctgtatgagctgaacagaaccaaccccatcggcatgaagggccacatggccaagtgctatggagacctggtgcaggagctgtggagcggcacccagaagaatgtggcccccctgaagctgcgctggaccatcgccaagtatgccccccgcttcaacggcttccagcagcaggacagccaggagctgctggccttcctgctggatggcctgcacgaggacctgaacagagtgcatgagaagccctacgtggagctgaaggacagtgatggccgcccagactgggaggtggccgctgaggcctgggacaaccacctgcggaggaacagaagcatcgtggtggacctcttccacggccagctgcggagccaggtgaagtgcaagacctgtggccacatctctgtgcgctttgaccccttcaacttcctgagcctgcccctgcccatggacagctacatgcacctggagatcaccgtcatcaagctggatggcaccacccctgtgcgctatggcctgcggctgaacatggatgagaagtacacaggcctgaagaagcagctgagtgacctgtgtggcctgaacagcgagcagatcctgctggccgaggtgcacggcagcaacatcaagaacttcccccaggacaaccagaaggtgcggctgtctgtgtctggcttcctgtgtgcctttgagatccctgtgcctgtgagccccatcagcgccagcagccccacccagacagacttcagcagcagccccagcaccaatgagatgttcaccctgaccaccaatggagacctgccccggcccatcttcatccccaacggcatgcccaacacagtggtgccctgtggcacagagaagaacttcaccaacggcatggtgaatggccacatgcccagcctgcctgacagccccttcaccggctacatcatcgctgtgcacaggaagatgatgaggacagagctgtacttcctgagcagccagaagaaccggcccagcctgtttggcatgcccctcatcgtgccctgcaccgtgcacaccaggaagaaggacctgtatgatgctgtgtggatccaggtgtcccggctggccagccccctgcccccccaggaggccagcaaccacgcccaggactgtgatgacagcatgggctaccagtaccccttcaccctgcgggtggtgcagaaggatggcaacagctgtgcctggtgcccctggtaccgcttctgccggggctgcaagattgactgtggagaagatcgggccttcatcggaaatgcctacatcgctgtggactgggaccccacagccctgcacctgcgctaccagaccagccaggagcgggtggtggatgaacatgaatctgtggagcagagccggcgggcccaggccgagcccatcaacctggacagctgcctgcgggccttcaccagcgaggaggagctgggggagaatgagatgtactactgcagcaagtgcaagacccactgcctggccaccaagaagctggacctgtggaggctgccccccatcctgatcatccacctgaagcgcttccagtttgtgaatggccgctggatcaagagccagaagatcgtgaagttcccccgggagagctttgaccccagcgccttcctggtgccccgggaccctgccctgtgccagcacaagcccctgaccccccagggagatgagctgtctgagccccgcatcctggcccgggaggtgaagaaggtggatgcccagagcagcgctggggaggaggatgtgctgctgagcaagagccccagcagcctgagcgccaacatcatcagcagccccaagggcagccccagcagcagcaggaagagcggcaccagctgccccagcagcaagaacagcagccccaacagcagccccaggaccctgggccgcagcaagggccgcctgcggctgccccagatcggcagcaagaacaagctgagcagcagcaaagaaaacctggatgccagcaaagaaaatggagctggccagatctgtgagctggctgatgccctgagccggggccacgtgctgggcggcagccagcctgagctggtgaccccccaggaccacgaggtggccctggccaacggcttcctgtatgagcacgaggcctgtggaaatggctacagcaatggccagctgggcaaccacagcgaggaggacagcacagatgaccagcgggaggacacccgcatcaagcccatctacaacctgtatgccatcagctgccacagcggcatcctgggcggcggccactacgtgacctacgccaagaaccccaactgcaagtggtactgctacaatgacagcagctgcaaggagctgcacccagatgaaattgacacagacagcgcctacatcctcttctatgagcagcagggcattgattatgcccagttcctgcccaagacagatggcaagaagatggctgacaccagctccatggatgaagattttgaaagtgactacaagaagtactgtgtgctgcagtag

SEQ ID NO: 175193 - DNA, 1173 bp, synthetic construct
  misc_feature 1..1173: note = Description of Artificial Sequence: Synthetic coding sequence
  source 1..1173: mol_type = other DNA
atgggcgccaaggagagccgcatcggcttcctgtcctatgaggaggccctgcggcgggtgacagatgtggagctgaagaggctgaaggatgccttcaagaggacctgtggcctgagctactacatgggccagcactgcttcatccgggaggtgctgggagatggagtgccccccaaggtggccgaggtgatctactgcagctttggaggcaccagcaagggcctgcacttcaacaacctgattgtgggcctggtgctgctgacccggggcaaggatgaggagaaggccaagtacatcttcagcctcttcagcagcgagagcggcaactacgtgatccgggaggagatggagaggatgctgcacgtggtggatggcaaggtgcctgacaccctgaggaagtgcttcagcgagggggagaaggtgaactatgagaagttcaggaactggctgttcctgaacaaggatgccttcaccttcagccgctggctgctgtctggaggagtgtatgtgaccctgacagatgacagcgacacccccaccttctaccagaccctggccggcgtgacccacctggaggagagtgacatcatcgacctggagaagcgctactggctgctgaaggcccagagcaggacaggccgctttgacctggagaccttcggccccctggtgagcccccccatccggcccagcctgtctgagggcctcttcaatgcctttgatgagaacagagacaaccacatcgacttcaaggagatcagctgtggcctgagcgcctgctgccggggccccctggccgagcggcagaagttctgcttcaaggtgtttgatgtggacagagatggagtgctgagccgggtggagctgcgggacatggtggtggccctgctggaggtgtggaaggacaacagaacagatgacatccctgagctgcacatggacctgagtgacatcgtggagggcatcctgaatgcccatgacaccaccaagatgggccacctgaccctggaggactaccagatctggagcgtgaagaatgtgctggccaatgagttcctgaacctgctcttccaggtgtgccacatcgtgctgggcctgcggcctgccaccccagaggaggagggccagatcatccgcaccctggagacagaccagatctacaccagaaattag

SEQ ID NO: 175194 - DNA, 3372 bp, synthetic construct
  misc_feature 1..3372: note = Description of Artificial Sequence: Synthetic coding sequence
  source 1..3372: mol_type = other DNA
atgcccatcgtggacaagctgaaggaggccctgaagccaggcaggaaggacagcgcagatgatggagagctgggcaagctgctggccagcagcgccaagaaggtgctgctgcagaagattgaatttgagcccgccagcaagagcttctcctaccagctggaggccctgaagagcaaatatgtgctgctgaaccccaagacagaaggagccagccgccacaagtctggagatgatcctccagcccggcggcagggcagcgagcacacctatgagagctgtggagatggagtgcctgccccccagaaggtgctcttccccacagagcggctgagcctgcgctgggagagggtcttccgggtgggcgccggcctgcacaacctgggcaacacctgcttcctgaatgccaccatccagtgcctgacctacaccccacccctggccaactacctgctgagcaaggagcacgcccggagctgccaccagggcagcttctgcatgctgtgtgtgatgcagaaccacatcgtgcaggcctttgccaacagcggaaatgccatcaagcctgtgtccttcatccgggacctgaagaagatcgcccggcacttccgctttggaaaccaggaggatgcccacgagttcctgcgctacaccattgatgccatgcagaaggcctgcctgaatggctgtgccaagctggaccggcagacccaggccaccaccctggtgcaccagatctttggaggctacctgcggagccgggtgaagtgcagcgtgtgcaagtctgtgtctgacacctatgacccctacctggatgtggccctggagatccggcaggccgccaacatcgtgcgggccctggagctgtttgtgaaggcagatgtgctgtctggagaaaatgcctacatgtgtgccaagtgcaagaagaaggtgcctgccagcaagcgcttcaccatccacaggaccagcaatgtgctgaccctgagcctgaagagatttgccaacttcagcggcggcaagatcaccaaggatgtgggctacccagagttcctgaacatccggccctacatgagccagaacaatggagaccctgtgatgtatggcctgtatgctgtgctggtgcacagcggctacagctgccacgccggccactactactgctacgtgaaggccagcaatggccagtggtaccagatgaatgacagcctggtgcacagcagcaatgtgaaggtggtgctgaaccagcaggcctacgtgctcttctacctgcgcatccctggcagcaagaagagccctgagggcctcatcagcaggacaggcagcagcagcctgcccggccggcccagcgtcatcccagaccacagcaagaagaacattggaaatggcatcatcagcagccccctgaccgggaagaggcaggacagcggcaccatgaagaagccccacaccacagaggagattggagtgcccatcagcagaaatggcagcaccctgggcctgaagagccagaatggctgcatcccccccaagctgcccagcggcagccccagccccaagctgagccagacccccacccacatgcccaccatcctggatgaccccgggaagaaggtgaagaagccagccccaccccagcacttcagccccaggacagcccagggcctgcccggcaccagcaacagcaacagcagccgcagcggcagccagaggcagggctcctgggacagcagagatgtggtgctgagcaccagccccaagctgctggccacagccacagccaacggccacggcctgaagggaaatgatgagagcgctggcctggacagaagaggcagcagcagcagcagccctgagcacagcgccagcagtgacagcaccaaggccccccagacccccaggtctggggccgcccacctgtgtgacagccaggagaccaactgcagcacagctggccacagcaagaccccacccagcggggctgacagcaagacagtgaagctgaagagccctgtgctgagcaacaccaccacagagcccgccagcaccatgagccccccaccagccaagaagctggccctgagcgccaagaaggccagcaccctgtggagggccactggaaatgacctgcggcccccaccacccagccccagcagtgacctgacccaccccatgaagaccagccaccctgtggtggccagcacctggcctgtgcaccgggcccgggctgtgtccccagccccccagagcagcagccggctgcagccccccttcagcccccaccccaccctgctgagcagcacccccaagcccccaggcaccagcgagcccaggagctgcagcagcatcagcacagccctgccccaggtgaatgaagacctggtgtccctgccccaccagctgcctgaggccagcgagcccccccagagccccagcgagaagaggaagaagacctttgtgggggagccccagaggctgggcagcgagacccggctgccccagcacatccgggaggccacagctgcccctcatggcaagaggaagaggaagaagaagaagaggcctgaggacacagctgccagcgccctgcaggagggccagacccagaggcagcccggcagccccatgtacagaagagagggccaggcccagctgcctgctgtgcggcggcaggaggatggcacccagccccaggtgaatggccagcaggtgggctgtgtgacagatggccaccacgccagcagcaggaagagaagaagaaaaggagctgagggcctgggggaggagggcggcctgcaccaggaccccctgcggcacagctgcagccccatgggagatggagaccctgaggccatggaggagagccccaggaagaagaagaagaagaagaggaagcaggagacccagagagctgtggaggaggatggccacctgaagtgccccaggtctgccaagccccaggatgctgtggtgcctgagagcagcagctgtgcccccagcgccaacggctggtgccctggggacaggatgggcctgagccaggcccctcctgtgtcctggaatggagagcgggagagtgatgtggtgcaggagctgctgaagtacagcagtgacaaggcctacggcaggaaggtgctgacctgggatggcaagatgtctgctgtgtcccaggatgccatcgaggacagccggcaggccaggacagaaacagtggtggatgactgggatgaggagtttgaccggggcaaggagaagaagatcaagaagttcaagcgggagaagagaagaaacttcaatgccttccagaagctgcagaccaggaggaacttctggagcgtgacccacccagccaaggccgccagcctgagctacagaagatag

SEQ ID NO: 175195 - DNA, 1647 bp, synthetic construct
  misc_feature 1..1647: note = Description of Artificial Sequence: Synthetic coding sequence
  source 1..1647: mol_type = other DNA
atgcccatcgtggacaagctgaaggaggccctgaagccaggcaggaaggacagcgcagatgatggagagctgggcaagctgctggccagcagcgccaagaaggtgctgctgcagaagattgaatttgagcccgccagcaagagcttctcctaccagctggaggccctgaagagcaaatatgtgctgctgaaccccaagacagaaggagccagccgccacaagtctggagatgatcctccagcccggcggcagggcagcgagcacacctatgagagctgtggagatggagtgcctgccccccagaaggtgctcttccccacagagcggctgagcctgcgctgggagagggtcttccgggtgggcgccggcctgcacaacctgggcaacacctgcttcctgaatgccaccatccagtgcctgacctacaccccacccctggccaactacctgctgagcaaggagcacgcccggagctgccaccagggcagcttctgcatgctgtgtgtgatgcagaaccacatcgtgcaggcctttgccaacagcggaaatgccatcaagcctgtgtccttcatccgggacctgaagaagatcgcccggcacttccgctttggaaaccaggaggatgcccacgagttcctgcgctacaccattgatgccatgcagaaggcctgcctgaatggctgtgccaagctggaccggcagacccaggccaccaccctggtgcaccagatctttggaggctacctgcggagccgggtgaagtgcagcgtgtgcaagtctgtgtctgacacctatgacccctacctggatgtggccctggagatccggcaggccgccaacatcgtgcgggccctggagctgtttgtgaaggcagatgtgctgtctggagaaaatgcctacatgtgtgccaagtgcaagaagaaggtgcctgccagcaagcgcttcaccatccacaggaccagcaatgtgctgaccctgagcctgaagagatttgccaacttcagcggcggcaagatcaccaaggatgtgggctacccagagttcctgaacatccggccctacatgagccagaacaatggagaccctgtgatgtatggcctgtatgctgtgctggtgcacagcggctacagctgccacgccggccactactactgctacgtgaaggccagcaatggccagtggtaccagatgaatgacagcctggtgcacagcagcaatgtgaaggtggtgctgaaccagcaggcctacgtgctcttctacctgcgcatccctggcagcaagaagagccctgagggcctcatcagcaggacaggcagcagcagcctgcccggccggcccagcgtcatcccagaccacagcaagaagaacattggaaatggcatcatcagcagccccctgaccgggaagaggcaggacagcggcaccatgaagaagccccacaccacagaggagattggagtgcccatcagcagaaatggcagcaccctgggcctgaagagccagaatggctgcatcccccccaagctgcccagcggcagccccagccccaagctgagccagacccccacccacatgcccaccatcctggatgaccccgggaagaaggtgaagaagccagccccacccctgcccaccggcatgggctag

SEQ ID NO: 175196 - DNA, 2187 bp, synthetic construct
  misc_feature 1..2187: note = Description of Artificial Sequence: Synthetic coding sequence
  source 1..2187: mol_type = other DNA
atgtgtgccaagtgcaagaagaaggtgcctgccagcaagcgcttcaccatccacaggaccagcaatgtgctgaccctgagcctgaagagatttgccaacttcagcggcggcaagatcaccaaggatgtgggctacccagagttcctgaacatccggccctacatgagccagaacaatggagaccctgtgatgtatggcctgtatgctgtgctggtgcacagcggctacagctgccacgccggccactactactgctacgtgaaggccagcaatggccagtggtaccagatgaatgacagcctggtgcacagcagcaatgtgaaggtggtgctgaaccagcaggcctacgtgctcttctacctgcgcatccctggcagcaagaagagccctgagggcctcatcagcaggacaggcagcagcagcctgcccggccggcccagcgtcatcccagaccacagcaagaagaacattggaaatggcatcatcagcagccccctgaccgggaagaggcaggacagcggcaccatgaagaagccccacaccacagaggagattggagtgcccatcagcagaaatggcagcaccctgggcctgaagagccagaatggctgcatcccccccaagctgcccagcggcagccccagccccaagctgagccagacccccacccacatgcccaccatcctggatgaccccgggaagaaggtgaagaagccagccccaccccagcacttcagccccaggacagcccagggcctgcccggcaccagcaacagcaacagcagccgcagcggcagccagaggcagggctcctgggacagcagagatgtggtgctgagcaccagccccaagctgctggccacagccacagccaacggccacggcctgaagggaaatgatgagagcgctggcctggacagaagaggcagcagcagcagcagccctgagcacagcgccagcagtgacagcaccaaggccccccagacccccaggtctggggccgcccacctgtgtgacagccaggagaccaactgcagcacagctggccacagcaagaccccacccagcggggctgacagcaagacagtgaagctgaagagccctgtgctgagcaacaccaccacagagcccgccagcaccatgagccccccaccagccaagaagctggccctgagcgccaagaaggccagcaccctgtggagggccactggaaatgacctgcggcccccaccacccagccccagcagtgacctgacccaccccatgaagaccagccaccctgtggtggccagcacctggcctgtgcaccgggcccgggctgtgtccccagccccccagagcagcagccggctgcagccccccttcagcccccaccccacagctgccagcgccctgcaggagggccagacccagaggcagcccggcagccccatgtaccgccgggagggccaggcccagctgcctgctgtgcggcggcaggaggatggcacccagccccaggtgaatggccagcaggtgggctgtgtgacagatggccaccacgccagcagcaggaagagaagaagaaaaggagctgagggcctgggggaggagggcggcctgcaccaggaccccctgcggcacagctgcagccccatgggagatggagaccctgaggccatggaggagagccccaggaagaagaagaagaagaagaggaagcaggagacccagagagctgtggaggaggatggccacctgaagtgccccaggtctgccaagccccaggatgctgtggtgcctgagagcagcagctgtgcccccagcgccaacggctggtgccctggggacaggatgggcctgagccaggcccctcctgtgtcctggaatggagagcgggagagtgatgtggtgcaggagctgctgaagtacagcagtgacaaggcctacggcaggaaggtgctgacctgggatggcaagatgtctgctgtgtcccaggatgccatcgaggacagccggcaggccaggacagagaccgtggtggatgactgggatgaggagtttgaccggggcaaggagaagaagatcaagaagttcaagcgggagaagagaagaaacttcaatgccttccagaagctgcagaccaggaggaacttctggagcgtgacccacccagccaaggccgccagcctgagctacagaagatag

SEQ ID NO: 175197 - DNA, 3372 bp, synthetic construct; identical to SEQ ID NO: 175194
  misc_feature 1..3372: note = Description of Artificial Sequence: Synthetic coding sequence
  source 1..3372: mol_type = other DNA

SEQ ID NO: 175198 - DNA, 1698 bp, synthetic construct
  misc_feature 1..1698: note = Description of Artificial Sequence: Synthetic coding sequence
  source 1..1698: mol_type = other DNA
atgagcggccgcagcaagcgggagagccggggcagcacccggggcaagcgggagagcgagagccggggcagcagcggccgggtgaagcgggagcgggaccgggagcgggagcctgaggccgccagcagccggggcagccctgtgcgggtgaagcgggagtttgagcccgccagcgcccgggaggccccagcctctgtggtgccctttgtgcgggtgaagcgggagcgggaggtggatgaggacagcgagcctgagcgggaggtgcgggccaagaatggccgggtggacagcgaggaccggcgcagccgccactgcccctacctggacaccatcaacagatctgtgctggactttgattttgagaagctgtgcagcatcagcctgagccacatcaatgcctatgcctgcctggtgtgtgggaagtacttccagggccggggcctgaagagccacgcctacatccacagcgtgcagttcagccaccacgtgttcctgaacctgcacaccctgaagttctactgcctgcctgacaactatgagatcatcgacagcagcctggaggacatcacctacgtgctgaagcccaccttcaccaagcagcagatcgccaacctggacaagcaggccaagctgagccgggcctatgatggcaccacctacctgcccggcatcgtgggcctgaacaacatcaaggccaatgactatgccaatgctgtgctgcaggccctgagcaatgtgccccccctgaggaactacttcctggaggaggacaactacaagaacatcaagaggcctcctggggacatcatgttcctgctggtgcagagatttggagagctgatgaggaagctgtggaaccccaggaacttcaaggcccacgtgagcccccatgagatgctgcaggccgtggtgctgtgcagcaagaagaccttccagatcaccaagcagggagatggagtggacttcctgtcctggttcctgaatgccctgcacagcgccctgggcggcaccaagaagaagaagaagaccatcgtgacagatgtgttccagggctccatgaggatcttcaccaagaagctgccccacccagacctgcctgctgaggagaaggagcagctgctgcacaatgatgagtaccaggagaccatggtggagagcaccttcatgtacctgaccctggacctgcccacagcccccctgtacaaggatgagaaggagcagctgatcatcccccaggtgcccctcttcaacatcctggccaagttcaacggcatcacagagaaggagtacaagacctacaaggagaacttcctgaagcgcttccagctgaccaagctgcccccctacctgatcttctgcatcaagcgcttcaccaagaacaacttctttgtggagaagaaccccaccatcgtgaacttccccatcaccaacgtggacctgcgggagtacctgtctgaggaggtgcaggccgtgcacaagaacaccacctatgacctgattgccaacatcgtgcatgatggcaagcccagcgagggcagctaccgcatccacgtgctgcaccacggcaccgggaagtggtatgagctgcaggacctgcaggtgacagacatcctgccccagatgatcaccctgtctgaggcctacatccagatctggaagaggcgggacaatgatgagaccaaccagcagggcgcctag

SEQ ID NO: 175199 - DNA, 1698 bp, synthetic construct; identical to SEQ ID NO: 175198
  misc_feature 1..1698: note = Description of Artificial Sequence: Synthetic coding sequence
  source 1..1698: mol_type = other DNA

SEQ ID NO: 175200 - DNA, 1389 bp, synthetic construct
  misc_feature 1..1389: note = Description of Artificial Sequence: Synthetic coding sequence
  source 1..1389: mol_type = other DNA
atgctgacagctgtgcccagccacctgttcagcgccaagaatggccgggtggacagcgaggaccggcgcagccgccactgcccctacctggacaccatcaacagcttcagccccttccccaccggccggggcctgaagagccacgcctacatccacagcgtgcagttcagccaccacgtgttcctgaacctgcacaccctgaagttctactgcctgcctgacaactatgagatcatcgacagcagcctggaggacatcacctacgtgctgaagcccaccttcaccaagcagcagatcgccaacctggacaagcaggccaagctgagccgggcctatgatggcaccacctacctgcccggcatcgtgggcctgaacaacatcaaggccaatgactatgccaatgctgtgctgcaggccctgagcaatgtgccccccctgaggaactacttcctggaggaggacaactacaagaacatcaagaggcctcctggggacatcatgttcctgctggtgcagagatttggagagctgatgaggaagctgtggaaccccaggaacttcaaggcccacgtgagcccccatgagatgctgcaggccgtggtgctgtgcagcaagaagaccttccagatcaccaagcagggagatggagtggacttcctgtcctggttcctgaatgccctgcacagcgccctgggcggcaccaagaagaagaagaagaccatcgtgacagatgtgttccagggctccatgaggatcttcaccaagaagctgccccacccagacctgcctgctgaggagaaggagcagctgctgcacaatgatgagtaccaggagaccatggtggagagcaccttcatgtacctgaccctggacctgcccacagcccccctgtacaaggatgagaaggagcagctgatcatcccccaggtgcccctcttcaacatcctggccaagttcaacggcatcacagagaaggagtacaagacctacaaggagaacttcctgaagcgcttccagctgaccaagctgcccccctacctgatcttctgcatcaagcgcttcaccaagaacaacttctttgtggagaagaaccccaccatcgtgaacttccccatcaccaacgtggacctgcgggagtacctgtctgaggaggtgcaggccgtgcacaagaacaccacctatgacctgattgccaacatcgtgcatgatggcaagcccagcgagggcagctaccgcatccacgtgctgcaccacggcaccgggaagtggtatgagctgcaggacctgcaggtgacagacatcctgccccagatgatcaccctgtctgaggcctacatccagatctggaagagaagagacaatgatgagaccaaccagcagggcgcctag

SEQ ID NO: 175201 - DNA, 1467 bp, synthetic construct
  misc_feature 1..1467: note = Description of Artificial Sequence: Synthetic coding sequence
  source 1..1467: mol_type = other DNA
atgagcggccgcagcaagcgggagagccggggcagcacccggggcaagcgggagagcgagagccggggcagcagcggccgggtgaagcgggagcgggaccgggagcgggagcctgaggccgccagcagccggggcagccctgtgcgggtgaagcgggagtttgagcccgccagcgcccgggaggccccagcctctgtggtgccctttgtgcgggtgaagcgggagcgggaggtggatgaggacagcgagcctgagcgggaggtgcgggccaagaatggccgggtggacagcgaggaccggcgcagccgccactgcccctacctggacaccatcaacagatctgtgctggactttgattttgagaagctgtgcagcatcagcctgagccacatcaatgcctatgcctgcctggtgtgtgggaagtacttccagggccggggcctgaagagccacgcctacatccacagcgtgcagttcagccaccacgtgttcctgaacctgcacaccctgaagttctactgcctgcctgacaactatgagatcatcgacagcagcctggaggacatcacctacgtgctgaagcccaccttcaccaagcagcagatcgccaacctggacaagcaggccaagctgagccgggcctatgatggcaccacctacctgcccggcatcgtgggcctgaacaacatcaaggccaatgactatgccaatgctgtgctgcaggccctgagcaatgtgccccccctgaggaactacttcctggaggaggacaactacaagaacatcaagaggcctcctggggacatcatgttcctgctggtgcagagatttggagagctgatgaggaagctgtggaaccccaggaacttcaaggcccacgtgagcccccatgagatgctgcaggccgtggtgctgtgcagcaagaagaccttccagatcaccaagcagggagatggagtggacttcctgtcctggttcctgaatgccctgcacagcgccctgggcggcaccaagaagaagaagaagaccatcgtgacagatgtgttccagggctccatgaggatcttcaccaagaagctgccccacccagacctgcctgctgaggagaaggagcagctgctgcacaatgatgagtaccaggagaccatggtggagagcaccttcatgtacctgaccctggacctgcccacagcccccctgtacaaggatgagaaggagcagctgatcatcccccaggtgcccctcttcaacatcctggccaagttcaacggcatcacagagaaggagtacaagacctacaaggagaacttcctgaagcgcttccagctgaccaagctgcccccctacctgatcttctgcatcaagcgcttcaccaagaacaacttctttgtggagaagaaccccaccatcgtgaacttccccatcaccggccaggccaacggcatgaactacaagaccagcaggtag

SEQ ID NO: 175202 - DNA, 2892 bp, synthetic construct
  misc_feature 1..2892: note = Description of Artificial Sequence: Synthetic coding sequence
  source 1..2892: mol_type = other DNA
atggccgagggcggcggctgccgggagaggccagatgctgagacccagaagtctgagctgggccccctgatgaggaccaccctgcagagaggagcccagtggtacctgattgacagccgctggttcaagcagtggaagaagtatgtgggctttgacagctgggacatgtacaacgtgggggagcacaacctcttccctggccccatcgacaacagcggcctcttcagtgaccctgagagccagaccctgaaggagcacctgattgatgagctggactatgtgctggtgcccacagaggcctggaacaagctgctgaactggtacggctgtgtggagggccagcagcccatcgtgaggaaggtggtggagcacggcctgtttgtgaagcactgcaaggtggaggtgtacctgctggagctgaagctgtgtgagaacagcgaccccaccaacgtgctgagctgccacttcagcaaggctgacaccatcgccaccatcgagaaggagatgaggaagctgttcaacatcccagctgagcgggagacccggctgtggaacaagtacatgagcaacacctatgagcagctgagcaagctggacaacacagtgcaggatgctggcctgtaccagggccaggtgctggtgattgagccccagaatgaagatggcacctggccccggcagaccctgcagagcaagagcagcacagcccccagcaggaacttcaccaccagccccaagagcagcgccagcccctacagctctgtgtctgccagcctcatcgccaacggggacagcaccagcacctgtggcatgcacagcagcggcgtgtccagaggaggcagcggcttcagcgccagctacaactgccaggagccccccagcagccacatccagcccggcctgtgtggcctgggcaacctgggcaacacctgcttcatgaacagcgccctgcagtgcctgagcaacacagcccccctgacagactacttcctgaaggatgaatatgaagctgagatcaacagagacaaccccctgggcatgaagggggagattgctgaggcctatgcagagctgatcaagcagatgtggagcggcagagatgcccacgtggcccccaggatgttcaagacccaggtgggccgctttgccccccagttcagcggctaccagcagcaggacagccaggagctgctggccttcctgctggatggcctgcacgaggacctgaacagagtgaagaagaagccctacctggagctgaaggatgccaacggccgcccagatgctgtggtggccaaggaggcctgggagaaccaccggctgagaaatgattctgtgattgtggacaccttccacggcctcttcaagagcaccctggtgtgcccagaatgtgccaaggtgtctgtgacctttgaccccttctgctacctgaccctgcccctgcccctgaagaaggacagagtgatggaggtgttcctggtgcctgctgacccccactgccggcccacccagtacagagtgacagtgcccctgatgggcgctgtgtctgacctgtgtgaggccctgagccggctgagcggcattgctgctgagaacatggtggtggctgatgtgtacaaccaccgcttccacaagatcttccagatggatgagggcctgaaccacatcatgcccagagatgacatctttgtgtatgaggtgtgcagcacctctgtggatggctctgaatgtgtgaccctgcctgtgtacttccgggagaggaagagccggcccagcagcaccagcagcgccagcgccctgtatggccagcccctgctgctgtctgtgcccaagcacaagctgaccctggagagcctgtaccaggccgtgtgtgaccgcatcagccgctacgtgaagcagcccctgcctgatgaatttggcagcagccccctggagcccggggcctgcaatggcagcaggaacagctgtgaaggagaagatgaggaggagatggagcaccaggaggagggcaaggagcagctgtctgaaacagagggcagcggggaggatgagcctggaaatgaccccagcgagaccacccagaagaagatcaagggccagccctgccccaagaggctcttcaccttcagcctggtgaacagctatggaacagctgacatcaacagcctggccgcagatggcaagctgctgaagctgaacagccgcagcaccctggccatggactgggacagcgagacccggcggctgtactatgatgagcaggagagcgaggcctatgagaagcacgtgtccatgctgcagccccagaagaagaagaagaccaccgtggccctgcgggactgcatcgagctgttcaccaccatggagaccctgggggagcatgacccctggtactgccccaactgcaagaagcaccagcaggccaccaagaagtttgacctgtggagcctgcccaagatcctggtggtgcacctgaagcgcttctcctacaaccgctactggagggacaagctggacacagtggtggagttccccatccggggcctgaacatgtctgaatttgtgtgcaacctgagcgcccggccctacgtgtatgacctgattgctgtgagcaaccactacggggccatgggcgtgggccactacacagcctatgccaagaacaagctgaatggcaagtggtactactttgatgacagcaatgtgtccctggccagcgaggaccagatcgtgaccaaggccgcctacgtgctcttctaccagaggagagatgatgagttctacaagacccccagcctgagcagcagcggcagcagtgatggcggcacccggcccagcagcagccagcagggctttggagatgatgaggcctgcagcatggacaccaactag

SEQ ID NO: 175203 - DNA, 2751 bp, synthetic construct
  misc_feature 1..2751: note = Description of Artificial Sequence: Synthetic coding sequence
  source 1..2751: mol_type = other DNA
atggccgagggcggcggctgccgggagaggccagatgctgagacccagaagtctgagctgggccccctgatgaggaccaccctgcagagaggagcccagtggtacctgattgacagccgctggttcaagcagtggaagaagtatgtgggctttgacagctgggacatgtacaacgtgggggagcacaacctcttccctggccccatcgacaacagcggcctcttcagtgaccctgagagccagaccctgaaggagcacctgattgatgagctggactatgtgctggtgcccacagaggcctggaacaagctgctgaactggtacggctgtgtggagggccagcagcccatcgtgaggaaggtggtggagcacggcctgtttgtgaagcactgcaaggtggaggtgtacctgctggagctgaagctgtgtgagaacagcgaccccaccaacgtgctgagctgccacttcagcaaggctgacaccatcgccaccatcgagaaggagatgaggaagctgttcaacatcccagctgagcgggagacccggctgtggaacaagtacatgagcaacacctatgagcagctgagcaagctggacaacacagtgcaggatgctggcctgtaccagggccaggtgctggtgattgagccccagaatgaagatggcacctggccccggcagaccctgcagagcaatggcagcggcttcagcgccagctacaactgccaggagccccccagcagccacatccagcccggcctgtgtggcctgggcaacctgggcaacacctgcttcatgaacagcgccctgcagtgcctgagcaacacagcccccctgacagactacttcctgaaggatgaatatgaggccgagatcaacagagacaaccccctgggcatgaagggggagattgctgaggcctatgcagagctgatcaagcagatgtggagcggcagagatgcccacgtggcccccaggatgttcaagacccaggtgggccgctttgccccccagttcagcggctaccagcagcaggacagccaggagctgctggccttcctgctggatggcctgcacgaggacctgaacagagtgaagaagaagccctacctggagctgaaggatgccaacggccgcccagatgctgtggtggccaaggaggcctgggagaaccaccggctgagaaatgacagcgtcatcgtggacaccttccacggcctcttcaagagcaccctggtgtgcccagaatgtgccaaggtgtctgtgacctttgaccccttctgctacctgaccctgcccctgcccctgaagaaggacagagtgatggaggtgttcctggtgcctgctgacccccactgccggcccacccagtacagagtgacagtgcccctgatgggcgctgtgtctgacctgtgtgaggccctgagccggctgtctggaattgctgctgagaacatggtggtggctgatgtgtacaaccaccgcttccacaagatcttccagatggatgagggcctgaaccacatcatgcccagagatgacatctttgtgtatgaggtgtgcagcacctctgtggatggctctgaatgtgtgaccctgcctgtgtacttccgggagaggaagagccggcccagcagcaccagcagcgccagcgccctgtatggccagcccctgctgctgtctgtgcccaagcacaagctgaccctggagagcctgtaccaggccgtgtgtgaccgcatcagccgctacgtgaagcagcccctgcctgatgaatttggcagcagccccctggagcccggggcctgcaatggcagcaggaacagctgtgagggggaggatgaggaggagatggagcaccaggaggagggcaaggagcagctgtctgaaacagagggcagcggagaagatgagcctggaaatgaccccagcgagaccacccagaagaagatcaagggccagccctgccccaagaggctcttcaccttcagcctggtgaacagctatggaacagctgacatcaacagcctggccgcagatggcaagctgctgaagctgaacagccgcagcaccctggccatggactgggacagcgagacccggcggctgtactatgatgagcaggagagcgaggcctatgagaagcacgtgtccatgctgcagccccagaagaagaagaagaccaccgtggccctgcgggactgcatcgagctgttcaccaccatggagaccctgggggagcatgacccctggtactgccccaactgcaagaagcaccagcaggccaccaagaagtttgacctgtggagcctgcccaagatcctggtggtgcacctgaagcgcttctcctacaaccgctactggagggacaagctggacacagtggtggagttccccatccggggcctgaacatgtctgaatttgtgtgcaacctgagcgcccggccctacgtgtatgacctgattgctgtgagcaaccactatggagccatgggcgtgggccactacacagcctatgccaagaacaagctgaatggcaagtggtactactttgatgacagcaatgtgtccctggccagcgaggaccagatcgtgaccaaggccgcctacgtgctcttctaccagaggagagatgatgagttctacaagacccccagcctgagcagcagcggcagcagtgatggcggcacccggcccagcagcagccagcagggctttggagatgatgaggcctgcagcatggacaccaactag

SEQ ID NO: 175204 - DNA, 942 bp, synthetic construct
  misc_feature 1..942: note = Description of Artificial Sequence: Synthetic coding sequence
  source 1..942: mol_type = other DNA
atggccgagggcggcggctgccgggagaggccagatgctgagacccagaagtctgagctgggccccctgatgaggaccaccctgcagagaggagcccagtggtacctgattgacagccgctggttcaagcagtggaagaagtatgtgggctttgacagctgggacatgtacaacgtgggggagcacaacctcttccctggccccatcgacaacagcggcctcttcagtgaccctgagagccagaccctgaaggagcacctgattgatgagctggactatgtgctggtgcccacagaggcctggaacaagctgctgaactggtacggctgtgtggagggccagcagcccatcgtgaggaaggtggtggagcacggcctgtttgtgaagcactgcaaggtggaggtgtacctgctggagctgaagctgtgtgagaacagcgaccccaccaacgtgctgagctgccacttcagcaaggctgacaccatcgccaccatcgagaaggagatgaggaagctgttcaacatcccagctgagcgggagacccggctgtggaacaagtacatgagcaacacctatgagcagctgagcaagctggacaacacagtgcaggatgctggcctgtaccagggccaggtgctggtgattgagccccagaatgaagatggcacctggccccggcagaccctgcagagcaaggtgtccttcttcctgccccggctggagtgcaatggagccatcctggcccactgcaacttctgcctgcccggcagcagcaacagccctgccagcgccagccgggtggcccccagccacctggccaacttcttcttctttgagatggagagccacagcgtgaccaagctggagtgtggcggcgctgtgtctgcctacagccgggtgcaggtgatgctgctgccccagcccccagagtggctgggctag

SEQ ID NO: 175205 - DNA, 2139 bp, synthetic construct
  misc_feature 1..2139: note = Description of Artificial Sequence: Synthetic coding sequence
  source 1..2139: mol_type = other DNA
atgctggccatggacacctgcaagcacgtgggccagctgcagctggcccaggaccacagcagcctgaacccccagaagtggcactgtgtggactgcaacaccacagagagcatctgggcctgcctgagctgcagccacgtggcctgtggccgctacatcgaggagcacgccctgaagcacttccaggagagcagccaccctgtggccctggaggtgaatgagatgtatgtgttctgctacctgtgtgatgattatgtgctgaatgacaacaccaccggggacctgaagctgctgcggaggaccctgagcgccatcaagagccagaactaccactgcaccaccaggagcggccgcttcctgcgctccatgggcactggagatgacagctacttcctgcatgatggagcccagagcctgctgcagagcgaggaccagctgtacacagccctgtggcacagaagacgcatcctgatgggcaagatcttccgcacctggtttgagcagagccccatcggcaggaagaagcaggaggagcccttccaggagaagatcgtggtgaagcgggaggtgaagaagaggcggcaggagctggagtaccaggtgaaggccgagctggagagcatgccacccaggaagagcctgcggctgcagggcctggcccagagcaccatcattgaaattgtgtctgtgcaggtgcctgcccagaccccagccagccctgccaaggacaaggtgctgagcaccagtgaaaatgagatcagccagaaggtgtctgacagctctgtgaagaggcggcccatcgtgaccccaggagtgacaggcctgaggaacctgggcaacacctgctacatgaacagcgtgctgcaggtgctgagccacctgctgatcttccggcagtgcttcctgaagctggacctgaaccagtggctggccatgacagccagcgagaagaccaggagctgcaagcacccccctgtgacagacacagtggtgtaccagatgaatgaatgccaggagaaggacaccggctttgtgtgcagccggcagagcagcctgagcagcggcctgtctggaggagccagcaagggcaggaagatggagctgatccagcccaaggagcccaccagccagtacatcagcctgtgccacgagctgcacaccctcttccaggtgatgtggagcggcaagtgggccctggtgagcccctttgccatgctgcacagcgtgtggaggctcatcccagccttccggggctacgcccagcaggatgcccaggagttcctgtgtgagctgctggacaagatccagcgggagctggagaccaccggcaccagcctgcctgccctgatccccaccagccagaggaagctgatcaagcaggtgctgaatgtggtgaacaacatcttccacggccagctgctgagccaggtgacctgcctggcctgtgacaacaagagcaacaccatcgagcccttctgggacctgagcctggagttccctgagcgctaccagtgcagcggcaaggacatcgccagccagccctgcctggtgacagagatgctggccaagttcacagaaacagaggccctggagggcaagatctacgtgtgtgaccagtgcaacagcaagagaagacgcttcagcagcaagcctgtggtgctgacagaggcccagaagcagctgatgatctgccacctgccccaggtgctgcggctgcacctgaagcgcttccgctggagcggcaggaacaaccgggagaagattggagtgcacgtgggctttgaggagatcctgaacatggagccctactgctgccgggagaccctgaagagcctgcggcctgagtgcttcatctatgacctgtctgctgtggtgatgcaccacggcaagggcttcggcagcggccactacacagcctactgctacaacagcgagggcggcttctgggtgcactgcaatgacagcaagctgtccatgtgcaccatggatgaggtgtgcaaggcccaggcctacatcctcttctacacccagagggtgacagaaaatggccacagcaagctgctgcccccagagctgctgctgggcagccagcaccccaatgaagatgctgacaccagcagcaatgagatcctgtcctag

SEQ ID NO: 175206 - DNA, 2139 bp, synthetic construct; identical to SEQ ID NO: 175205
  misc_feature 1..2139: note = Description of Artificial Sequence: Synthetic coding sequence
  source 1..2139: mol_type = other DNA

SEQ ID NO: 175207 - DNA, 2139 bp, synthetic construct; identical to SEQ ID NO: 175205
  misc_feature 1..2139: note = Description of Artificial Sequence: Synthetic coding sequence
  source 1..2139: mol_type = other DNA

SEQ ID NO: 175208 - DNA, 336 bp, synthetic construct
  misc_feature 1..336: note = Description of Artificial Sequence: Synthetic coding sequence
  source 1..336: mol_type = other DNA
atgctggccatggacacctgcaagcacgtgggccagctgcagctggcccaggaccacagcagcctgaacccccagaagtggcactgtgtggactgcaacaccacagagagcatctgggcctgcctgagctgcagccacgtggcctgtggccgctacatcgaggagcacgccctgaagcacttccaggagagcagccaccctgtggccctggaggtgaatgagatgtatgtgttctgctacctgtgtgatgattatgtgctgaatgacaacaccaccggggacctgaagctgctgcggaggaccctgagcgccatcaagagccagaactaccactag

SEQ ID NO: 175209 - DNA, 495 bp, synthetic construct
  misc_feature 1..495: note = Description of Artificial Sequence: Synthetic coding sequence
  source 1..495: mol_type = other DNA
atgctggccatggacacctgcaagcacgtgggccagctgcagctggcccaggaccacagcagcctgaacccccagaagtggcactgtgtggactgcaacaccacagagagcatctgggcctgcctgagctgcagccacgtggcctgtggccgctacatcgaggagcacgccctgaagcacttccaggagagcagccaccctgtggccctggaggtgaatgagatgtatgtgttctgctacctgtgtgatgattatgtgctgaatgacaacaccaccggggacctgaagctgctgcggaggaccctgagcgccatcaagagccagaactaccactgcaccaccaggagcggccgcttcctgcgctccatgggcactggagatgacagctacttcctgcatgatggagcccagagcctgctgcagagcgaggaccagctgtacacagccctgtggcacagaagacgcatcctgatgggcaagatcttccgcacctag

SEQ ID NO: 175210 - DNA, 1101 bp, synthetic construct
  misc_feature 1..1101: note = Description of Artificial Sequence: Synthetic coding sequence
  source 1..1101: mol_type = other DNA
atgacagtgaggaacatcgccagcatctgcaacatgggcaccaatgccagcgccctggagaaggacatcggccctgagcagttccccatcaatgagcactacttcggcctggtgaactttggaaacacctgctactgcaacagcgtgctgcaggccctgtacttctgccggcccttcagagaaaatgtgctggcctacaaggcccagcagaagaagaaggagaacctgctgacctgcctggccgacctcttccacagcatcgccacccagaagaagaaggtgggcgtcatcccccccaagaagttcatcagccggctgaggaaagaaaatgacctgtttgacaactacatgcagcaggatgcccacgagttcctgaactacctgctgaacaccatcgctgacatcctgcaggaggagaagaagcaggagaagcagaatggcaagctgaagaatggaaacatgaatgaacctgctgagaacaacaagccagagctgacctgggtgcatgagatcttccagggcaccctgaccaatgagacccgctgcctgaactgtgaaacagtgagcagcaaggatgaggacttcctggacctgtctgtggatgtggagcagaacaccagcatcacccactgcctgcgggacttcagcaacacagagaccctgtgcagcgagcagaagtactactgtgagacctgctgcagcaagcaggaggcccagaagaggatgagggtgaagaagctgcccatgatcctggccctgcacctgaagcgcttcaagtacatggagcagctgcaccgctacaccaagctgagctacagagtggtgttccccctggagctgcggctcttcaacaccagcagtgatgctgtgaacctggacaggatgtatgacctggtggccgtggtggtgcactgcggcagcggccccaacagaggccactacatcaccatcgtgaagagccacggcttctggctgctgtttgatgatgacatcgtggagaagattgatgcccaggccatcgaggagttctacggcctgaccagtgacatcagcaagaacagcgagagcggctacatcctcttctaccagagccgggagtag

SEQ ID NO: 175211 - DNA, 1080 bp, synthetic construct
  misc_feature 1..1080: note = Description of Artificial Sequence: Synthetic coding sequence
  source 1..1080: mol_type = other DNA
atgaactgcttccagggcaccaatgccagcgccctggagaaggacatcggccctgagcagttccccatcaatgagcactacttcggcctggtgaactttggaaacacctgctactgcaacagcgtgctgcaggccctgtacttctgccggcccttccgggagaatgtgctggcctacaaggcccagcagaagaagaaggagaacctgctgacctgcctggccgacctcttccacagcatcgccacccagaagaagaaggtgggcgtcatcccccccaagaagttcatcagccggctgaggaaagaaaatgacctgtttgacaactacatgcagcaggatgcccacgagttcctgaactacctgctgaacaccatcgctgacatcctgcaggaggagaagaagcaggagaagcagaatggcaagctgaagaatggaaacatgaatgaacctgctgagaacaacaagccagagctgacctgggtgcatgagatcttccagggcaccctgaccaatgagacccgctgcctgaactgtgagaccgtgagcagcaaggatgaggacttcctggacctgtctgtggatgtggagcagaacaccagcatcacccactgcctgcgggacttcagcaacacagagaccctgtgcagcgagcagaagtactactgtgagacctgctgcagcaagcaggaggcccagaagaggatgagggtgaagaagctgcccatgatcctggccctgcacctgaagcgcttcaagtacatggagcagctgcaccgctacaccaagctgagctacagagtggtgttccccctggagctgcggctcttcaacaccagcagtgatgctgtgaacctggacaggatgtatgacctggtggccgtggtggtgcactgcggcagcggccccaacagaggccactacatcaccatcgtgaagagccacggcttctggctgctgtttgatgatgacatcgtggagaagattgatgcccaggccatcgaggagttctacggcctgaccagtgacatcagcaagaacagcgagagcggctacatcctcttctaccagagccgggagtag

SEQ ID NO: 175212 - DNA, 4221 bp, synthetic construct
  misc_feature 1..4221: note = Description of Artificial Sequence: Synthetic coding sequence
  source 1..4221: mol_type = other DNA
atggacatggtggagaatgctgacagcctgcaggcccaggagaggaaggacatcctgatgaagtatgacaagggccaccgggccggcctgcctgaggacaagggccctgagcctgtgggcatcaacagcagcattgaccgcttcggcatcctgcacgagacagagctgccccctgtgacagcccgggaggccaagaagatccggcgggagatgaccaggaccagcaagtggatggagatgctgggggagtgggagacctacaagcacagcagcaagctgattgacagagtgtacaagggcatccccatgaacatccggggccctgtgtggagcgtgctgctgaacatccaggagatcaagctgaagaaccctggccgctaccagatcatgaaggagcggggcaagaggagcagcgagcacatccaccacatcgacctggatgtgaggaccaccctgagaaatcatgtgttcttccgggaccgctacggggccaagcagcgggagctgttctacatcctgctggcctacagcgagtacaaccctgaggtgggctactgccgggacctgagccacatcacagccctcttcctgctgtacctgcctgaagaagatgccttctgggccctggtgcagctgctggccagcgagcggcacagcctgcccggcttccacagccccaatggaggcaccgtgcagggcctgcaggaccagcaggagcacgtggtgcccaagagccagcccaagaccatgtggcaccaggacaaggagggcctgtgtggccagtgtgccagcctgggctgcctgctgaggaacctgattgatggcatcagcctgggcctgaccctgcggctgtgggatgtgtacctggtggagggggagcaggtgctgatgcccatcaccagcatcgccctgaaggtgcagcagaagaggctgatgaagaccagccgctgtggcctgtgggcccggctgaggaaccagttctttgacacctgggccatgaatgatgacacagtgctgaagcacctgcgggccagcaccaagaagctgaccaggaagcagggcgacctgcccccaccagccaagcgggagcagggcagcctggcccccaggcctgtgcctgccagcagaggaggcaagaccctgtgcaagggctaccggcaggcccctcctggccccccagcccagttccagaggcccatctgcagcgccagccccccctgggccagccgcttcagcaccccctgccctgggggcgctgtgcgggaggacacctaccctgtgggcacccagggcgtgcccagcctggccctggcccagggcggcccccagggctcctggaggttcctggagtggaagtccatgccccggctgcccacagacctggacattggaggcccctggttcccccactatgactttgagtggagctgctgggtgcgggccatcagccaggaggaccagctggccacctgctggcaggccgagcactgtggggaggtgcacaacaaggacatgtcctggccagaggagatgtccttcaccgccaacagcagcaagattgaccggcagaaggtgcccacagagaagggggccaccggcctgagcaacctgggcaacacctgcttcatgaacagcagcatccagtgtgtgagcaacacccagcccctgacccagtacttcatcagcggccgccacctgtatgagctgaacagaaccaaccccatcggcatgaagggccacatggccaagtgctatggagacctggtgcaggagctgtggagcggcacccagaagtctgtggcccccctgaagctgcggaggaccatcgccaagtatgcccccaagtttgatggcttccagcagcaggacagccaggagctgctggccttcctgctggatggcctgcacgaggacctgaacagagtgcatgagaagccctacgtggagctgaaggacagtgatggccgcccagactgggaggtggccgctgaggcctgggacaaccacctgcggaggaacagaagcatcatcgtggacctcttccacggccagctgcggagccaggtgaagtgcaagacctgtggccacatctctgtgcgctttgaccccttcaacttcctgagcctgcccctgcccatggacagctacatggacctggagatcaccgtcatcaagctggatggcaccacccctgtgcgctatggcctgcggctgaacatggatgagaagtacacaggcctgaagaagcagctgcgggacctgtgtggcctgaacagcgagcagatcctgctggccgaggtgcatgacagcaacatcaagaacttcccccaggacaaccagaaggtgcagctgtctgtgtctggcttcctgtgtgcctttgagatccctgtgcccagcagccccatcagcgccagcagccccacccagattgacttcagcagcagccccagcaccaacggcatgttcaccctgaccaccaatggagacctgcccaagcccatcttcatccccaacggcatgcccaacacagtggtgccctgtggcacagagaagaacttcaccaacggcatggtgaatggccacatgcccagcctgcctgacagccccttcaccggctacatcatcgctgtgcacaggaagatgatgaggacagagctgtacttcctgagcccccaggagaaccggcccagcctgtttggcatgcccctcatcgtgccctgcaccgtgcacaccaggaagaaggacctgtatgatgctgtgtggatccaggtgtcctggctggcccggcccctgcccccccaggaggccagcatccacgcccaggaccgggacaactgcatgggctaccagtaccccttcaccctgcgggtggtgcagaaggatggcaacagctgtgcctggtgcccccagtaccgcttctgccggggctgcaagattgactgtggagaagatcgggccttcatcggaaatgcctacatcgctgtggactggcaccccacagccctgcacctgcgctaccagaccagccaggagcgggtggtggacaagcatgaatctgtggagcagagccggcgggcccaggccgagcccatcaacctggacagctgcctgcgggccttcaccagcgaggaggagctgggggagagcgagatgtactactgcagcaagtgcaagacccactgcctggccaccaagaagctggacctgtggaggctgccccccttcctgatcatccacctgaagcgcttccagtttgtgaatgaccagtggatcaagagccagaagatcgtgcgcttcctgcgggagagctttgaccccagcgccttcctggtgccccgggaccctgccctgtgccagcacaagcccctgaccccccagggagatgagctgagcaagccccgcatcctggcccgggaggtgaagaaggtggatgcccagagcagcgctgggaaggaggacatgctgctgagcaagagccccagcagcctgagcgccaacatcagcagcagccccaagggcagccccagcagcagcaggaagagcggcaccagctgccccagcagcaagaacagcagccccaacagcagccccaggaccctgggccgcagcaagggccgcctgcggctgccccagatcggcagcaagaacaagcccagcagcagcaagaagaacctggatgccagcaaagaaaatggagctggccagatctgtgagctggctgatgccctgagccggggccacatgaggggcggcagccagcctgagctggtgaccccccaggaccacgaggtggccctggccaacggcttcctgtatgagcacgaggcctgtggaaatggctgtggagatggctacagcaatggccagctgggcaaccacagcgaggaggacagcacagatgaccagcgggaggacacccacatcaagcccatctacaacctgtatgccatcagctgccacagcggcatcctgagcggcggccactacatcacctacgccaagaaccccaactgcaagtggtactgctacaatgacagcagctgtgaggagctgcacccagatgaaattgacacagacagcgcctacatcctcttctatgagcagcagggcattgattatgcccagttcctgcccaagattgatggcaagaagatggctgacaccagcagcacagatgaagattctgagagtgactatgagaagtacagcatgctgcagtag

SEQ ID NO: 175213 - DNA, 3270 bp, synthetic construct
  misc_feature 1..3270: note = Description of Artificial Sequence: Synthetic coding sequence
  source 1..3270: mol_type = other DNA
atgccccagaggctgccccacgcccggcagcacacccccctgcccctgggcagcgctgactaccgccgggtggtgtctgtgcggccccagggcccccaccgggaccccaaggacagcagagatgctgccaagcgggagcagggcagcctggcccccaggcctgtgcctgccagccggggcggcaagaccctgtgcaagggctaccggcaggcccctcctggccccccagcccagttccagaggcccatctgcagcgccagccccccctgggccagccgcttcagcaccccctgccctggaggagctgtgcgggaggacacctaccctgtgggcacccagggcgtgcccagcctggccctggcccagggcggcccccagggctcctggaggttcctggagtggaagtccatgccccggctgcccacagacctggacatcggcggcccctggttcccccactatgactttgagtggagctgctgggtgcgggccatcagccaggaggaccagctggccacctgctggcaggccgagcactgtggggaggtgcacaacaaggacatgtcctggccagaggagatgtccttcaccgccaacagcagcaagattgaccggcagaaggtgcccacagagaagggggccaccggcctgagcaacctgggcaacacctgcttcatgaacagcagcatccagtgtgtgagcaacacccagcccctgacccagtacttcatcagcggccgccacctgtatgagctgaacagaaccaaccccatcggcatgaagggccacatggccaagtgctacggggacctggtgcaggagctgtggagcggcacccagaagtctgtggcccccctgaagctgcggaggaccatcgccaagtatgcccccaagtttgatggcttccagcagcaggacagccaggagctgctggccttcctgctggatggcctgcacgaggacctgaacagagtgcatgagaagccctacgtggagctgaaggacagtgatggccgcccagactgggaggtggccgctgaggcctgggacaaccacctgcggaggaacagaagcatcatcgtggacctcttccacggccagctgcggagccaggtgaagtgcaagacctgtggccacatctctgtgcgctttgaccccttcaacttcctgagcctgcccctgcccatggacagctacatggacctggagatcaccgtcatcaagctggatggcaccacccctgtgcgctatggcctgcggctgaacatggatgagaagtacacaggcctgaagaagcagctgcgggacctgtgtggcctgaacagcgagcagatcctgctggccgaggtgcatgacagcaacatcaagaacttcccccaggacaaccagaaggtgcagctgtctgtgtctggcttcctgtgtgcctttgagatccctgtgcccagcagccccatcagcgccagcagccccacccagattgacttcagcagcagccccagcaccaacggcatgttcaccctgaccaccaacggggacctgcccaagcccatcttcatccccaacggcatgcccaacacagtggtgccctgtggcacagagaagaacttcaccaacggcatggtgaatggccacatgcccagcctgcctgacagccccttcaccggctacatcatcgctgtgcacaggaagatgatgaggacagagctgtacttcctgagcccccaggagaaccggcccagcctgtttggcatgcccctgattgtgccctgcaccgtgcacaccaggaagaaggacctgtatgatgctgtgtggatccaggtgtcctggctggcccggcccctgcccccccaggaggccagcatccacgcccaggaccgggacaactgcatgggctaccagtaccccttcaccctgcgggtggtgcagaaggatggcaacagctgtgcctggtgcccccagtaccgcttctgccggggctgcaagattgactgtggggaggaccgggccttcatcggaaatgcctacatcgctgtggactggcaccccacagccctgcacctgcgctaccagaccagccaggagcgggtggtggacaagcatgagagcgtggagcagagcagaagagcccaggccgagcccatcaacctggacagctgcctgcgggccttcaccagcgaggaggagctgggggagagcgagatgtactactgcagcaagtgcaagacccactgcctggccaccaagaagctggacctgtggaggctgccccccttcctgatcatccacctgaagcgcttccagtttgtgaatgaccagtggatcaagagccagaagatcgtgcgcttcctgcgggagagctttgaccccagcgccttcctggtgccccgggaccctgccctgtgccagcacaagcccctgaccccccagggagatgagctgagcaagccccgcatcctggcccgggaggtgaagaaggtggatgcccagagcagcgctgggaaggaggacatgctgctgagcaagagccccagcagcctgagcgccaacatcagcagcagccccaagggcagccccagcagcagcaggaagagcggcaccagctgccccagcagcaagaacagcagccccaacagcagccccaggaccctgggccgcagcaagggccgcctgcggctgccccagatcggcagcaagaacaagcccagcagcagcaagaagaacctggatgccagcaaagaaaatggagctggccagatctgtgagctggctgatgccctgagccggggccacatgagaggaggcagccagcctgagctggtgaccccccaggaccacgaggtggccctggccaacggcttcctgtatgaacatgaggcctgtggaaatggctgtggagatggctacagcaatggccagctgggcaaccacagcgaggaggacagcacagatgaccagcgggaggacacccacatcaagcccatctacaacctgtatgccatcagctgccacagcggcatcctgagcggcggccactacatcacctacgccaagaaccccaactgcaagtggtactgctacaatgacagcagctgtgaggagctgcacccagatgaaattgacacagattctgcctacatcctcttctatgagcagcagggcatcgactatgcccagttcctgcccaagattgatggcaagaagatggctgacaccagcagcacagatgaggacagcgagagtgactatgagaagtacagcatgctgcagtag

SEQ ID NO: 175214 - DNA, 2361 bp, synthetic construct
  misc_feature 1..2361: note = Description of Artificial Sequence: Synthetic coding sequence
  source 1..2361: mol_type = other DNA
atggacatggtggagaatgctgacagcctgcaggcccaggagaggaaggacatcctgatgaagtatgacaagggccaccgggccggcctgcctgaggacaagggccctgagcctgtgggcatcaacagcagcattgaccgcttcggcatcctgcacgagacagagctgccccctgtgacagcccgggaggccaagaagatccggcgggagatgaccaggaccagcaagtggatggagatgctgggggagtgggagacctacaagcacagcagcaagctgattgacagagtgtacaagggcatccccatgaacatccggggccctgtgtggagcgtgctgctgaacatccaggagatcaagctgaagaaccctggccgctaccagatcatgaaggagcggggcaagaggagcagcgagcacatccaccacatcgacctggatgtgaggaccaccctgagaaatcatgtgttcttccgggaccgctacggggccaagcagcgggagctgttctacatcctgctggcctacagcgagtacaaccctgaggtgggctactgccgggacctgagccacatcacagccctcttcctgctgtacctgcctgaagaagatgccttctgggccctggtgcagctgctggccagcgagcggcacagcctgcccggcttccacagccccaatggaggcaccgtgcagggcctgcaggaccagcaggagcacgtggtgcccaagagccagcccaagaccatgtggcaccaggacaaggagggcctgtgtggccagtgtgccagcctgggctgcctgctgaggaacctgattgatggcatcagcctgggcctgaccctgcggctgtgggatgtgtacctggtggagggggagcaggtgctgatgcccatcaccagcatcgccctgaaggtgcagcagaagaggctgatgaagaccagccgctgtggcctgtgggcccggctgaggaaccagttctttgacacctgggccatgaatgatgacacagtgctgaagcacctgcgggccagcaccaagaagctgaccaggaagcagggcgacctgcccccaccagccaagcgggagcagggcagcctggcccccaggcctgtgcctgccagcagaggaggcaagaccctgtgcaagggctaccggcaggcccctcctggccccccagcccagttccagaggcccatctgcagcgccagccccccctgggccagccgcttcagcaccccctgccctgggggcgctgtgcgggaggacacctaccctgtgggcacccagggcgtgcccagcctggccctggcccagggcggcccccagggctcctggaggttcctggagtggaagtccatgccccggctgcccacagacctggacattggaggcccctggttcccccactatgactttgagtggagctgctgggtgcgggccatcagccaggaggaccagctggccacctgctggcaggccgagcactgtggggaggtgcacaacaaggacatgtcctggccagaggagatgtccttcaccgccaacagcagcaagattgaccggcagaaggtgcccacagagaagggggccaccggcctgagcaacctgggcaacacctgcttcatgaacagcagcatccagtgtgtgagcaacacccagcccctgacccagtacttcatcagcggccgccacctgtatgagctgaacagaaccaaccccatcggcatgaagggccacatggccaagtgctatggagacctggtgcaggagctgtggagcggcacccagaagtctgtggcccccctgaagctgcggaggaccatcgccaagtatgcccccaagtttgatggcttccagcagcaggacagccaggagctgctggccttcctgctggatggcctgcacgaggacctgaacagagtgcatgagaagccctacgtggagctgaaggacagtgatggccgcccagactgggaggtggccgctgaggcctgggacaaccacctgcggaggaacagaagcatcatcgtggacctcttccacggccagctgcggagccaggtgaagtgcaagacctgtggccacatctctgtgcgctttgaccccttcaacttcctgagcctgcccctgcccatggacagctacatggacctggagatcaccgtcatcaagctggatggcaccacccctgtgcgctatggcctgcggctgaacatggatgagaagtacacaggcctgaagaagcagctgcgggacctgtgtggcctgaacagcgagcagatcctgctggccgaggtgcatgacagcaacatcaagatcagccccctgcaccacctgcagatggagtgcagcccctag

SEQ ID NO: 175215 - DNA, 84 bp, synthetic construct
  misc_feature 1..84: note = Description of Artificial Sequence: Synthetic coding sequence
  source 1..84: mol_type = other DNA
atggacatggtggagaatgctgacagcctgcaggcccaggagaggaaggacatcctgatgaagtatgacaagggccacaggtag

SEQ ID NO: 175216 - DNA, 174 bp, synthetic construct
  misc_feature 1..174: note = Description of Artificial Sequence: Synthetic coding sequence
  source 1..174: mol_type = other DNA
atggacatggtggagaatgctgacagcctgcaggcccaggagaggaaggacatcctgatgaagtatgacaagggccaccgggccggcctgcctgaggacaagggcagccccctggagagcacagctgccctgattgtgctggccttctgcatgaggaggagctgcctgctgtag

SEQ ID NO: 175217 - DNA, 3309 bp, synthetic construct
  misc_feature 1..3309: note = Description of Artificial Sequence: Synthetic coding sequence
  source 1..3309: mol_type = other DNA
atgaaccaccagcagcagcagcagcagcagaaggccggggagcagcagctgtctgagcctgaggacatggagatggaggccggggacacagatgatcctccccgcatcacccagaaccctgtgatcaatggaaatgtggccctgagtgatggccacaacacagctgaggaggacatggaggatgacacctcctggaggtctgaggccaccttccagttcaccgtggagcgcttcagccggctgtctgagagcgtgctgagccccccctgctttgtgaggaacctgccctggaagatcatggtgatgccccgcttctacccagaccggccccaccagaagtctgtgggcttcttcctgcagtgcaatgctgagagtgacagcacctcctggagctgccacgcccaggccgtgctgaagatcatcaactacagagatgatgagaagagcttcagccgccgcatcagccacctgttcttccacaaggaaaatgactggggcttcagcaacttcatggcctggagcgaggtgacagatcctgagaagggcttcattgatgatgacaaggtgacctttgaggtgtttgtgcaggctgatgcccctcatggagtggcctgggacagcaagaagcacacaggctacgtgggcctgaagaaccagggcgccacctgctacatgaacagcctgctgcagaccctcttcttcaccaaccagctgaggaaggctgtgtacatgatgcccacagaaggagatgacagcagcaagtctgtgcccctggccctgcagagggtcttctatgagctgcagcacagcgacaagcctgtgggcaccaagaagctgaccaagagctttggctgggagaccctggacagcttcatgcagcatgatgtgcaggagctgtgccgggtgctgctggacaacgtggagaacaagatgaagggcacctgtgtggagggcaccatccccaagctgttccggggcaagatggtgtcctacatccagtgcaaggaggtggactacagaagtgacagaagagaggactactatgacatccagctgagcatcaagggcaagaagaacatctttgagagctttgtggactatgtggccgtggagcagctggatggagacaacaagtatgatgctggggagcacggcctgcaggaggccgagaagggcgtgaagttcctgaccctgccccctgtgctgcacctgcagctgatgaggttcatgtatgacccccagacagaccagaacatcaagatcaatgacagatttgagttccctgagcagctgcccctggatgagttcctgcagaagacagaccccaaggaccctgccaactacatcctgcatgctgtgctggtgcacagcggggacaaccacggcggccactacgtggtgtacctgaaccccaagggagatggcaagtggtgcaagtttgatgatgatgtggtgagccgctgcaccaaggaggaggccatcgagcacaactacggcggccatgatgatgacctgtctgtgcgccactgcaccaatgcctacatgctggtgtacatccgggagagcaagctgtctgaggtgctgcaggccgtgacagaccatgacatcccccagcagctggtggagcggctgcaggaggagaagagaattgaggcccagaagaggaaggagcggcaggaggcccacctgtacatgcaggtgcagatcgtggccgaggaccagttctgtggccaccagggcaatgacatgtatgatgaggagaaggtgaagtacaccgtcttcaaggtgctgaagaacagcagcctggccgagtttgtgcagagcctgagccagaccatgggcttcccccaggaccagatccggctgtggcccatgcaggcccggagcaatggcaccaagaggcctgccatgctggacaatgaagcagatggcaacaagaccatgattgagctgagtgacaatgaaaacccctggaccatcttcctggagaccgtggaccctgagctggccgccagcggggccaccctgcccaagtttgacaaggaccatgatgtgatgctgttcctgaagatgtatgaccccaagaccaggagcctgaactactgcggccacatctacacccccatcagctgcaagatccgggacctgctgcctgtgatgtgtgaccgggccggcttcatccaggacaccagcctcatcctgtatgaggaggtgaagcccaacctgacagagcgcatccaggactatgatgtgtccctggacaaggccctggatgagctgatggatggagacatcatcgtgttccagaaggatgatcctgaaaatgacaacagcgagctgcccacagccaaggagtacttccgggacctgtaccaccgggtggatgtgatcttctgtgacaagaccatccccaatgaccccggctttgtggtgaccctgagcaacaggatgaactacttccaggtggccaagacagtggcccagaggctgaacacagaccccatgctgctgcagttcttcaagagccagggctacagagatggccctggcaaccccctgcggcacaactatgagggcaccctgcgggacctgctgcagttcttcaagccccggcagcccaagaagctgtactaccagcagctgaagatgaagatcacagactttgaaaatagaagaagcttcaagtgcatctggctgaacagccagttccgggaggaggagatcaccctgtacccagacaagcacggctgtgtgcgggacctgctggaggagtgcaagaaggctgtggagctgggggagaaggccagcggcaagctgcggctgctggagatcgtgtcctacaagatcatcggcgtgcaccaggaggatgagctgctggagtgcctgagccctgccaccagcaggaccttccgcatcgaggagatccccctggaccaggtggacatcgacaaggaaaatgagatgctggtgacagtggcccacttccacaaggaggtgtttggcaccttcggcatccccttcctgctgcgcatccaccagggcgagcacttccgggaggtgatgaagaggatccagagcctgctggacatccaggagaaggagtttgagaagttcaagtttgccatcgtgatgatgggccgccaccagtacatcaatgaagatgaatatgaggtgaacctgaaggactttgagccccagcccggcaacatgagccacccccggccctggctgggcctggaccacttcaacaaggcccccaagaggagccgctacacctacctggagaaggccatcaagatccacaactag

SEQ ID NO: 175218 - DNA, 3333 bp, synthetic construct
  misc_feature 1..3333: note = Description of Artificial Sequence: Synthetic coding sequence
  source 1..3333: mol_type = other DNA
tgcagccacagtgatgtgggggagaggaccagccccatcccccagcagaggcccctgcagagccatgctgagatggccggcaaccaccggctgggcctggaggccggggacacagatgatcctccccgcatcacccagaaccctgtgatcaatggaaatgtggccctgagtgatggccacaacacagctgaggaggacatggaggatgacacctcctggaggtctgaggccaccttccagttcaccgtggagcgcttcagccggctgtctgagagcgtgctgagccccccctgctttgtgaggaacctgccctggaagatcatggtgatgccccgcttctacccagaccggccccaccagaagtctgtgggcttcttcctgcagtgcaatgctgagagtgacagcacctcctggagctgccacgcccaggccgtgctgaagatcatcaactacagagatgatgagaagagcttcagccgccgcatcagccacctgttcttccacaaggaaaatgactggggcttcagcaacttcatggcctggagcgaggtgacagatcctgagaagggcttcattgatgatgacaaggtgacctttgaggtgtttgtgcaggctgatgcccctcatggagtggcctgggacagcaagaagcacacaggctacgtgggcctgaagaaccagggcgccacctgctacatgaacagcctgctgcagaccctcttcttcaccaaccagctgaggaaggctgtgtacatgatgcccacagaaggagatgacagcagcaagtctgtgcccctggccctgcagagggtcttctatgagctgcagcacagcgacaagcctgtgggcaccaagaagctgaccaagagctttggctgggagaccctggacagcttcatgcagcatgatgtgcaggagctgtgccgggtgctgctggacaacgtggagaacaagatgaagggcacctgtgtggagggcaccatccccaagctgttccggggcaagatggtgtcctacatccagtgcaaggaggtggactacagaagtgacagaagagaggactactatgacatccagctgagcatcaagggcaagaagaacatctttgagagctttgtggactatgtggccgtggagcagctggatggagacaacaagtatgatgctggggagcacggcctgcaggaggccgagaagggcgtgaagttcctgaccctgccccctgtgctgcacctgcagctgatgaggttcatgtatgacccccagacagaccagaacatcaagatcaatgacagatttgagttccctgagcagctgcccctggatgagttcctgcagaagacagaccccaaggaccctgccaactacatcctgcatgctgtgctggtgcacagcggggacaaccacggcggccactacgtggtgtacctgaaccccaagggagatggcaagtggtgcaagtttgatgatgatgtggtgagccgctgcaccaaggaggaggccatcgagcacaactacggcggccatgatgatgacctgtctgtgcgccactgcaccaatgcctacatgctggtgtacatccgggagagcaagctgtctgaggtgctgcaggccgtgacagaccatgacatcccccagcagctggtggagcggctgcaggaggagaagagaattgaggcccagaagaggaaggagcggcaggaggcccacctgtacatgcaggtgcagatcgtggccgaggaccagttctgtggccaccagggcaatgacatgtatgatgaggagaaggtgaagtacaccgtcttcaaggtgctgaagaacagcagcctggccgagtttgtgcagagcctgagccagaccatgggcttcccccaggaccagatccggctgtggcccatgcaggcccggagcaatggcaccaagaggcctgccatgctggacaatgaagcagatggcaacaagaccatgattgagctgagtgacaatgaaaacccctggaccatcttcctggagaccgtggaccctgagctggccgccagcggggccaccctgcccaagtttgacaaggaccatgatgtgatgctgttcctgaagatgtatgaccccaagaccaggagcctgaactactgcggccacatctacacccccatcagctgcaagatccgggacctgctgcctgtgatgtgtgaccgggccggcttcatccaggacaccagcctcatcctgtatgaggaggtgaagcccaacctgacagagcgcatccaggactatgatgtgtccctggacaaggccctggatgagctgatggatggagacatcatcgtgttccagaaggatgatcctgaaaatgacaacagcgagctgcccacagccaaggagtacttccgggacctgtaccaccgggtggatgtgatcttctgtgacaagaccatccccaatgaccccggctttgtggtgaccctgagcaacaggatgaactacttccaggtggccaagacagtggcccagaggctgaacacagaccccatgctgctgcagttcttcaagagccagggctacagagatggccctggcaaccccctgcggcacaactatgagggcaccctgcgggacctgctgcagttcttcaagccccggcagcccaagaagctgtactaccagcagctgaagatgaagatcacagactttgaaaatagaagaagcttcaagtgcatctggctgaacagccagttccgggaggaggagatcaccctgtacccagacaagcacggctgtgtgcgggacctgctggaggagtgcaagaaggctgtggagctgggggagaaggccagcggcaagctgcggctgctggagatcgtgtcctacaagatcatcggcgtgcaccaggaggatgagctgctggagtgcctgagccctgccaccagcaggaccttccgcatcgaggagatccccctggaccaggtggacatcgacaaggaaaatgagatgctggtgacagtggcccacttccacaaggaggtgtttggcaccttcggcatccccttcctgctgcgcatccaccagggcgagcacttccgggaggtgatgaagaggatccagagcctgctggacatccaggagaaggagtttgagaagttcaagtttgccatcgtgatgatgggccgccaccagtacatcaatgaagatgaatatgaggtgaacctgaaggactttgagccccagcccggcaacatgagccacccccggccctggctgggcctggaccacttcaacaaggcccccaagaggagccgctacacctacctggagaaggccatcaagatccacaactag

SEQ ID NO: 175219 - DNA, 3012 bp, synthetic construct
  misc_feature 1..3012: note = Description of Artificial Sequence: Synthetic coding sequence
  source 1..3012: mol_type = other DNA
atggtgatgccccgcttctacccagaccggccccaccagaagtctgtgggcttcttcctgcagtgcaatgctgagagtgacagcacctcctggagctgccacgcccaggccgtgctgaagatcatcaactacagagatgatgagaagagcttcagccgccgcatcagccacctgttcttccacaaggaaaatgactggggcttcagcaacttcatggcctggagcgaggtgacagatcctgagaagggcttcattgatgatgacaaggtgacctttgaggtgtttgtgcaggctgatgccccccacggcgtggcctgggacagcaagaagcacacaggctacgtgggcctgaagaaccagggcgccacctgctacatgaacagcctgctgcagaccctcttcttcaccaaccagctgaggaaggctgtgtacatgatgcccacagaaggagatgacagcagcaagtctgtgcccctggccctgcagagggtcttctatgagctgcagcacagcgacaagcctgtgggcaccaagaagctgaccaagagctttggctgggagaccctggacagcttcatgcagcatgatgtgcaggagctgtgccgggtgctgctggacaacgtggagaacaagatgaagggcacctgtgtggagggcaccatccccaagctgttccggggcaagatggtgtcctacatccagtgcaaggaggtggactacagaagtgaccggcgggaggactactatgacatccagctgagcatcaagggcaagaagaacatctttgagagctttgtggactatgtggccgtggagcagctggatggagacaacaagtatgatgctggggagcacggcctgcaggaggccgagaagggcgtgaagttcctgaccctgccccctgtgctgcacctgcagctgatgaggttcatgtatgacccccagacagaccagaacatcaagatcaatgacagatttgagttccctgagcagctgcccctggatgagttcctgcagaagacagaccccaaggaccctgccaactacatcctgcatgctgtgctggtgcacagcggggacaaccacggcggccactacgtggtgtacctgaaccccaagggagatggcaagtggtgcaagtttgatgatgatgtggtgagccgctgcaccaaggaggaggccatcgagcacaactatggaggccatgatgatgacctgtctgtgcgccactgcaccaatgcctacatgctggtgtacatccgggagagcaagctgtctgaggtgctgcaggccgtgacagaccatgacatcccccagcagctggtggagcggctgcaggaggagaagagaattgaggcccagaagaggaaggagcggcaggaggcccacctgtacatgcaggtgcagatcgtggccgaggaccagttctgtggccaccagggcaatgacatgtatgatgaggagaaggtgaagtacacagtgttcaaggtgctgaagaacagcagcctggccgagtttgtgcagagcctgagccagaccatgggcttcccccaggaccagatccggctgtggcccatgcaggcccggagcaatggcaccaagaggcctgccatgctggacaatgaagcagatggcaacaagaccatgattgagctgagtgacaatgaaaacccctggaccatcttcctggagaccgtggaccctgagctggccgccagcggggccaccctgcccaagtttgacaaggaccatgatgtgatgctgttcctgaagatgtatgaccccaagaccaggagcctgaactactgcggccacatctacacccccatcagctgcaagatccgggacctgctgcctgtgatgtgtgacagagctggcttcatccaggacaccagcctcatcctgtatgaggaggtgaagcccaacctgacagagcgcatccaggactatgatgtgtccctggacaaggccctggatgagctgatggatggagacatcatcgtgttccagaaggatgatcctgaaaatgacaacagcgagctgcccacagccaaggagtacttccgggacctgtaccaccgggtggatgtgatcttctgtgacaagaccatccccaatgaccccggctttgtggtgaccctgagcaacaggatgaactacttccaggtggccaagacagtggcccagaggctgaacacagaccccatgctgctgcagttcttcaagagccagggctacagagatggccctggcaaccccctgcggcacaactatgagggcaccctgcgggacctgctgcagttcttcaagccccggcagcccaagaagctgtactaccagcagctgaagatgaagatcacagactttgagaacagaagaagcttcaagtgcatctggctgaacagccagttccgggaggaggagatcaccctgtacccagacaagcacggctgtgtgcgggacctgctggaggagtgcaagaaggctgtggagctgggggagaaggccagcggcaagctgcggctgctggagatcgtgtcctacaagatcattggagtgcaccaggaggatgagctgctggagtgcctgagccctgccaccagcaggaccttcagaattgaggagatccccctggaccaggtggacatcgacaaggaaaatgagatgctggtgacagtggcccacttccacaaggaggtgtttggcaccttcggcatccccttcctgctgcgcatccaccagggcgagcacttccgggaggtgatgaagaggatccagagcctgctggacatccaggagaaggagtttgagaagttcaagtttgccatcgtgatgatgggccgccaccagtacatcaatgaagatgaatatgaggtgaacctgaaggactttgagccccagcccggcaacatgagccacccccggccctggctgggcctggaccacttcaacaaggcccccaagaggagccgctacacctacctggagaaggccatcaagatccacaactag

SEQ ID NO: 175220 - DNA, 1530 bp, synthetic construct
  misc_feature 1..1530: note = Description of Artificial Sequence: Synthetic coding sequence
  source 1..1530: mol_type = other DNA
atggaggatgacacctcctggaggtctgaggccaccttccagttcaccgtggagcgcttcagccggctgtctgagagcgtgctgagccccccctgctttgtgaggaacctgccctggaagatcatggtgatgccccgcttctacccagaccggccccaccagaagtctgtgggcttcttcctgcagtgcaatgctgagagtgacagcacctcctggagctgccacgcccaggccgtgctgaagatcatcaactacagagatgatgagaagagcttcagccgccgcatcagccacctgttcttccacaaggaaaatgactggggcttcagcaacttcatggcctggagcgaggtgacagatcctgagaagggcttcattgatgatgacaaggtgacctttgaggtgtttgtgcaggctgatgcccctcatggagtggcctgggacagcaagaagcacacaggctacgtgggcctgaagaaccagggcgccacctgctacatgaacagcctgctgcagaccctcttcttcaccaaccagctgaggaaggctgtgtacatgatgcccacagaaggagatgacagcagcaagtctgtgcccctggccctgcagagggtcttctatgagctgcagcacagcgacaagcctgtgggcaccaagaagctgaccaagagctttggctgggagaccctggacagcttcatgcagcatgatgtgcaggagctgtgccgggtgctgctggacaacgtggagaacaagatgaagggcacctgtgtggagggcaccatccccaagctgttccggggcaagatggtgtcctacatccagtgcaaggaggtggactacagaagtgacagaagagaggactactatgacatccagctgagcatcaagggcaagaagaacatctttgagagctttgtggactatgtggccgtggagcagctggatggagacaacaagtatgatgctggggagcacggcctgcaggaggccgagaagggcgtgaagttcctgaccctgccccctgtgctgcacctgcagctgatgaggttcatgtatgacccccagacagaccagaacatcaagatcaatgacagatttgagttccctgagcagctgcccctggatgagttcctgcagaagacagaccccaaggaccctgccaactacatcctgcatgctgtgctggtgcacagcggggacaaccacggcggccactacgtggtgtacctgaaccccaagggagatggcaagtggtgcaagtttgatgatgatgtggtgagccgctgcaccaaggaggaggccatcgagcacaactacggcggccatgatgatgacctgtctgtgcgccactgcaccaatgcctacatgctggtgtacatccgggagagcaagctgactgtgggcggggccatcacccggcgggagaaggaccggggcagcgaggccgagggcgctgctggcagccccagcctgtatgccagcgctgacagcagaagaggccctgtgctgtggccaccccgggagtag

SEQ ID NO: 175221 - DNA, 7713 bp, synthetic construct
  misc_feature 1..7713: note = Description of Artificial Sequence: Synthetic coding sequence
  source 1..7713: mol_type = other DNA
atgacagccaccacccggggcagccctgtgggcggcaatgacaaccagggccaggccccagatggccagagccagccccccctgcagcagaaccagaccagcagcccagacagcagcaatgaaaacagccctgccaccccaccagatgagcagggccagggagatgccccaccccagctggaggatgaggagcccgccttcccccacacagacctggccaagctggatgacatgatcaaccggccccgctgggtggtgcctgtgctgcccaagggggagctggaggtgctgctggaggccgccatcgacctgagcaagaagggcctggatgtgaagtctgaggcctgccagcgcttcttcagagatggcctgaccatctccttcaccaagatcctgacagatgaggccgtgtctggctggaagtttgagatccaccgctgcatcatcaacaacacccaccggctggtggagctgtgtgtggccaagctgagccaggactggttccccctgctggagctgctggccatggccctgaacccccactgcaagttccacatctacaacggcacccggccctgtgagagcgtgagcagctctgtgcagctgcctgaagatgagctgtttgcccggagcccagaccccaggagccccaagggctggctggtggacctgctgaacaagtttggcaccctgaatggcttccagatcctgcatgaccgcttcatcaatggaagtgccctgaatgtgcagatcatcgccgccctgatcaagcccttcggccagtgctatgagttcctgaccctgcacacagtgaagaagtacttcctgcccatcatcgagatggtgccccagttcctggagaacctgacagatgaggagctgaagaaggaggccaagaatgaggccaagaatgatgccctgtccatgatcatcaagagcctgaagaacctggccagccgggtgcccggccaggaggagaccgtgaagaacctggagatcttccggctgaagatgatcctgcggctgctgcagatcagcagcttcaacgggaagatgaatgccctgaatgaggtgaacaaggtgatcagctctgtgtcctactacacccaccgccacggcaaccctgaggaggaggagtggctgacagctgagaggatggccgagtggatccagcagaacaacatcctgagcatcgtgctgcgggacagcctgcaccagccccagtatgtggagaagctggagaagatcctgcgctttgtgatcaaggagaaggccctgaccctgcaggacctggacaacatctgggccgcccaggccggcaagcatgaggccatcgtgaagaatgtgcatgacctgctggccaagctggcctgggacttcagccctgagcagctggaccacctgtttgactgcttcaaggcctcctggaccaatgccagcaagaagcagcgggagaagctgctggagctgatccggcggctggccgaggatgacaaggatggagtgatggcccacaaggtgctgaacctgctgtggaacctggcccacagtgatgatgtgcctgtggacatcatggacctggccctgagcgcccacatcaagatcctggactacagctgcagccaggaccgggacacccagaagatccagtggattgaccgcttcatcgaggagctgcggaccaatgacaagtgggtgatcccagccctgaagcagatccgggagatctgcagcctgtttggagaggccccccagaacctgagccagacccagaggagcccccacgtgttctacagacatgacctgatcaaccagctgcagcacaaccacgccctggtgaccctggtggccgagaacctggccacctacatggagagcatgaggctgtatgcccgggaccatgaagattatgacccccagacagtgcggctgggcagccgctacagccacgtgcaggaggtgcaggagcggctgaacttcctgcgcttcctgctgaaggatggccagctgtggctgtgtgccccccaggccaagcagatctggaagtgcctggccgagaatgctgtgtacctgtgtgaccgggaggcctgcttcaagtggtacagcaagctgatgggagatgagccagacctggaccctgacatcaacaaggacttctttgagagcaatgtgctgcagctggaccccagcctgctgacagaaaatggcatgaagtgctttgagcgcttcttcaaggctgtgaactgccgggagggcaagctggtggccaagaggcgggcctacatgatggatgacctggagctgattggcctggactacctgtggagggtggtgatccagagcaatgatgacatcgccagccgggccatcgacctgctgaaggagatctacaccaacctgggcccccggctgcaggtgaaccaggtggtgattcatgaggacttcatccagagctgctttgaccggctgaaggccagctatgacaccctgtgtgtgctggatggagacaaggacagcgtgaactgtgcccggcaggaggccgtgaggatggtgcgggtgctgactgtgctgcgggagtacatcaatgaatgtgacagcgactaccacgaggagaggaccatcctgcccatgagccgggccttccggggcaagcacctgagctttgtggtgcgcttccccaaccagggccggcaggtggatgacctggaggtgtggagccacaccaatgacaccatcggctctgtgcggcgctgcatcctgaaccgcatcaaggccaacgtggcccacaccaagattgagctgtttgtgggcggggagctgattgatcctgcagatgacaggaagctgattggccagctgaacctgaaggacaagagcctcatcacagccaagctgacccagatcagcagcaacatgcccagcagcccagacagcagcagtgacagcagcacaggcagccctggcaaccacggcaaccactacagtgatggccccaaccctgaggtggagagctgcctgcccggggtcatcatgagcctgcacccccgctacatctccttcctgtggcaggtggccgacctgggcagcagcctgaacatgccacccctgagagatggagcccgggtgctgatgaagctgatgcccccagacagcaccaccatcgagaagctgcgggccatctgcctggaccacgccaagctgggggagagcagcctgagccccagcctggacagcctcttcttcggccccagcgccagccaggtgctgtacctgacagaggtggtgtatgccctgctgatgcctgctggggcccccctggctgatgacagcagtgacttccagttccacttcctgaagagcggcggcctgcccctggtgctgtccatgctgaccaggaacaacttcctgcccaatgctgacatggagacccggcggggggcctacctgaatgccctgaagatcgccaagctgctgctgacagccatcggctacggccacgtgcgggctgtggccgaggcctgccagcccggggtggagggcgtgaaccccatgacccagatcaaccaggtgacccatgaccaggccgtggtgctgcagagcgccctgcagagcatccccaaccccagcagcgagtgcatgctgagaaatgtgtctgtgcggctggcccagcagatcagtgatgaggccagccgctacatgccagacatctgtgtgatccgggccatccagaagatcatctgggccagcggctgcggcagcctgcagctggtgttcagccccaatgaggagatcaccaagatctatgagaagaccaatgctggaaatgaaccagacctggaggatgagcaggtgtgctgtgaggccctggaggtgatgaccctgtgctttgccctgatccccacagccctggatgccctgagcaaggagaaggcctggcagaccttcatcatcgacctgctgctgcactgccacagcaagacagtgcggcaggtggcccaggagcagttcttcctgatgtgcacccgctgctgcatgggccaccggcccctgctcttcttcatcaccctgctcttcaccgtgctgggcagcacagcccgggagcgggccaagcacagcggggactacttcaccctgctgcggcacctgctgaactatgcctacaacagcaacatcaacgtgcccaatgctgaggtgctgctgaacaatgaaattgactggctgaagaggatcagagatgatgtgaagaggactggagagaccggcatcgaggagaccatcctggagggccacctgggcgtgaccaaggagctgctggccttccagaccagcgagaagaagttccacatcggctgtgagaagggcggggccaacctgatcaaggagctgattgatgacttcatcttccctgccagcaatgtgtacctgcagtacatgagaaatggagagctgcctgctgagcaggccatccctgtgtgtggcagcccccccaccatcaatgccggctttgagctgctggtggccctggccgtgggctgtgtgaggaacctgaagcagatcgtggacagcctgacagagatgtactacatcggcacagccatcaccacctgtgaggccctgacagagtgggagtacctgccccctgtgggcccccggccccccaagggctttgtgggcctgaagaatgctggggccacctgctacatgaacagcgtcatccagcagctgtacatgatccccagcatcagaaatggcatcctggccatcgagggcactggaagtgatgtggatgatgacatgtctggagatgagaagcaggacaatgaaagcaatgtggaccccagagatgatgtgtttggctacccccagcagtttgaggacaagccagccctgagcaagacagaggacaggaaggagtacaacattggagtgctgcggcacctgcaggtgatcttcggccacctggccgccagccggctgcagtactacgtgccccggggcttctggaagcagttccggctgtggggcgagcctgtgaacctgcgggagcagcatgatgccctggagttcttcaacagcctggtggacagcctggatgaggccctgaaggccctgggccacccagccatgctgagcaaggtgctgggcggcagctttgctgaccagaagatctgccagggctgcccccacagatatgaatgtgaggagagcttcaccaccctgaatgtggacatccggaaccaccagaacctgctggacagcctggagcagtatgtgaagggggacctgctggagggcgccaatgcctaccactgtgagaagtgcaacaagaaggtggacacagtgaagaggctgctgatcaagaagctgccccctgtgctggccatccagctgaagagatttgattatgactgggagagagaatgtgccatcaagttcaatgactactttgagttcccccgggagctggacatggagccctacacagtggccggcgtggccaagctggagggggacaacgtgaaccctgagagccagctgatccagcagagcgagcagagcgagagcgagacagctggcagcaccaagtaccgcctggtgggcgtgctggtgcacagcggccaggccagcggcggccactactacagctacatcatccagagaaatggaggagatggagagaggaaccgctggtacaagtttgatgatggagatgtgacagagtgcaagatggatgatgatgaggagatgaagaaccagtgctttggaggagagtacatgggagaggtgtttgaccacatgatgaagaggatgagctaccgccggcagaagcgctggtggaatgcctacatcctcttctatgaaagaatggacaccatcgaccaggatgatgagctgatccgctacatcagcgagctggccatcaccacccggccccaccagatcatcatgcccagcgccatcgagaggtctgtgaggaagcagaatgtgcagttcatgcacaacaggatgcagtacagcatggagtacttccagttcatgaagaagctgctgacctgcaatggagtgtacctgaaccccccacctggccaggaccacctgctgcctgaggccgaggagatcaccatgatcagcatccagctggccgcccgcttcctgttcaccaccggcttccacaccaagaaggtggtgcggggcagcgccagtgactggtatgatgccctgtgcatcctgctgcggcacagcaagaatgtgcgcttctggtttgcccacaacgtgctcttcaacgtgagcaaccgcttcagcgagtacctgctggagtgccccagcgctgaggtgcggggggcctttgccaagctgattgtgttcatcgcccacttcagcctgcaggacggcccctgccccagcccctttgccagccctggccccagcagccaggcctatgacaacctgagcctgagtgaccacctgctgcgggctgtgctgaacctgctgcggcgggaggtgtctgaacatggccgccacctgcagcagtacttcaacctgtttgtgatgtatgccaacctgggcgtggccgagaagacccagctgctgaagctgtctgtgcctgccaccttcatgctggtgtccctggatgagggccctggcccccccatcaagtaccagtatgcagagctgggcaagctgtacagcgtggtgtcccagctgatccgctgctgcaatgtgagcagcaggatgcagagcagcatcaatggaaatccacccctgcccaacccctttggagaccccaacctgagccagcccatcatgcccatccagcagaatgtggccgacatcctgtttgtgaggaccagctatgtgaagaagatcatcgaggactgcagcaacagcgaggagaccgtgaagctgctgcgcttctgctgctgggagaacccccagttcagcagcacagtgctgtctgagctgctgtggcaggtggcctacagctacacctatgagctgcggccctacctggacctgctgctgcagatcctgctgattgaagattcctggcagacccaccgcatccacaatgccctgaagggcatcccagatgacagagatggcctgtttgacaccatccagaggagcaagaaccactaccagaagagggcctaccagtgcatcaagtgcatggtggccctcttcagcaactgccctgtggcctaccagatcctgcagggcaatggagacctgaagaggaagtggacctgggccgtggagtggctgggagatgagctggagcggcggccctacacaggcaacccccagtacacctacaacaactggagcccccctgtgcagagcaatgagaccagcaatggctacttcctggagaggagccacagcgccaggatgaccctggccaaggcctgtgagctgtgcccagaggaggtgaagaaggccacctctgtgcagcagatcgagatggaggagagcaaggagccagatgaccaggatgccccagatgagcacgagagccccccaccagaagatgcccccctgtacccccacagccctggcagccagtaccagcagaacaaccacgtgcacggccagccctacacaggccctgctgcccaccacatgaacaacccccagaggacaggccagagggcccaggagaactatgagggcagcgaggaggtgagccccccccagaccaaggaccagtag

SEQ ID NO: 175222 - DNA, 7665 bp, synthetic construct
  misc_feature 1..7665: note = Description of Artificial Sequence: Synthetic coding sequence
  source 1..7665: mol_type = other DNA
atgacagccaccacccggggcagccctgtgggcggcaatgacaaccagggccaggccccagatggccagagccagccccccctgcagcagaaccagaccagcagcccagacagcagcaatgaaaacagccctgccaccccaccagatgagcagggccagggagatgccccaccccagctggaggatgaggagcccgccttcccccacacagacctggccaagctggatgacatgatcaaccggccccgctgggtggtgcctgtgctgcccaagggggagctggaggtgctgctggaggccgccatcgacctgagcaagaagggcctggatgtgaagtctgaggcctgccagcgcttcttcagagatggcctgaccatctccttcaccaagatcctgacagatgaggccgtgtctggctggaagtttgagatccaccgctgcatcatcaacaacacccaccggctggtggagctgtgtgtggccaagctgagccaggactggttccccctgctggagctgctggccatggccctgaacccccactgcaagttccacatctacaacggcacccggccctgtgagagcgtgagcagctctgtgcagctgcctgaagatgagctgtttgcccggagcccagaccccaggagccccaagggctggctggtggacctgctgaacaagtttggcaccctgaatggcttccagatcctgcatgaccgcttcatcaatggaagtgccctgaatgtgcagatcatcgccgccctgatcaagcccttcggccagtgctatgagttcctgaccctgcacacagtgaagaagtacttcctgcccatcatcgagatggtgccccagttcctggagaacctgacagatgaggagctgaagaaggaggccaagaatgaggccaagaatgatgccctgtccatgatcatcaagagcctgaagaacctggccagccgggtgcccggccaggaggagaccgtgaagaacctggagatcttccggctgaagatgatcctgcggctgctgcagatcagcagcttcaacgggaagatgaatgccctgaatgaggtgaacaaggtgatcagctctgtgtcctactacacccaccgccacggcaaccctgaggaggaggagtggctgacagctgagaggatggccgagtggatccagcagaacaacatcctgagcatcgtgctgcgggacagcctgcaccagccccagtatgtggagaagctggagaagatcctgcgctttgtgatcaaggagaaggccctgaccctgcaggacctggacaacatctgggccgcccaggccggcaagcatgaggccatcgtgaagaatgtgcatgacctgctggccaagctggcctgggacttcagccctgagcagctggaccacctgtttgactgcttcaaggcctcctggaccaatgccagcaagaagcagcgggagaagctgctggagctgatccggcggctggccgaggatgacaaggatggagtgatggcccacaaggtgctgaacctgctgtggaacctggcccacagtgatgatgtgcctgtggacatcatggacctggccctgagcgcccacatcaagatcctggactacagctgcagccaggaccgggacacccagaagatccagtggattgaccgcttcatcgaggagctgcggaccaatgacaagtgggtgatcccagccctgaagcagatccgggagatctgcagcctgtttggagaggccccccagaacctgagccagacccagaggagcccccacgtgttctacagacatgacctgatcaaccagctgcagcacaaccacgccctggtgaccctggtggccgagaacctggccacctacatggagagcatgaggctgtatgcccgggaccatgaagattatgacccccagacagtgcggctgggcagccgctacagccacgtgcaggaggtgcaggagcggctgaacttcctgcgcttcctgctgaaggatggccagctgtggctgtgtgccccccaggccaagcagatctggaagtgcctggccgagaatgctgtgtacctgtgtgaccgggaggcctgcttcaagtggtacagcaagctgatgggagatgagccagacctggaccctgacatcaacaaggacttctttgagagcaatgtgctgcagctggaccccagcctgctgacagaaaatggcatgaagtgctttgagcgcttcttcaaggctgtgaactgccgggagggcaagctggtggccaagaggcgggcctacatgatggatgacctggagctgattggcctggactacctgtggagggtggtgatccagagcaatgatgacatcgccagccgggccatcgacctgctgaaggagatctacaccaacctgggcccccggctgcaggtgaaccaggtggtgattcatgaggacttcatccagagctgctttgaccggctgaaggccagctatgacaccctgtgtgtgctggatggagacaaggacagcgtgaactgtgcccggcaggaggccgtgaggatggtgcgggtgctgactgtgctgcgggagtacatcaatgaatgtgacagcgactaccacgaggagaggaccatcctgcccatgagccgggccttccggggcaagcacctgagctttgtggtgcgcttccccaaccagggccggcaggtggatgacctggaggtgtggagccacaccaatgacaccatcggctctgtgcggcgctgcatcctgaaccgcatcaaggccaacgtggcccacaccaagattgagctgtttgtgggcggggagctgattgatcctgcagatgacaggaagctgattggccagctgaacctgaaggacaagagcctcatcacagccaagctgacccagatcagcagcaacatgcccagcagcccagacagcagcagtgacagcagcacaggcagccctggcaaccacggcaaccactacagtgatggccccaaccctgaggtggagagctgcctgcccggggtcatcatgagcctgcacccccgctacatctccttcctgtggcaggtggccgacctgggcagcagcctgaacatgccacccctgagagatggagcccgggtgctgatgaagctgatgcccccagacagcaccaccatcgagaagctgcgggccatctgcctggaccacgccaagctgggggagagcagcctgagccccagcctggacagcctcttcttcggccccagcgccagccaggtgctgtacctgacagaggtggtgtatgccctgctgatgcctgctggggcccccctggctgatgacagcagtgacttccagttccacttcctgaagagcggcggcctgcccctggtgctgtccatgctgaccaggaacaacttcctgcccaatgctgacatggagacccggcggggggcctacctgaatgccctgaagatcgccaagctgctgctgacagccatcggctacggccacgtgcgggctgtggccgaggcctgccagcccggggtggagggcgtgaaccccatgacccagatcaaccaggtgacccatgaccaggccgtggtgctgcagagcgccctgcagagcatccccaaccccagcagcgagtgcatgctgagaaatgtgtctgtgcggctggcccagcagatcagtgatgaggccagccgctacatgccagacatctgtgtgatccgggccatccagaagatcatctgggccagcggctgcggcagcctgcagctggtgttcagccccaatgaggagatcaccaagatctatgagaagaccaatgctggaaatgaaccagacctggaggatgagcaggtgtgctgtgaggccctggaggtgatgaccctgtgctttgccctgatccccacagccctggatgccctgagcaaggagaaggcctggcagaccttcatcatcgacctgctgctgcactgccacagcaagacagtgcggcaggtggcccaggagcagttcttcctgatgtgcacccgctgctgcatgggccaccggcccctgctcttcttcatcaccctgctcttcaccgtgctgggcagcacagcccgggagcgggccaagcacagcggggactacttcaccctgctgcggcacctgctgaactatgcctacaacagcaacatcaacgtgcccaatgctgaggtgctgctgaacaatgaaattgactggctgaagaggatcagagatgatgtgaagaggactggagagaccggcatcgaggagaccatcctggagggccacctgggcgtgaccaaggagctgctggccttccagaccagcgagaagaagttccacatcggctgtgagaagggcggggccaacctgatcaaggagctgattgatgacttcatcttccctgccagcaatgtgtacctgcagtacatgagaaatggagagctgcctgctgagcaggccatccctgtgtgtggcagcccccccaccatcaatgccggctttgagctgctggtggccctggccgtgggctgtgtgaggaacctgaagcagatcgtggacagcctgacagagatgtactacatcggcacagccatcaccacctgtgaggccctgacagagtgggagtacctgccccctgtgggcccccggccccccaagggctttgtgggcctgaagaatgctggggccacctgctacatgaacagcgtcatccagcagctgtacatgatccccagcatcagaaatggcatcctggccatcgagggcactggaagtgatgtggatgatgacatgtctggagatgagaagcaggacaatgaaagcaatgtggaccccagagatgatgtgtttggctacccccagcagtttgaggacaagccagccctgagcaagacagaggacaggaaggagtacaacattggagtgctgcggcacctgcaggtgatcttcggccacctggccgccagccggctgcagtactacgtgccccggggcttctggaagcagttccggctgtggggcgagcctgtgaacctgcgggagcagcatgatgccctggagttcttcaacagcctggtggacagcctggatgaggccctgaaggccctgggccacccagccatgctgagcaaggtgctgggcggcagctttgctgaccagaagatctgccagggctgcccccacagatatgaatgtgaggagagcttcaccaccctgaatgtggacatccggaaccaccagaacctgctggacagcctggagcagtatgtgaagggggacctgctggagggcgccaatgcctaccactgtgagaagtgcaacaagaaggtggacacagtgaagaggctgctgatcaagaagctgccccctgtgctggccatccagctgaagagatttgattatgactgggagagagaatgtgccatcaagttcaatgactactttgagttcccccgggagctggacatggagccctacacagtggccggcgtggccaagctggagggggacaacgtgaaccctgagagccagctgatccagcagagcgagcagagcgagagcgagacagctggcagcaccaagtaccgcctggtgggcgtgctggtgcacagcggccaggccagcggcggccactactacagctacatcatccagagaaatggaggagatggagagaggaaccgctggtacaagtttgatgatggagatgtgacagagtgcaagatggatgatgatgaggagatgaagaaccagtgctttggaggagagtacatgggagaggtgtttgaccacatgatgaagaggatgagctaccgccggcagaagcgctggtggaatgcctacatcctcttctatgaaagaatggacaccatcgaccaggatgatgagctgatccgctacatcagcgagctggccatcaccacccggccccaccagatcatcatgcccagcgccatcgagaggtctgtgaggaagcagaatgtgcagttcatgcacaacaggatgcagtacagcatggagtacttccagttcatgaagaagctgctgacctgcaatggagtgtacctgaaccccccacctggccaggaccacctgctgcctgaggccgaggagatcaccatgatcagcatccagctggccgcccgcttcctgttcaccaccggcttccacaccaagaaggtggtgcggggcagcgccagtgactggtatgatgccctgtgcatcctgctgcggcacagcaagaatgtgcgcttctggtttgcccacaacgtgctcttcaacgtgagcaaccgcttcagcgagtacctgctggagtgccccagcgctgaggtgcggggggcctttgccaagctgattgtgttcatcgcccacttcagcctgcaggacggcccctgccccagcccctttgccagccctggccccagcagccaggcctatgacaacctgagcctgagtgaccacctgctgcgggctgtgctgaacctgctgcggcgggaggtgtctgaacatggccgccacctgcagcagtacttcaacctgtttgtgatgtatgccaacctgggcgtggccgagaagacccagctgctgaagctgtctgtgcctgccaccttcatgctggtgtccctggatgagggccctggcccccccatcaagtaccagtatgcagagctgggcaagctgtacagcgtggtgtcccagctgatccgctgctgcaatgtgagcagcaggatgcagagcagcatcaatggaaatccacccctgcccaacccctttggagaccccaacctgagccagcccatcatgcccatccagcagaatgtggccgacatcctgtttgtgaggaccagctatgtgaagaagatcatcgaggactgcagcaacagcgaggagaccgtgaagctgctgcgcttctgctgctgggagaacccccagttcagcagcacagtgctgtctgagctgctgtggcaggtggcctacagctacacctatgagctgcggccctacctggacctgctgctgcagatcctgctgattgaagattcctggcagacccaccgcatccacaatgccctgaagggcatcccagatgacagagatggcctgtttgacaccatccagaggagcaagaaccactaccagaagagggcctaccagtgcatcaagtgcatggtggccctcttcagcaactgccctgtggcctaccagatcctgcagggcaatggagacctgaagaggaagtggacctgggccgtggagtggctgggagatgagctggagcggcggccctacacaggcaacccccagtacacctacaacaactggagcccccctgtgcagagcaatgagaccagcaatggctacttcctggagaggagccacagcgccaggatgaccctggccaaggcctgtgagctgtgcccagaggaggagccagatgaccaggatgccccagatgagcacgagagccccccaccagaagatgcccccctgtacccccacagccctggcagccagtaccagcagaacaaccacgtgcacggccagccctacacaggccctgctgcccaccacatgaacaacccccagaggacaggccagagggcccaggagaactatgagggcagcgaggaggtgagccccccccagaccaaggaccagtag

SEQ ID NO: 175223 - DNA, 7668 bp, synthetic construct
  misc_feature 1..7668: note = Description of Artificial Sequence: Synthetic coding sequence
  source 1..7668: mol_type = other DNA
atgacagccatcacccacggcagccctgtgggcggcaatgacagccagggccaggtgctggatggccagagccagcacctgttccagcagaaccagaccagcagcccagacagcagcaatgaaaattctgtggccaccccacctcctgaggagcagggccagggagatgccccaccccagcatgaagatgaggagcccgccttcccccacacagagctggccaacctggatgacatgatcaaccggccccgctgggtggtgcctgtgctgcccaagggggagctggaggtgctgctggaggccgccatcgacctgtctgtgaagggcctggatgtgaagtctgaggcctgccagcgcttcttcagagatggcctgaccatctccttcaccaagatcctgatggatgaagctgtgtctggctggaagtttgagatccaccgctgcatcatcaacaacacccaccggctggtggagctgtgtgtggccaagctgagccaggactggttccccctgctggagctgctggccatggccctgaacccccactgcaagttccacatctacaacggcacccggccctgtgagctgatcagcagcaatgcccagctgcctgaagatgagctgtttgcccggagcagtgaccccaggagccccaagggctggctggtggacctgatcaacaagtttggcaccctgaatggcttccagatcctgcatgaccgcttcttcaacggcagcgccctgaacatccagatcatcgccgccctgatcaagcccttcggccagtgctatgagttcctgagccagcacaccctgaagaagtacttcatccctgtgattgagatcgtgccccacctgctggagaacctgacagatgaggagctgaagaaggaggccaagaatgaggccaagaatgatgccctgtccatgatcatcaagagcctgaagaacctggccagccgcatcagcggccaggatgagaccatcaagaacctggagatcttccggctgaagatgatcctgcggctgctgcagatcagcagcttcaacgggaagatgaatgccctgaatgagatcaacaaggtgatcagctctgtgtcctactacacccaccgccacagcaaccctgaggaggaggagtggctgacagctgagaggatggccgagtggatccagcagaacaacatcctgagcatcgtgctgcaggacagcctgcaccagccccagtatgtggagaagctggagaagatcctgcgcttcgtcatcaaggagaaggccctgaccctgcaggacctggacaacatctgggccgcccaggccggcaagcatgaggccatcgtgaagaatgtgcatgacctgctggccaagctggcctgggacttcagccctggccagctggaccacctgtttgactgcttcaaggcctcctggaccaatgccagcaagaagcagcgggagaagctgctggagctgatccggcggctggctgaagatgacaaggatggagtgatggcccacaaggtgctgaacctgctgtggaacctggcccagagtgatgatgtgcctgtggacatcatggacctggccctgagcgcccacatcaagatcctggactacagctgcagccaggacagagatgcccagaagatccagtggattgaccacttcatcgaggagctgcggaccaatgacaagtgggtgatcccagccctgaagcagatccgggagatctgcagcctgtttggagaggccagccagaacctgagccagacccagaggagcccccacatcttctacagacatgacctgatcaaccagctgcagcagaaccacgccctggtgaccctggtggccgagaacctggccacctacatgaacagcatccggctgtatgctggggaccacgaggactatgacccccagacagtgcggctgggcagccgctacagccacgtgcaggaggtgcaggagcggctgaacttcctgcgcttcctgctgaaggatggccagctgtggctgtgtgccccccaggccaagcagatctggaagtgcctggctgaaaatgctgtgtacctgtgtgaccgggaggcctgcttcaagtggtacagcaagctgatgggagatgagccagacctggaccctgacatcaacaaggacttctttgagagcaatgtgctgcagctggaccccagcctgctgacagaaaatggcatgaagtgctttgagcgcttcttcaaggctgtgaactgccgggagaggaagctgattgccaagagaagaagctacatgatggatgacctggagctgattggcctggactacctgtggagggtggtgatccagagcagtgatgagatcgccaacagagccatcgacctgctgaaggagatctacaccaacctgggcccccggctgaaggccaaccaggtggtgattcatgaggacttcatccagagctgctttgaccggctgaaggccagctatgacaccctgtgtgtgtttgatggagacaagaacagcatcaactgtgcccggcaggaggccatccgcatggtgcgggtgctgaccgtcatcaaggagtacatcaatgaatgtgacagcgactaccacaaggagaggatgatcctgcccatgagccgggccttccggggcaagcacctgagcctcatcgtgcgcttccccaaccagggccggcaggtggatgagctggacatctggagccacaccaatgacaccatcggctctgtgcggcgctgcatcgtgaaccgcatcaaggccaacgtggcccacaagaagattgagctgtttgtgggcggggagctgattgacagtgaagatgacaggaagctgattggccagctgaacctgaaggacaagagcctcatcacagccaagctgacccagatcaacttcaacatgcccagcagcccagacagcagcagtgacagcagcacagccagccctggcaaccacaggaaccactacaatgatggccccaacctggaggtggagagctgcctgcccggggtcatcatgtctgtgcacccccgctacatctccttcctgtggcaggtggccgacctgggcagcaacctgaacatgccacccctgagagatggagcccgggtgctgatgaagctgatgcccccagacagaacagctgtggagaagctgcgggctgtgtgcctggaccacgccaagctgggggagggcaagctgagcccccccctggacagcctcttcttcggccccagcgccagccaggtgctgtacctgacagaggtggtgtatgccctgctgatgcctgctggggtgcccctgacagatggcagcagtgacttccaggtgcacttcctgaagagcggcggcctgcccctggtgctgtccatgctgatccggaacaacttcctgcccaacacagacatggagaccaggagaggagcctacctgaatgccctgaagatcgccaagctgctgctgacagccatcggctacggccacgtgcgggctgtggccgaggcctgccagcctgtggtggatggaacagaccccatcacccagatcaaccaggtgacccatgaccaggccgtggtgctgcagagcgccctgcagagcatccccaaccccagcagtgaatgtgtgctgagaaatgaaagcatcctgctggcccaggagatcagcaatgaggccagccgctacatgccagacatctgtgtgatccgggccatccagaagatcatctgggccagcgcctgtggggccctgggcctggtgttcagccccaatgaggagatcaccaagatctaccagatgaccaccaacggcagcaacaagctggaggtggaggatgagcaggtgtgctgtgaggccctggaggtgatgaccctgtgctttgccctgctgcccacagccctggatgccctgagcaaggagaaggcctggcagaccttcatcatcgacctgctgctgcactgccccagcaagacagtgcggcagctggcccaggagcagttcttcctgatgtgcacccgctgctgcatgggccaccggcccctgctcttcttcatcaccctgctcttcaccatcctgggcagcacagcccgggagaagggcaagtacagcggggactacttcaccctgctgcggcacctgctgaactatgcctacaacggcaacatcaacatccccaatgctgaggtgctgctggtgtctgaaattgactggctgaagaggatccgggacaacgtgaagaacacaggagagaccggggtggaggagcccatcctggagggccacctgggcgtgaccaaggagctgctggccttccagaccagcgagaagaagtaccacttcggctgtgagaagggcggggccaacctgatcaaggagctgattgatgacttcatcttccctgccagcaaggtgtacctgcagtacctgcggagcggggagctgcctgctgagcaggccatccctgtgtgcagcagccctgtgaccatcaatgccggctttgagctgctggtggccctggccatcggctgtgtgaggaacctgaagcagatcgtggactgcctgacagagatgtactacatgggcacagccatcaccacctgtgaggccctgacagagtgggagtacctgccccctgtgggcccccggccccccaagggctttgtgggcctgaagaatgctggggccacctgctacatgaacagcgtcatccagcagctgtacatgatccccagcatccggaacagcatcctggccatcgagggcactggaagtgacctgcatgatgacatgtttggagatgagaagcaggacagcgagagcaatgtggaccccagagatgatgtgtttggctacccccaccagtttgaggacaagccagccctgagcaagacagaggacaggaaggagtacaacattggagtgctgcggcacctgcaggtgatcttcggccacctggccgccagccagctgcagtactacgtgccccggggcttctggaagcagttccggctgtggggcgagcctgtgaacctgcgggagcagcatgatgccctggagttcttcaacagcctggtggacagcctggatgaggccctgaaggccctgggccacccagccatcctgagcaaggtgctgggcggcagctttgctgaccagaagatctgccagggctgcccccacagatatgaatgtgaggagagcttcaccaccctgaatgtggacatccggaaccaccagaacctgctggacagcctggagcagtacatcaagggggacctgctggagggcgccaatgcctaccactgtgagaagtgtgacaagaaggtggacacagtgaagaggctgctgatcaagaagctgccccgggtgctggccatccagctgaagagatttgattatgactgggagagagaatgtgccatcaagttcaatgactactttgagttcccccgggagctggacatgggcccctacacagtggccggcgtggccaacctggagcgggacaacgtgaacagtgaaaatgagctgattgagcagaaggagcagagcgacaatgaaacagctgggggcaccaagtaccgcctggtgggcgtgctggtgcacagcggccaggccagcggcggccactactacagctacatcatccagagaaatggcaaggatgaccagacagaccactggtacaagtttgatgatggagatgtgacagagtgcaagatggatgatgatgaggagatgaagaaccagtgctttggaggagagtacatgggagaggtgtttgaccacatgatgaagaggatgagctaccgccggcagaagcgctggtggaatgcctacatcctcttctatgagcagatggacatgattgatgaagatgatgagatgatccgctacatcagcgagctgaccatcgcccggccccaccagatcatcatgagccctgccatcgagaggtctgtgaggaagcagaatgtgaagttcatgcacaaccggctgcagtacagcctggagtacttccagtttgtgaagaagctgctgacctgcaatggagtgtacctgaacccagcccctggccaggactacctgctgcctgaggccgaggagatcaccatgatcagcatccagctggccgcccgcttcctgttcaccaccggcttccacaccaagaagatcgtgcggggccctgccagtgactggtatgatgccctgtgtgtgctgctgcggcacagcaagaatgtgcgcttctggttcacccacaacgtgctcttcaacgtgagcaaccgcttcagcgagtacctgctggagtgccccagcgctgaggtgcggggggcctttgccaagctgattgtgttcatcgcccacttcagcctgcaggacggcagctgccccagcccctttgccagccctggccccagcagccaggcctgtgacaacctgagcctgagtgaccacctgctgcgggccaccctgaacctgctgcggcgggaggtgtctgagcacggccaccacctgcagcagtacttcaacctgtttgtgatgtatgccaacctgggcgtggccgagaagacccagctgctgaagctgaatgtgcctgccaccttcatgctggtgtccctggatgagggccctggcccccccatcaagtaccagtatgcagagctgggcaagctgtacagcgtggtgtcccagctgatccgctgctgcaatgtgagcagcaccatgcagagcagcatcaatggaaacccccccctgcccaacccctttggagacctgaacctgagccagcccatcatgcccatccagcagaatgtgctggacatcctgtttgtgaggaccagctatgtgaagaagatcatcgaggactgcagcaacagcgaggacaccatcaagctgctgcgcttctgctcctgggagaacccccagttcagcagcacagtgctgtctgagctgctgtggcaggtggcctacagctacacctatgagctgcggccctacctggacctgctcttccagatcctgctgattgaggacagctggcagacccaccgcatccacaatgccctgaagggcatcccagatgacagagatggcctgtttgacaccatccagaggagcaagaaccactaccagaagagggcctaccagtgcatcaagtgcatggtggccctcttcagcagctgccctgtggcctaccagatcctgcagggcaatggagacctgaagaggaagtggacctgggccgtggagtggctgggagatgagctggagcggcggccctacacaggcaacccccagtacagctacaacaactggagcccccctgtgcagagcaatgaaacagccaacggctacttcctggagaggagccacagcgccaggatgaccctggccaaggcctgtgagctgtgcccagaggaggagccagatgaccaggatgccccagatgaacatgagcccagccccagtgaagatgcccccctgtacccccacagccctgccagccagtaccagcagaacaaccacgtgcacggccagccctacacaggccctgctgcccaccacctgaacaacccccagaagacaggccagaggacccaggagaactatgagggcaatgaggaggtgagcagcccccagatgaaggaccagtag

SEQ ID NO: 175224 - DNA, 714 bp, synthetic construct
  misc_feature 1..714: note = Description of Artificial Sequence: Synthetic coding sequence
  source 1..714: mol_type = other DNA
tgactgctgaagacagctgtgacccagaggatccccagcaactactttgcctttgccctgggccgcatcctgagcagccacctgctgagcagcgccaacttcagcggccgcatccacaatgccctgaagggcatcccagatgacagagatggcctgtttgacaccatccagaggagcaagaaccactaccagaagagggcctaccagtgcatcaagtgcatggtggccctcttcagcagctgccctgtggcctaccagatcctgcagggcaatggagacctgaagaggaagtggacctgggccgtggagtggctgggagatgagctggagcggcggccctacacaggcaacccccagtacagctacaacaactggagcccccctgtgcagagcaatgaaacagccaacggctacttcctggagaggagccacagcgccaggatgaccctggccaaggcctgtgagctgtgcccagaggaggagccagatgaccaggatgccccagatgaacatgagcccagccccagtgaagatgcccccctgtacccccacagccctgccagccagtaccagcagaacaaccacgtgcacggccagccctacacaggccctgctgcccaccacctgaacaacccccagaagacaggccagaggacccaggagaactatgagggcaatgaggaggtgagcagcccccagatgaaggaccagtag

SEQ ID NO: 175225 - DNA, 3201 bp, synthetic construct
  misc_feature 1..3201: note = Description of Artificial Sequence: Synthetic coding sequence
  source 1..3201: mol_type = other DNA
atgacagaccaggagaacaacaacaacatcagcagcaacccctttgctgccctgtttggcagcctggctgatgccaagcagtttgctgccatccagaaggagcagctgaagcagcagagtgatgagctgcctgccagcccagatgacagcgacaacagcgtgtctgagagcctggatgaatttgactacagcgtggccgagatcagccgctccttccgcagccagcaggagatctgtgagcagctgaacatcaaccacatgatccagaggatcttcctgatcaccctggacaacagcgaccccagcctgaagtctggaaatggcatccccagccgctgtgtgtacctggaggagatggctgtggagctggaggaccaggactggctggacatgagcaatgtggagcaggccctgtttgcccggctgctgctgcaggaccccggcaaccacctgatcaacatgaccagcagcaccaccctgaacctgtctgctgacagagatgctggggagcggcacatcttctgctacctgtacagctgcttccagagggccaaggaggagatcaccaaggtgcctgagaacctgctgccctttgctgtgcagtgcaggaacctgactgtgagcaacaccaggacagtgctgctgaccccagagatctacgtggaccagaacatccacgagcagctggtggacctgatgctggaggccatccagggcgcccactttgaagatgtgacagagttcctggaggaggtgattgaggccctgatcctggatgaggaggtgaggaccttccctgaggtgatgatccctgtgtttgacatcctgctgggccgcatcaaggacctggagctgtgccagatcctgctgtatgcctacctggacatcctgctgtacttcacccggcagaaggacatggccaaggtgtttgtggagtacatccagcccaaggaccccaccaacggccagatgtaccagaagaccctgctgggcgtcatcctgagcatcagctgcctgctgaagaccccaggagtggtggagaaccacggctacttcctgaaccccagccgcagcagcccccaggagatcaaggtgcaggaggccaacatccaccagttcatggcccagttccacgagaagatctaccagatgctgaagaacctgctgcagctgagccctgagaccaagcactgcatcctgtcctggctgggcaactgcctgcacgccaatgccggccgcaccaagatctgggccaaccagatgcctgagatcttcttccagatgtatgccagtgatgccttcttcctgaacctgggcgccgccctgctgaagctgtgccagcccttctgcaagcccaggagcagccggctgctgaccttcaaccccacctactgtgccctgaaggagctgaatgatgaggagaggaagatcaagaatgtgcacatgaggggcctggacaaggagacctgcctgatcccagctgtgcaggagcccaagttcccccagaactacaacctggtgacagagaacctggccctgacagagtacaccctgtacctgggcttccaccggctgcatgaccagatggtgaagatcaaccagaacctgcaccggctgcaggtggcctggagagatgcccagcagagcagcagccctgctgctgacaacctgcgggagcagtttgagcggctgatgaccatctacctgagcaccaagacagccatgacagagccccagatgctgcagaactgcctgaacctgcaggtgtccatggctgtgctgctggtgcagctggccatcggaaatgaaggcagccagcccatcgagctgaccttccccctgcctgatggctacagcagcctggcctacgtgcctgagttctttgctgacaacctgggggacttcctgatcttcctgcggagatttgctgatgacatcctggagaccagcgctgacagcctggagcacgtgctgcacttcatcaccatcttcaccggcagcattgaaagaatgaagaacccccacctgcgggccaagctggccgaggtgctggaggccgtgatgccccacctggaccagacccccaaccccctggtgtcctctgtgttccacaggaagagggtcttctgcaacttccagtatgccccccagctggccgaggccctgatcaaggtgtttgtggacatcgagttcaccggggacccccaccagtttgagcagaagttcaactacagaagacccatgtaccccatcctgcgctacatgtggggcacagacacctaccgggagagcatcaaggacctggccgactatgccagcaagaacctggaggccatgaaccccccactcttcctgcgcttcctgaacctgctgatgaatgatgccatcttcctgctggatgaggccatccagtacctgagcaagatcaagatccagcagatcgagaaggacagaggagagtgggacagcctgaccccagaggcccggcgggagaaggaggccggcctgcagatgtttggccagctggcccgcttccacaacatcatgagcaatgagaccatcggcaccctggccttcctgaccagcgagatcaagagcctgtttgtgcaccccttcctggccgagcgcatcatctccatgctgaactacttcctgcagcacctggtgggccccaagatgggcgccctgaaggtgaaggacttcagcgagtttgacttcaagccccagcagctggtgtctgacatctgcaccatctacctgaacctgggagatgaggagaacttctgtgccaccgtgcccaaggatggccgcagctacagccccaccctgtttgcccagacagtgcgggtgctgaagaagatcaacaagccaggcaacatgatcatggccttcagcaacctggccgagcgcatcaagagcctggccgacctgcagcagcaggaggaggagacctatgcagatgcctgtgatgagttcctggaccccatcatgagcaccctgatgtgtgaccctgtggtgctgcccagcagccgggtgacagtggacaggagcaccatcgcccggcacctgctgagtgaccagacagaccccttcaacagaagccccctgaccatggaccagatccggcccaacacagagctgaaggagaagatccagcgctggctggccgagaggaagcagcagaaggagcagctggagtag

SEQ ID NO: 175226 - DNA, 3222 bp, synthetic construct
  misc_feature 1..3222: note = Description of Artificial Sequence: Synthetic coding sequence
  source 1..3222: mol_type = other DNA
atgacagaccaggagaacaacaacaacatcagcagcaacccctttgctgccctgtttggcagcctggctgatgccaagcagtttgctgccatccagaaggagcagctgaagcagcagagtgatgagctgcctgccagcccagatgacagcgacaacagcgtgtctgagagcctggatgaatttgactacagcgtggccgagatcagccgctccttccgcagccagcaggagatctgtgagcagctgaacatcaaccacatgatccagaggatcttcctgatcaccctggacaacagcgaccccagcctgaagtctggaaatggcatccccagccgctgtgtgtacctggaggagatggctgtggagctggaggaccaggactggctggacatgagcaatgtggagcaggccctgtttgcccggctgctgctgcaggaccccggcaaccacctgatcaacatgaccagcagcaccaccctgaacctgtctgctgacagagatgctggggagcggcacatcttctgctacctgtacagctgcttccagagggccaaggaggagatcaccaaggtgcctgagaacctgctgccctttgctgtgcagtgcaggaacctgactgtgagcaacaccaggacagtgctgctgaccccagagatctacgtggaccagaacatccacgagcagctggtggacctgatgctggaggccatccagggcgcccgggagtacatgaacaagatctactttgaagatgtgacagagttcctggaggaggtgattgaggccctgatcctggatgaggaggtgaggaccttccctgaggtgatgatccctgtgtttgacatcctgctgggccgcatcaaggacctggagctgtgccagatcctgctgtatgcctacctggacatcctgctgtacttcacccggcagaaggacatggccaaggtgtttgtggagtacatccagcccaaggaccccaccaacggccagatgtaccagaagaccctgctgggcgtcatcctgagcatcagctgcctgctgaagaccccaggagtggtggagaaccacggctacttcctgaaccccagccgcagcagcccccaggagatcaaggtgcaggaggccaacatccaccagttcatggcccagttccacgagaagatctaccagatgctgaagaacctgctgcagctgagccctgagaccaagcactgcatcctgtcctggctgggcaactgcctgcacgccaatgccggccgcaccaagatctgggccaaccagatgcctgagatcttcttccagatgtatgccagtgatgccttcttcctgaacctgggcgccgccctgctgaagctgtgccagcccttctgcaagcccaggagcagccggctgctgaccttcaaccccacctactgtgccctgaaggagctgaatgatgaggagaggaagatcaagaatgtgcacatgaggggcctggacaaggagacctgcctgatcccagctgtgcaggagcccaagttcccccagaactacaacctggtgacagagaacctggccctgacagagtacaccctgtacctgggcttccaccggctgcatgaccagatggtgaagatcaaccagaacctgcaccggctgcaggtggcctggagagatgcccagcagagcagcagccctgctgctgacaacctgcgggagcagtttgagcggctgatgaccatctacctgagcaccaagacagccatgacagagccccagatgctgcagaactgcctgaacctgcaggtgtccatggctgtgctgctggtgcagctggccatcggaaatgaaggcagccagcccatcgagctgaccttccccctgcctgatggctacagcagcctggcctacgtgcctgagttctttgctgacaacctgggggacttcctgatcttcctgcggagatttgctgatgacatcctggagaccagcgctgacagcctggagcacgtgctgcacttcatcaccatcttcaccggcagcattgaaagaatgaagaacccccacctgcgggccaagctggccgaggtgctggaggccgtgatgccccacctggaccagacccccaaccccctggtgagcagcgtcttccacaggaagagggtcttctgcaacttccagtatgccccccagctggccgaggccctgatcaaggtgtttgtggacatcgagttcaccggggacccccaccagtttgagcagaagttcaactaccgccggcccatgtaccccatcctgcgctacatgtggggcacagacacctaccgggagagcatcaaggacctggccgactatgccagcaagaacctggaggccatgaaccccccactcttcctgcgcttcctgaacctgctgatgaatgatgccatcttcctgctggatgaggccatccagtacctgagcaagatcaagatccagcagatcgagaaggacagaggagagtgggacagcctgaccccagaggcccggcgggagaaggaggccggcctgcagatgtttggccagctggcccgcttccacaacatcatgagcaatgagaccatcggcaccctggccttcctgaccagcgagatcaagagcctgtttgtgcaccccttcctggccgagcgcatcatctccatgctgaactacttcctgcagcacctggtgggccccaagatgggcgccctgaaggtgaaggacttcagcgagtttgacttcaagccccagcagctggtgtctgacatctgcaccatctacctgaacctgggagatgaggagaacttctgtgccaccgtgcccaaggatggccgcagctacagccccaccctgtttgcccagacagtgcgggtgctgaagaagatcaacaagccaggcaacatgatcatggccttcagcaacctggccgagcgcatcaagagcctggccgacctgcagcagcaggaggaggagacctatgcagatgcctgtgatgagttcctggaccccatcatgagcaccctgatgtgtgaccctgtggtgctgcccagcagccgggtgacagtggacaggagcaccatcgcccggcacctgctgagtgaccagacagaccccttcaacagaagccccctgaccatggaccagatccggcccaacacagagctgaaggagaagatccagcgctggctggccgagaggaagcagcagaaggagcagctggagtag

SEQ ID NO: 175227 - DNA, 1617 bp, synthetic construct
  misc_feature 1..1617: note = Description of Artificial Sequence: Synthetic coding sequence
  source 1..1617: mol_type = other DNA
atggtgaagatcaaccagaacctgcaccggctgcaggtggcctggagagatgcccagcagagcagcagccctgctgctgacaacctgcgggagcagtttgagcggctgatgaccatctacctgagcaccaagacagccatgacagagccccagatgctgcagaactgcctgaacctgcaggtgtccatggctgtgctgctggtgcagctggccatcggaaatgaaggcagccagcccatcgagctgaccttccccctgcctgatggctacagcagcctggcctacgtgcctgagttctttgctgacaacctgggggacttcctgatcttcctgcggagatttgctgatgacatcctggagaccagcgctgacagcctggagcacgtgctgcacttcatcaccatcttcaccggcagcattgaaagaatgaagaacccccacctgcgggccaagctggccgaggtgctggaggccgtgatgccccacctggaccagacccccaaccccctggtgtcctctgtgttccacaggaagagggtcttctgcaacttccagtatgccccccagctggccgaggccctgatcaaggtgtttgtggacatcgagttcaccggggacccccaccagtttgagcagaagttcaactacagaagacccatgtaccccatcctgcgctacatgtggggcacagacacctaccgggagagcatcaaggacctggccgactatgccagcaagaacctggaggccatgaaccccccactcttcctgcgcttcctgaacctgctgatgaatgatgccatcttcctgctggatgaggccatccagtacctgagcaagatcaagatccagcagatcgagaaggacagaggagagtgggacagcctgaccccagaggcccggcgggagaaggaggccggcctgcagatgtttggccagctggcccgcttccacaacatcatgagcaatgagaccatcggcaccctggccttcctgaccagcgagatcaagagcctgtttgtgcaccccttcctggccgagcgcatcatctccatgctgaactacttcctgcagcacctggtgggccccaagatgggcgccctgaaggtgaaggacttcagcgagtttgacttcaagccccagcagctggtgtctgacatctgcaccatctacctgaacctgggagatgaggagaacttctgtgccaccgtgcccaaggatggccgcagctacagccccaccctgtttgcccagacagtgcgggtgctgaagaagatcaacaagccaggcaacatgatcatggccttcagcaacctggccgagcgcatcaagagcctggccgacctgcagcagcaggaggaggagacctatgcagatgcctgtgatgagttcctggaccccatcatgagcaccctgatgtgtgaccctgtggtgctgcccagcagccgggtgacagtggacaggagcaccatcgcccggcacctgctgagtgaccagacagaccccttcaacagaagccccctgaccatggaccagatccggcccaacacagagctgaaggagaagatccagcgctggctggccgagaggaagcagcagaaggagcagctggagtag

SEQ ID NO: 175228 - DNA, 3522 bp, synthetic construct
  misc_feature 1..3522: note = Description of Artificial Sequence: Synthetic coding sequence
  source 1..3522: mol_type = other DNA
atggaggagctgtctgcagatgagatcagaagaagaaggctggcccggctggccggcggccagaccagccagcccaccacccccctgaccagcccccagagagaaaatcctcctggcccccccatcgccgccagcgcccctggccccagccagagcctgggcctgaatgtgcacaacatgaccccagccaccagccccatcggggccagcggcgtggcccacaggagccagagcagcgagggcgtgagcagcctgagcagcagccccagcaacagcctggagacccagagccagagcctgagccgcagccagagcatggacattgatggagtgtcctgtgagaagtccatgagccaggtggatgtggacagcggcatcgagaacatggaggtggatgaaaatgaccggcgggagaagaggagcctgagtgacaaggagcccagcagcggccctgaggtgtctgaggagcaggccctgcagctggtgtgcaagatcttccgggtgtcctggaaggaccgggacagagatgtgatcttcctgagcagcctgagcgcccagttcaagcagaaccccaaggaggtgttcagtgacttcaaggacctgattggccagatcctgatggaggtgctgatgatgagcacccagaccagagatgagaacccctttgccagcctgacagccaccagccagcccatcgctgctgctgcccggagcccagacaggaacctgctgctgaacacaggcagcaaccctggcaccagccccatgttctgcagcgtggccagctttggagccagcagcctgagcagcctgggcgccagcggcggggccagcaactgggacagctacagcgaccacttcaccatcgagacctgcaaggagacagacatgctgaactacctgattgaatgttttgacagagtgggcatcgaggagaagaaggcccccaagatgtgcagccagcctgctgtgtcccagctgctgagcaacatccgcagccagtgcatcagccacacagccctggtgctgcagggcagcctgacccagcccaggagcctgcagcagcccagcttcctggtgccctacatgctgtgcaggaacctgccctacggcttcatccaggagctggtgaggaccacccaccaggatgaggaggtgttcaagcagatcttcatccccatcctgcagggcctggccctggccgccaaggagtgcagcctggacagcgactacttcaagtaccccctgatggccctgggggagctgtgtgagaccaagtttgggaagacccaccctgtgtgcaacctggtggccagcctgcggctgtggctgcccaagagcctgagccctggctgcggccgggagctgcagaggctgagctacctgggcgccttcttctccttctctgtgtttgctgaagatgatgtgaaggtggtggagaagtacttcagcggccctgccatcaccctggagaacaccagggtggtgtcccagagcctgcagcactacctggagctgggccggcaggagctgttcaagatcctgcacagcatcctgctgaatggagagacccgggaggccgccctgagctacatggctgctgtggtgaatgccaacatgaagaaggcccagatgcagacagatgaccggctggtgtccacagatggcttcatgctgaacttcctgtgggtgctgcagcagctgagcaccaagatcaagctggagaccgtggaccccacctacatcttccacccccgctgccgcatcaccctgcccaatgatgagaccagggtgaatgccaccatggaggatgtgaatgactggctgacagagctgtatggagaccagccccccttcagcgagcccaagttccccacagagtgcttcttcctgaccctgcacgcccaccacctgagcatcctgcccagctgccgccgctacatccggcggctgcgggccatccgggagctgaacagaacagtggaggacctgaagaacaatgaaagccagtggaaggacagccccctggccaccaggcaccgggagatgctgaagcgctgcaagacccagctgaagaagctggtgcgctgcaaggcctgtgctgatgctggcctgctggatgagagcttcctgcggcgctgcctgaacttctacggcctgctgatccagctgctgctgcgcatcctggaccctgcctacccagacatcaccctgcccctgaacagtgatgtgcccaaggtgtttgctgccctgcctgagttctacgtggaggatgtggccgagttcctgttcttcatcgtgcagtacagcccccaggccctgtatgagccctgcacccaggacatcgtgatgttcctggtggtgatgctgtgcaaccagaactacatccggaacccctacctggtggccaagctggtggaggtgatgttcatgaccaacccagctgtgcagcccaggacccagaagttctttgagatgattgagaaccaccccctgagcaccaagctgctggtgcccagcctgatgaagttctacacagatgtggagcacactggagccaccagcgagttctatgacaagttcaccatccgctaccacatcagcaccatcttcaagagcctgtggcagaacatcgcccaccacggcaccttcatggaggagttcaacagcggcaagcagtttgtgcgctacatcaacatgctgatcaatgacaccaccttcctgctggatgagagcctggagagcctgaagaggatccacgaggtgcaggaggagatgaagaacaaggagcagtgggaccagctgccccgggaccagcagcaggcccggcagagccagctggcccaggatgagcgggtgagccgcagctacctggccctggccacagagaccgtggacatgttccacatcctgaccaagcaggtgcagaagcccttcctgcggcctgagctgggcccccggctggccgccatgctgaacttcaacctgcagcagctgtgtggccccaagtgccgggacctgaaggtggagaaccctgagaagtatggctttgagcccaagaagctgctggaccagctgacagacatctacctgcagctggactgtgccaggtttgccaaggccatcgcagatgaccagaggagctacagcaaggagctgtttgaggaggtgatcagcaagatgaggaaggccggcatcaagagcaccatcgccatcgagaagttcaagctgctggccgagaaggtggaggagatcgtggccaagaatgcccgggcagaaattgactacagtgatgccccagatgagttccgggaccccctgatggacaccctgatgacagatcctgtgcggctgcccagcggcaccatcatggacaggagcatcatcctgcggcacctgctgaacagccccacagaccccttcaaccggcagaccctgacagagagcatgctggagcctgtgcctgagctgaaggagcagatccaggcctggatgagggagaagcagaacagcgaccactag

SEQ ID NO: 175229 - DNA, 3909 bp, synthetic construct
  misc_feature 1..3909: note = Description of Artificial Sequence: Synthetic coding sequence
  source 1..3909: mol_type = other DNA
atggaggagctgtctgcagatgagatcagaagaagaaggctggcccggctggccggcggccagaccagccagcccaccacccccctgaccagcccccagagagaaaatcctcctggcccccccatcgccgccagcgcccctggccccagccagagcctgggcctgaatgtgcacaacatgaccccagccaccagccccatcggggccagcggcgtggcccacaggagccagagcagcgagggcgtgagcagcctgagcagcagccccagcaacagcctggagacccagagccagagcctgagccgcagccagagcatggacattgatggagtgtcctgtgagaagtccatgagccaggtggatgtggacagcggcatcgagaacatggaggtggatgaaaatgaccggcgggagaagaggagcctgagtgacaaggagcccagcagcggccctgaggtgtctgaggagcaggccctgcagctggtgtgcaagatcttccgggtgtcctggaaggaccgggacagagatgtgatcttcctgagcagcctgagcgcccagttcaagcagaaccccaaggaggtgttcagtgacttcaaggacctgattggccagatcctgatggaggtgctgatgatgagcacccagaccagagatgagaacccctttgccagcctgacagccaccagccagcccatcgctgctgctgcccggagcccagacaggaacctgctgctgaacacaggcagcaaccctggcaccagccccatgttctgcagcgtggccagctttggagccagcagcctgagcagcctgtatgagagcagccctgcccccacccccagcttctggagctctgtgcctgtgatgggccccagcctggccagccccagcagagctgccagccagctggccgtgcccagcacccccctgagcccccacagcgctgccagcggcacagctgctggcagccagcccagcagcccccgctaccggccctacacagtgacccacccctgggccagcagcggcgtgtccatcctgagcagcagccccagccccccagccctggccagcagcccccaggccgtgcctgccagcagcagccggcagaggcccagcagcactggaccacccctgcccccagccagccccagcgccaccagcagaagacccagcagcctgcgcatcagccccagcctgggcgccagcggcggggccagcaactgggacagctacagcgaccacttcaccatcgagacctgcaaggagacagacatgctgaactacctgattgagtgctttgacagagtgggcatcgaggagaagaaggcccccaagatgtgcagccagcctgctgtgtcccagctgctgagcaacatccgcagccagtgcatcagccacacagccctggtgctgcagggcagcctgacccagcccaggagcctgcagcagcccagcttcctggtgccctacatgctgtgcaggaacctgccctacggcttcatccaggagctggtgaggaccacccaccaggatgaggaggtgttcaagcagatcttcatccccatcctgcagggcctggccctggccgccaaggaatgttccctggacagcgactacttcaagtaccccctgatggccctgggggagctgtgtgagaccaagtttgggaagacccaccctgtgtgcaacctggtggccagcctgcggctgtggctgcccaagagcctgagccctggctgcggccgggagctgcagaggctgagctacctgggcgccttcttctccttctctgtgtttgctgaagatgatgtgaaggtggtggagaagtacttcagcggccctgccatcaccctggagaacaccagggtggtgtcccagagcctgcagcactacctggagctgggccggcaggagctgttcaagatcctgcacagcatcctgctgaatggagagacccgggaggccgccctgagctacatggctgctgtggtgaatgccaacatgaagaaggcccagatgcagacagatgaccggctggtgtccacagatggcttcatgctgaacttcctgtgggtgctgcagcagctgagcaccaagatcaagctggagaccgtggaccccacctacatcttccacccccgctgccgcatcaccctgcccaatgatgagaccagggtgaatgccaccatggaggatgtgaatgactggctgacagagctgtatggagaccagccccccttcagcgagcccaagttccccacagagtgcttcttcctgaccctgcacgcccaccacctgagcatcctgcccagctgccgccgctacatccggcggctgcgggccatccgggagctgaacagaacagtggaggacctgaagaacaatgaaagccagtggaaggacagccccctggccaccaggcaccgggagatgctgaagcgctgcaagacccagctgaagaagctggtgcgctgcaaggcctgtgctgatgctggcctgctggatgagagcttcctgcggcgctgcctgaacttctacggcctgctgatccagctgctgctgcgcatcctggaccctgcctacccagacatcaccctgcccctgaacagtgatgtgcccaaggtgtttgctgccctgcctgagttctacgtggaggatgtggccgagttcctgttcttcatcgtgcagtacagcccccaggccctgtatgagccctgcacccaggacatcgtgatgttcctggtggtgatgctgtgcaaccagaactacatccggaacccctacctggtggccaagctggtggaggtgatgttcatgaccaacccagctgtgcagcccaggacccagaagttctttgagatgattgagaaccaccccctgagcaccaagctgctggtgcccagcctgatgaagttctacacagatgtggagcacactggagccaccagcgagttctatgacaagttcaccatccgctaccacatcagcaccatcttcaagagcctgtggcagaacatcgcccaccacggcaccttcatggaggagttcaacagcggcaagcagtttgtgcgctacatcaacatgctgatcaatgacaccaccttcctgctggatgagagcctggagagcctgaagagaattcatgaggtgcaggaggagatgaagaacaaggagcagtgggaccagctgccccgggaccagcagcaggcccggcagagccagctggcccaggatgagcgggtgagccgcagctacctggccctggccacagaaacagtggacatgttccacatcctgaccaagcaggtgcagaagcccttcctgcggcctgagctgggcccccggctggccgccatgctgaacttcaacctgcagcagctgtgtggccccaagtgccgggacctgaaggtggagaaccctgagaagtatggctttgagcccaagaagctgctggaccagctgacagacatctacctgcagctggactgtgccaggtttgccaaggccatcgcagatgaccagaggagctacagcaaggagctgtttgaggaggtgatcagcaagatgaggaaggccggcatcaagagcaccatcgccatcgagaagttcaagctgctggccgagaaggtggaggagatcgtggccaagaatgcccgggcagaaattgactacagtgatgccccagatgagttccgggaccccctgatggacaccctgatgacagatcctgtgcggctgcccagcggcaccatcatggacaggagcatcatcctgcggcacctgctgaacagccccacagaccccttcaaccggcagaccctgacagagagcatgctggagcctgtgcctgagctgaaggagcagatccaggcctggatgagggagaagcagaacagcgaccactag

SEQ ID NO: 175230 - DNA, 303 bp, synthetic construct
  misc_feature 1..303: note = Description of Artificial Sequence: Synthetic coding sequence
  source 1..303: mol_type = other DNA
atggaggagctgtctgcagatgagatcagaagaagaaggctggcccggctggccggcggccagaccagccagcccaccacccccctgaccagcccccagagagaaaatcctcctggcccccccatcgccgccagcgcccctggccccagccagagcctgggcctgaatgtgcacaacatgaccccagccaccagccccatcggggccagcggcctgggcatcatcagtgatgacaagatgatcaagacagaatttggatctgctgacttcatgaacctggtggatggcttcaagatcaagtag

SEQ ID NO: 175231 - DNA, 3186 bp, synthetic construct
  misc_feature 1..3186: note = Description of Artificial Sequence: Synthetic coding sequence
  source 1..3186: mol_type = other DNA
atgagccaggtggatgtggacagcggcatcgagaacatggaggtggatgaaaatgaccggcgggagaagaggagcctgagtgacaaggagcccagcagcggccctgaggtgtctgaggagcaggccctgcagctggtgtgcaagatcttccgggtgtcctggaaggaccgggacagagatgtgatcttcctgagcagcctgagcgcccagttcaagcagaaccccaaggaggtgttcagtgacttcaaggacctgattggccagatcctgatggaggtgctgatgatgagcacccagaccagagatgagaacccctttgccagcctgacagccaccagccagcccatcgctgctgctgcccggagcccagacaggaacctgctgctgaacacaggcagcaaccctggcaccagccccatgttctgcagcgtggccagctttggagccagcagcctgagcagcctgggcgccagcggcggggccagcaactgggacagctacagcgaccacttcaccatcgagacctgcaaggagacagacatgctgaactacctgattgaatgttttgacagagtgggcatcgaggagaagaaggcccccaagatgtgcagccagcctgctgtgtcccagctgctgagcaacatccgcagccagtgcatcagccacacagccctggtgctgcagggcagcctgacccagcccaggagcctgcagcagcccagcttcctggtgccctacatgctgtgcaggaacctgccctacggcttcatccaggagctggtgaggaccacccaccaggatgaggaggtgttcaagcagatcttcatccccatcctgcagggcctggccctggccgccaaggagtgcagcctggacagcgactacttcaagtaccccctgatggccctgggggagctgtgtgagaccaagtttgggaagacccaccctgtgtgcaacctggtggccagcctgcggctgtggctgcccaagagcctgagccctggctgcggccgggagctgcagaggctgagctacctgggcgccttcttctccttctctgtgtttgctgaagatgatgtgaaggtggtggagaagtacttcagcggccctgccatcaccctggagaacaccagggtggtgtcccagagcctgcagcactacctggagctgggccggcaggagctgttcaagatcctgcacagcatcctgctgaatggagagacccgggaggccgccctgagctacatggctgctgtggtgaatgccaacatgaagaaggcccagatgcagacagatgaccggctggtgtccacagatggcttcatgctgaacttcctgtgggtgctgcagcagctgagcaccaagatcaagctggagaccgtggaccccacctacatcttccacccccgctgccgcatcaccctgcccaatgatgagaccagggtgaatgccaccatggaggatgtgaatgactggctgacagagctgtatggagaccagccccccttcagcgagcccaagttccccacagagtgcttcttcctgaccctgcacgcccaccacctgagcatcctgcccagctgccgccgctacatccggcggctgcgggccatccgggagctgaacagaacagtggaggacctgaagaacaatgaaagccagtggaaggacagccccctggccaccaggcaccgggagatgctgaagcgctgcaagacccagctgaagaagctggtgcgctgcaaggcctgtgctgatgctggcctgctggatgagagcttcctgcggcgctgcctgaacttctacggcctgctgatccagctgctgctgcgcatcctggaccctgcctacccagacatcaccctgcccctgaacagtgatgtgcccaaggtgtttgctgccctgcctgagttctacgtggaggatgtggccgagttcctgttcttcatcgtgcagtacagcccccaggccctgtatgagccctgcacccaggacatcgtgatgttcctggtggtgatgctgtgcaaccagaactacatccggaacccctacctggtggccaagctggtggaggtgatgttcatgaccaacccagctgtgcagcccaggacccagaagttctttgagatgattgagaaccaccccctgagcaccaagctgctggtgcccagcctgatgaagttctacacagatgtggagcacactggagccaccagcgagttctatgacaagttcaccatccgctaccacatcagcaccatcttcaagagcctgtggcagaacatcgcccaccacggcaccttcatggaggagttcaacagcggcaagcagtttgtgcgctacatcaacatgctgatcaatgacaccaccttcctgctggatgagagcctggagagcctgaagaggatccacgaggtgcaggaggagatgaagaacaaggagcagtgggaccagctgccccgggaccagcagcaggcccggcagagccagctggcccaggatgagcgggtgagccgcagctacctggccctggccacagagaccgtggacatgttccacatcctgaccaagcaggtgcagaagcccttcctgcggcctgagctgggcccccggctggccgccatgctgaacttcaacctgcagcagctgtgtggccccaagtgccgggacctgaaggtggagaaccctgagaagtatggctttgagcccaagaagctgctggaccagctgacagacatctacctgcagctggactgtgccaggtttgccaaggccatcgcagatgaccagaggagctacagcaaggagctgtttgaggaggtgatcagcaagatgaggaaggccggcatcaagagcaccatcgccatcgagaagttcaagctgctggccgagaaggtggaggagatcgtggccaagaatgcccgggcagaaattgactacagtgatgccccagatgagttccggggcaagtggacccaccccctgatggacaccctgatgacagatcctgtgcggctgcccagcggcaccatcatggacaggagcatcatcctgcggcacctgctgaacagccccacagaccccttcaaccggcagaccctgacagagagcatgctggagcctgtgcctgagctgaaggagcagatccaggcctggatgagggagaagcagaacagcgaccactag

SEQ ID NO: 175232 - DNA, 513 bp, synthetic construct
  misc_feature 1..513: note = Description of Artificial Sequence: Synthetic coding sequence
  source 1..513: mol_type = other DNA
atgcctggagaggtgcaggccagctacctgaagagccagagcaagctgagtgatgagggccgcctggagcccaggaagttccactgcaagggcgtgaaggtgcccaggaacttccggctgctggaggagctggaggagggccagaagggcgtgggagatggcaccgtgtcctggggcctggaggatgatgaggacatgaccctgacccgctggacaggcatgatcatcggcccccccaggaccatctatgagaaccgcatctacagcctgaagattgaatgtggccccaagtacccagaggcccccccatttgtgcgctttgtgaccaagatcaacatgaatggagtgaacagcagcaatggagtggtggacccccgggccatctctgtgctggccaagtggcagaacagctacagcatcaaggtggtgctgcaggagctgcggcggctgatgatgagcaaagaaaacatgaagctgccccagcccccagagggccagtgctacagcaactag

SEQ ID NO: 175233 - DNA, 312 bp, synthetic construct
  misc_feature 1..312: note = Description of Artificial Sequence: Synthetic coding sequence
  source 1..312: mol_type = other DNA
atggagaagggcctgaacaccaagaacttcacagagcagaccatctatgaaaatcgcatctacagcctgaagattgaatgtggccccaagtacccagaggcccccccatttgtgcgctttgtgaccaagatcaacatgaatggagtgaacagcagcaatggagtggtggacccccgggccatctctgtgctggccaagtggcagaacagctacagcatcaaggtggtgctgcaggagctgcggcggctgatgatgagcaaggagaacatgaagctgccccagcccccagagggccagtgctacagcaactag

SEQ ID NO: 175234 - DNA, 444 bp, synthetic construct
  misc_feature 1..444: note = Description of Artificial Sequence: Synthetic coding sequence
  source 1..444: mol_type = other DNA
atggccgccaccactggaagtggagtgaaggtgcccaggaacttccggctgctggaggagctggaggagggccagaagggcgtgggagatggcaccgtgtcctggggcctggaggatgatgaggacatgaccctgacccgctggacaggcatgatcatcggcccccccaggaccatctatgaaaatcgcatctacagcctgaagattgaatgtggccccaagtacccagaggcccccccatttgtgcgctttgtgaccaagatcaacatgaatggagtgaacagcagcaatggagtggtggacccccgggccatctctgtgctggccaagtggcagaacagctacagcatcaaggtggtgctgcaggagctgcggcggctgatgatgagcaaggagaacatgaagctgccccagcccccagagggccagtgctacagcaactag

SEQ ID NO: 175235 - DNA, 513 bp, synthetic construct; identical to SEQ ID NO: 175232
  misc_feature 1..513: note = Description of Artificial Sequence: Synthetic coding sequence
  source 1..513: mol_type = other DNA

SEQ ID NO: 175236 - DNA, 312 bp, synthetic construct
  misc_feature 1..312: note = Description of Artificial Sequence: Synthetic coding sequence
  source 1..312: mol_type = other DNA
atgaaggaggacctgaacctggagaacttcaccgccaagaccatctatgaaaatcgcatctacagcctgaagattgaatgtggccccaagtacccagaggcccccccatttgtgcgctttgtgaccaagatcaacatgaatggagtgaacagcagcaatggagtggtggacccccgggccatctctgtgctggccaagtggcagaacagctacagcatcaaggtggtgctgcaggagctgcggcggctgatgatgagcaaggagaacatgaagctgccccagcccccagagggccagtgctacagcaactag

SEQ ID NO: 175237 - DNA, 312 bp, synthetic construct; identical to SEQ ID NO: 175236
  misc_feature 1..312: note = Description of Artificial Sequence: Synthetic coding sequence
  source 1..312: mol_type = other DNA

SEQ ID NO: 175238 - DNA, 318 bp, synthetic construct
  misc_feature 1..318: note = Description of Artificial Sequence: Synthetic coding sequence
  source 1..318: mol_type = other DNA
atggccgccaccactggaagtggagtgaaggtgcccaggaacttccggctgctggaggagctggaggagggccagaagggcgtgggagatggcaccgtgtcctggggcctggaggatgatgaggacatgaccctgacccgctggacaggcatgatcatcggccccccccgggtggacccccgggccatctctgtgctggccaagtggcagaacagctacagcatcaaggtggtgctgcaggagctgcggcggctgatgatgagcaaggagaacatgaagctgccccagcccccagagggccagtgctacagcaactag

SEQ ID NO: 175239 - DNA, 369 bp, synthetic construct
  misc_feature 1..369: note = Description of Artificial Sequence: Synthetic coding sequence
  source 1..369: mol_type = other DNA
atgagcaccccagcccggcggcggctgatgagggacttcaagaggctgcaggaggaccccccagctggggtgtctggggcccccagcgagaacaacatcatggtgtggaatgctgtgatctttggacctgagggcaccccatttgaagatgtgtatgcagatggcagcatctgcctggacatcctgcagaaccgctggagccccacctatgatgtgagcagcatcctgaccagcatccagagcctgctggatgagcccaaccccaacagccctgccaacagccaggccgcccagctgtaccaggagaacaagcgggagtatgagaagagggtgtctgccatcgtggagcagagctggagggactgctag

SEQ ID NO: 175240 - DNA, 459 bp, synthetic construct
  misc_feature 1..459: note = Description of Artificial Sequence: Synthetic coding sequence
  source 1..459: mol_type = other DNA
atgagcaccccagcccggcggcggctgatgagggacttcaagaggctgcaggaggaccccccagctggggtgtctggggcccccagcgagaacaacatcatggtgtggaatgctgtgatctttggacctgagggcaccccatttgaagatggcaccttcaagctgaccatcgagttcacagaggagtaccccaacaagcccccaacagtgcgctttgtgtccaagatgttccaccccaacgtgtatgcagatggcagcatctgcctggacatcctgcagaaccgctggagccccacctatgatgtgagcagcatcctgaccagcatccagagcctgctggatgagcccaaccccaacagccctgccaacagccaggccgcccagctgtaccaggagaacaagcgggagtatgagaagagggtgtctgccatcgtggagcagagctggagggactgctag

SEQ ID NO: 175241 - DNA, 234 bp, synthetic construct
  misc_feature 1..234: note = Description of Artificial Sequence: Synthetic coding sequence
  source 1..234: mol_type = other DNA
atgttccaccccaacgtgtatgcagatggcagcatctgcctggacatcctgcagaaccgctggagccccacctatgatgtgagcagcatcctgaccagcatccagagcctgctggatgagcccaaccccaacagccctgccaacagccaggccgcccagctgtaccaggagaacaagcgggagtatgagaagagggtgtctgccatcgtggagcagagctggagggactgctag

SEQ ID NO: 175242 - DNA, 459 bp, synthetic construct
  misc_feature 1..459: note = Description of Artificial Sequence: Synthetic coding sequence
  source 1..459: mol_type = other DNA
atgagcaccccagcccggcggcggctgatgagggacttcaagaggctgcaggaggacccccctgtgggcgtgtctggggcccccagcgagaacaacatcatgcagtggaatgctgtgatctttggacctgagggcaccccatttgaagatggcaccttcaagctggtgattgagttcagcgaggagtaccccaacaagcccccaacagtgcgcttcctgagcaagatgttccaccccaacgtgtatgcagatggcagcatctgcctggacatcctgcagaaccgctggagccccacctatgatgtgagcagcatcctgaccagcatccagagcctgctggatgagcccaaccccaacagccctgccaacagccaggccgcccagctgtaccaggagaacaagcgggagtatgagaagagggtgtctgccatcgtggagcagagctggaatgacagctag

SEQ ID NO: 175243 - DNA, 153 bp, synthetic construct
  misc_feature 1..153: note = Description of Artificial Sequence: Synthetic coding sequence
  source 1..153: mol_type = other DNA
atggccagccagaacagagatcctgctgccacctctgtggccgccgccaggaaaggagctgagcccagcggcggggccgcccggggccctgtgggcaagaggctgcagcaggagctgatgaccctgatgaaccccaccctcatcgtgccctag

SEQ ID NO: 175244 - DNA, 486 bp, synthetic construct
  misc_feature 1..486: note = Description of Artificial Sequence: Synthetic coding sequence
  source 1..486: mol_type = other DNA
atggccagccagaacagagatcctgctgccacctctgtggccgccgccaggaaaggagctgagcccagcggcggggccgcccggggccctgtgggcaagaggctgcagcaggagctgatgaccctgatgatgtctggggacaagggcatcagcgccttccctgagagtgacaacctcttcaagtgggtgggcaccatccatggagctgctggaacagctgtgggcagcatccgcaccagcagcacagtgtgcctgctgagcggcccccgggagacccaggacagcagcaagcccctggtgtggggcctgggctgggacatgaggctgctgctggagctgaccctgcagctgttcctgcagatgcctgagcccaacatcgacagccccctgaacacccacgccgctgagctgtggaagaaccccacagccttcaagaagtacctgcaggagacctacagcaagcaggtgaccagccaggagccctag

SEQ ID NO: 175245 - DNA, 453 bp, synthetic construct
  misc_feature 1..453: note = Description of Artificial Sequence: Synthetic coding sequence
  source 1..453: mol_type = other DNA
atggccagccagaacagagatcctgctgccacctctgtggccgccgccaggaaaggagctgagcccagcggcggggccgcccggggccctgtgggcaagaggctgcagcaggagctgatgaccctgatggtgtatgaggacctgcgctacaagctgagcctggagttccccagcggctacccctacaatgcccccaccgtgaagttcctgaccccctgctaccaccccaacgtggacacccagggcaacatctgcctggacatcctgaaggagaagtggagcgccctgtatgatgtgaggaccatcctgctgagcatccagagcctgctgggggagcccaacatcgacagccccctgaacacccatgctgctgagctgtggaagaaccccacagccttcaagaagtacctgcaggagacctacagcaagcaggtgaccagccaggagccctag

SEQ ID NO: 175246 - DNA, 540 bp, synthetic construct
  misc_feature 1..540: note = Description of Artificial Sequence: Synthetic coding sequence
  source 1..540: mol_type = other DNA
atggccagccagaacagagatcctgctgccacctctgtggccgccgccaggaaaggagctgagcccagcggcggggccgcccggggccctgtgggcaagaggctgcagcaggagctgatgaccctgatgatgtctggggacaagggcatcagcgccttccctgagagtgacaacctcttcaagtgggtgggcaccatccatggagctgctggcaccgtgtatgaggacctgcgctacaagctgagcctggagttccccagcggctacccctacaatgcccccaccgtgaagttcctgaccccctgctaccaccccaacgtggacacccagggcaacatctgcctggacatcctgaaggagaagtggagcgccctgtatgatgtgaggaccatcctgctgagcatccagagcctgctgggggagcccaacatcgacagccccctgaacacccacgccgctgagctgtggaagaaccccacagccttcaagaagtacctgcaggagacctacagcaagcaggtgaccagccaggagccctag

SEQ ID NO: 175247 - DNA, 423 bp, synthetic construct
  misc_feature 1..423: note = Description of Artificial Sequence: Synthetic coding sequence
  source 1..423: mol_type = other DNA
atgaccctgatgatgtctggggacaagggcatcagcgccttccctgagagtgacaacctcttcaagtgggtgggcaccatccacggggctgctggcaccgtgtatgaggacctgcgctacaagctgagcctggagttccccagcggctacccctacaatgcccccaccgtgaagttcctgaccccctgctaccaccccaacgtggacacccagggcaacatctgcctggacatcctgaaggagaagtggagcgccctgtatgatgtgaggaccatcctgctgagcatccagagcctgctgggggagcccaacatcgacagccccctgaacacccatgctgctgagctgtggaagaaccccacagccttcaagaagtacctgcaggagacctacagcaagcaggtgaccagccaggagccctag

SEQ ID NO: 175248 - DNA, 423 bp, synthetic construct; identical to SEQ ID NO: 175247
  misc_feature 1..423: note = Description of Artificial Sequence: Synthetic coding sequence
  source 1..423: mol_type = other DNA

SEQ ID NO: 175249 - DNA, 114 bp, synthetic construct
  misc_feature 1..114: note = Description of Artificial Sequence: Synthetic coding sequence
  source 1..114: mol_type = other DNA
atggccgccagcgctgctgagaccagggtcttcctggaggtgcggggccagctgcagagcgccctgctgatcctgggggacagagtgagcccctactgcccctgctggagctag

SEQ ID NO: 175250 - DNA, 1170 bp, synthetic construct
  misc_feature 1..1170: note = Description of Artificial Sequence: Synthetic coding sequence
  source 1..1170: mol_type = other DNA
atggccgccagcgctgctgagaccagggtcttcctggaggtgcggggccagctgcagagcgccctgctgatcctgggggagcccaaggagggcggcatgcccatgaacatcagcatcatgcccagcagcctgcagatgaagaccccagagggctgcacagagatccagctgcctgctgaggtgcggctggtgcccagcagctgccggggcctgcagtttgtggtgggagatggcctgcacctgcggctgcagacccaggccaagctgggcaccaagctgatctccatgttcaaccagagcagccagacccaggagtgctgcaccttctactgccagagctgtggggaggtgatcatcaaggacaggaagctgctgcgggtgctgcccctgcccagcgagaactggggcgccctggtgggggagtggtgctgccacccagacccctttgccaacaagagcctgcacccccaggagaatgactgcttcatcggggacagcttcttcctggtgaacctgcggaccagcctgtggcagcagaggcctgagctgagccctgtggagatgtgctgcgtgtccagtgacaaccactgcaagctggagcccaaggccaacaccaaggtgatctgcaagcgctgcaaggtgatgctgggggagaccgtgagcagcgagaccaccaagttctacatgacagagatcatcatccagagcagcgagaggagcttccccatcatccccaggtcctggtttgtgcagagcgtcatcgcccagtgcctggtgcagctgagcagcgcccggagcaccttccgcttcaccatccagggccaggatgacaaggtgtacatcctgctgtggctgctgaacagcgacagcctggtgattgagagcctgaggaacagcaagtacatcaagaagttccccctgctggagaacaccttcaaggctgacagcagcagcgcctggagcgctgtgaaggtgctgtaccagccctgcatcaagagcagaaatgagaagctggtgtccctgtgggagagtgacatctctgtgcaccccctgaccctgcccagcgccacctgcctggagctgctgctgatcctgagcaagagcaatgccaacctgcccagcagcctgcggcgggtgaacagcttccaggtggccttcctgaagatgtag

SEQ ID NO: 175251 - DNA, 444 bp, synthetic construct
  misc_feature 1..444: note = Description of Artificial Sequence: Synthetic coding sequence
  source 1..444: mol_type = other DNA
atggccctgaagaggatccagaaggagctgagtgacctgcagagggaccccccagcccactgcagcgctggccctgtgggagatgacctcttccactggcaggccaccatcatgggccccccagattctgcctaccagggcggcgtcttcttcctgactgtgcacttccccacagactaccccttcaagccacccaagatcgccttcaccaccaagatctaccaccccaacatcaacagcaatggcagcatctgcctggacatcctgcggagccagtggagccctgccctgactgtgtccaaggtgctgctgagcatctgcagcctgctgtgtgaccccaacccagatgaccccctggtgcctgacatcgcccagatctacaagagtgacaaggagaagtacaacagacatgcccgggagtggacccagaagtatgccatgtag

SEQ ID NO: 175252 - DNA, 606 bp, synthetic construct
  misc_feature 1..606: note = Description of Artificial Sequence: Synthetic coding sequence
  source 1..606: mol_type = other DNA
atgagcacagaggcccagagggtggatgacagccccagcaccagcggcggcagcagtgatggagaccagcgggagagcgtgcagcaggagcctgagcgggagcaggtgcagcccaagaagaaggagggcaagatcagcagcaagacagctgccaagctgagcaccagcgccaagaggatccagaaggagctggccgagatcaccctggaccccccacccaactgcagcgctggccccaagggggacaacatctatgagtggaggagcaccatcctgggccccccaggctctgtgtatgaaggaggagtcttcttcctggacatcaccttctccccagactaccccttcaagccacccaaggtgaccttccgcacccgcatctaccactgcaacatcaacagccagggcgtcatctgcctggacatcctgaaggacaactggagccctgccctgaccatcagcaaggtgctgctgagcatctgcagcctgctgacagactgcaacccagctgaccccctggtgggcagcatcgccacccagtacatgaccaacagagctgagcatgacaggatggcccggcagtggaccaagagatatgccacctag

SEQ ID NO: 175253 - DNA, 606 bp, synthetic construct; identical to SEQ ID NO: 175252
  misc_feature 1..606: note = Description of Artificial Sequence: Synthetic coding sequence
  source 1..606: mol_type = other DNA

SEQ ID NO: 175254 - DNA, 624 bp, synthetic construct
  misc_feature 1..624: note = Description of Artificial Sequence: Synthetic coding sequence
  source 1..624: mol_type = other DNA
atgagcagtgaccggcagaggagtgatgatgagagccccagcaccagcagcggcagcagtgatgctgaccagagggaccctgctgcccctgagcctgaggagcaggaggagaggaagcccagcgccacccagcagaagaagaacaccaagctgagcagcaagaccacagccaagctgagcaccagcgccaagaggatccagaaggagctggccgagatcaccctggaccccccacccaactgcagcgctggccccaagggggacaacatctatgagtggaggagcaccatcctgggccccccaggctctgtgtatgaaggaggagtcttcttcctggacatcaccttcagcagtgactaccccttcaagccacccaaggtgaccttccgcacccgcatctaccactgcaacatcaacagccagggcgtcatctgcctggacatcctgaaggacaactggagccctgccctgaccatcagcaaggtgctgctgagcatctgcagcctgctgacagactgcaacccagctgaccccctggtgggcagcatcgccacccagtacctgaccaacagagctgagcatgacagaattgcccggcagtggaccaagagatatgccacctag

SEQ ID NO: 175255 - DNA, 624 bp, synthetic construct; identical to SEQ ID NO: 175254
  misc_feature 1..624: note = Description of Artificial Sequence: Synthetic coding sequence
  source 1..624: mol_type = other DNA

SEQ ID NO: 175256 - DNA, 624 bp, synthetic construct; identical to SEQ ID NO: 175254
  misc_feature 1..624: note = Description of Artificial Sequence: Synthetic coding sequence
  source 1..624: mol_type = other DNA

SEQ ID NO: 175257 - DNA, 624 bp, synthetic construct; identical to SEQ ID NO: 175254
  misc_feature 1..624: note = Description of Artificial Sequence: Synthetic coding sequence
  source 1..624: mol_type = other DNA

SEQ ID NO: 175258 - DNA, 528 bp, synthetic construct
  misc_feature 1..528: note = Description of Artificial Sequence: Synthetic coding sequence
  source 1..528: mol_type = other DNA
atgagcagtgaccggcagaggagtgatgatgagagccccagcaccagcagcggcagcagtgatgctgaccagagggaccctgctgcccctgagcctgaggagcaggaggagaggaagcccagcgccacccagcagaagaagaacaccaagctgagcagcaagaccacagccaagctgagcaccagcgccaagaggatccagaaggagctggccgagatcaccctggaccccccacccaactgcagcgctggccccaagggggacaacatctatgagtggaggagcaccatcctgggccccccaggctctgtgtatgaaggaggagtcttcttcctggacatcaccttcagcagtgactaccccttcaagccacccaaggtgaccttccgcacccgcatctaccactgcaacatcaacagccagggcgtcatctgcctggacatcctgaaggacaactggagccctgccctgaccatcagcaaggtgctgctgagcatctgcagcctgctgacagactgcaacccctag

SEQ ID NO: 175259 - DNA, 528 bp, synthetic construct; identical to SEQ ID NO: 175258
  misc_feature 1..528: note = Description of Artificial Sequence: Synthetic coding sequence
  source 1..528: mol_type = other DNA

SEQ ID NO: 175260 - DNA, 528 bp, synthetic construct; identical to SEQ ID NO: 175258
  misc_feature 1..528: note = Description of Artificial Sequence: Synthetic coding sequence
  source 1..528: mol_type = other DNA

SEQ ID NO: 175261 - DNA, 414 bp, synthetic construct
  misc_feature 1..414: note = Description of Artificial Sequence: Synthetic coding sequence
  source 1..414: mol_type = other DNA
atgaatgaggagaacttctttgagtgggaggccctgatcatgggccctgaggacacctgctttgaatttggagtcttccctgccatcctgtccttccccctggactaccccctgagcccccccaagatgaggttcacctgtgagatgttccaccccaacatctacccagatggccgggtgtgcatcagcatcctgcacgcccctggagatgaccccatgggctatgagagcagcgctgagcgctggagccctgtgcagagcgtggagaagatcctgctgtctgtggtgtccatgctggccgagcccaatgatgagagcggggccaacgtggatgccagcaagatgtggagagatgaccgggagcagttctacaagatcgccaagcagatcgtgcagaagagcctgggcctgtag

SEQ ID NO: 175262 - DNA, 498 bp, synthetic construct
  misc_feature 1..498: note = Description of Artificial Sequence: Synthetic coding sequence
  source 1..498: mol_type = other DNA
atggccggcacagccctgaagaggctgatggccgagtacaagcagctgaccctgaaccccccagagggcatcgtggccggccccatgaatgaggagaacttctttgagtgggaggccctgatcatgggccctgaggacacctgctttgaatttggagtcttccctgccatcctgtccttccccctggactaccccctgagcccccccaagatgaggttcacctgtgagatgttccaccccaacatctacccagatggccgggtgtgcatcagcatcctgcacgcccctggagatgaccccatgggctatgagagcagcgctgagcgctggagccctgtgcagagcgtggagaagatcctgctgtctgtggtgtccatgctggccgagcccaatgatgagagcggggccaacgtggatgccagcaagatgtggagagatgaccgggagcagttctacaagatcgccaagcagatcgtgcagaagagcctgggcctgtag

SEQ ID NO: 175263 - DNA, 552 bp, synthetic construct
  misc_feature 1..552: note = Description of Artificial Sequence: Synthetic coding sequence
  source 1..552: mol_type = other DNA
atgagcagccccagccctgggaagaggaggatggacacagatgtggtgaagctgattgagagcaagcatgaggtgaccatcctgggcggcctgaatgaatttgtggtgaagttctacggcccccagggcaccccctatgagggcggcgtgtggaaggtgcgggtggacctgcctgacaagtaccccttcaagagccccagcatcggcttcatgaacaagatcttccaccccaacattgatgaggccagcggcaccgtgtgcctggatgtgatcaaccagacctggacagccctgtatgacctgaccaacatctttgagagcttcctgccccagctgctggcctaccccaaccccatcgaccccctgaatggagatgctgctgccatgtacctgcacaggcctgaggagtacaagcagaagatcaaggagtacatccagaagtatgccacagaggaggccctgaaggagcaggaggagggcactggagacagcagcagcgagagctccatgtctgacttctctgaagatgaggcccaggacatggagctgtag

SEQ ID NO: 175264 - DNA, 459 bp, synthetic construct
  misc_feature 1..459: note = Description of Artificial Sequence: Synthetic coding sequence
  source 1..459: mol_type = other DNA
atgagcagccccagccctgggaagaggaggatggacacagatgtggtgaagctgattgagagcaagcatgaggtgaccatcctgggcggcctgaatgaatttgtggtgaagttctacggcccccagggcaccccctatgagggcggcgtgtggaaggtgcgggtggacctgcctgacaagtaccccttcaagagccccagcattgacctgaccaacatctttgagagcttcctgccccagctgctggcctaccccaaccccatcgaccccctgaatggagatgctgctgccatgtacctgcacaggcctgaggagtacaagcagaagatcaaggagtacatccagaagtatgccacagaggaggccctgaaggagcaggaggagggcaccggggacagcagcagcgagagctccatgtctgacttctctgaagatgaggcccaggacatggagctgtag

SEQ ID NO: 175265 - DNA, 477 bp, synthetic construct
  misc_feature 1..477: note = Description of Artificial Sequence: Synthetic coding sequence
  source 1..477: mol_type = other DNA
atgagcggcatcgccctgagccggctggcccaggagaggaaggcctggaggaaggaccaccccttcggctttgtggccgtgcccaccaagaacccagatggcaccatgaacctgatgaactgggagtgtgccatccctgggaagaagggcaccccctgggagggcggcctcttcaagctgaggatgctgttcaaggatgactaccccagcagcccccccaagtgcaagtttgagcccccactcttccaccccaacgtgtaccccagcggcaccgtgtgcctgagcatcctggaggaggacaaggactggaggcctgccatcaccatcaagcagatcctgctgggcatccaggagctgctgaatgagcccaacatccaggaccctgcccaggccgaggcctacaccatctactgccagaacagagtggagtatgagaagagggtgcgggcccaggccaagaagtttgcccccagctag

SEQ ID NO: 175266 - DNA, 477 bp, synthetic construct; identical to SEQ ID NO: 175265
  misc_feature 1..477: note = Description of Artificial Sequence: Synthetic coding sequence
  source 1..477: mol_type = other DNA

SEQ ID NO: 175267 - DNA, 477 bp, synthetic construct; identical to SEQ ID NO: 175265
  misc_feature 1..477: note = Description of Artificial Sequence: Synthetic coding sequence
  source 1..477: mol_type = other DNA

SEQ ID NO: 175268 - DNA, 477 bp, synthetic construct; identical to SEQ ID NO: 175265
  misc_feature 1..477: note = Description of Artificial Sequence: Synthetic coding sequence
  source 1..477: mol_type = other DNA

SEQ ID NO: 175269 - DNA, 477 bp, synthetic construct; identical to SEQ ID NO: 175265
  misc_feature 1..477: note = Description of Artificial Sequence: Synthetic coding sequence
  source 1..477: mol_type = other DNA

SEQ ID NO: 175270 - DNA, 477 bp, synthetic construct; identical to SEQ ID NO: 175265
  misc_feature 1..477: note = Description of Artificial Sequence: Synthetic coding sequence
  source 1..477: mol_type = other DNA

SEQ ID NO: 175271 - DNA, 465 bp, synthetic construct
  misc_feature 1..465: note = Description of Artificial Sequence: Synthetic coding sequence
  source 1..465: mol_type = other DNA
atggccgccagccggcggctgatgaaggagctggaggagatcagaaaatgtggcatgaagaacttcaggaacatccaggtggatgaggccaacctgctgacctggcagggcctgattgtgcctgacaaccccccctatgacaagggggccttcagaattgagatcaacttccctgctgagtaccccttcaagccacccaagatcaccttcaagaccaagatctaccaccccaacattgatgagaagggccaggtgtgcctgcccgtcatctctgctgagaactggaagccagccaccaagacagaccaggtgatccagagcctgattgccctggtgaatgacccccagcctgagcaccccctgcgggctgacctggccgaggagtacagcaaggacaggaagaagttctgcaagaatgctgaggagttcaccaagaagtatggagagaagaggcctgtggactag

SEQ ID NO: 175272 - DNA, 639 bp, synthetic construct
  misc_feature 1..639: note = Description of Artificial Sequence: Synthetic coding sequence
  source 1..639: mol_type = other DNA
atgcaggtggccgccggcaccaggggggacacccggctgcaggaggtggccctgctgccccagctgtttgacctgctggtgctgggccagaggcgggcccggctgctgcggcaggtgcccagcgccctggccggcaaggacctggcccagctgcaggccggggccaccctggccggctacagaagagcccacggccctgaggagctggaggagatcagaaaatgtggcatgaagaacttcaggaacatccaggtggatgaggccaacctgctgacctggcagggcctgattgtgcctgacaaccccccctatgacaagggggccttcagaattgagatcaacttccctgctgagtaccccttcaagccacccaagatcaccttcaagaccaagatctaccaccccaacattgatgagaagggccaggtgtgcctgcccgtcatctctgctgagaactggaagccagccaccaagacagaccaggtgatccagagcctgattgccctggtgaatgacccccagcctgagcaccccctgcgggctgacctggccgaggagtacagcaaggacaggaagaagttctgcaagaatgctgaggagttcaccaagaagtatggagagaagaggcctgtggactag

SEQ ID NO: 175273 - DNA, 369 bp, synthetic construct
  misc_feature 1..369: note = Description of Artificial Sequence: Synthetic coding sequence
  source 1..369: mol_type = other DNA
atggccgccagccggcggctgatgaaggacaaccccccctatgacaagggggccttcagaattgagatcaacttccctgctgagtaccccttcaagccacccaagatcaccttcaagaccaagatctaccaccccaacattgatgagaagggccaggtgtgcctgcccgtcatctctgctgagaactggaagccagccaccaagacagaccaggtgatccagagcctgattgccctggtgaatgacccccagcctgagcaccccctgcgggctgacctggccgaggagtacagcaaggacaggaagaagttctgcaagaatgctgaggagttcaccaagaagtatggagagaagaggcctgtggactag

SEQ ID NO: 175274 - DNA, 462 bp, synthetic construct
  misc_feature 1..462: note = Description of Artificial Sequence: Synthetic coding sequence
  source 1..462: mol_type = other DNA
atgatggcctccatgagggtggtgaaggagctggaggacctgcagaagaagcccccaccctacctgaggaacctgagcagtgatgatgccaacgtgctggtgtggcacgccctgctgctgcctgaccagcccccctaccacctgaaggccttcaacctgcgcatctccttccccccagagtaccccttcaagccacccatgatcaagttcaccaccaagatctaccaccccaacgtggatgaaaatggccagatctgcctgcccatcatcagcagcgagaactggaagccctgcaccaagacctgccaggtgctggaggccctgaatgtgctggtgaaccggcccaacatccgggagcccctgaggatggacctggccgacctgctgacccagaaccctgagctgttcaggaagaatgctgaggagttcaccctgcgctttggagtggaccggcccagctag

SEQ ID NO: 175275 - DNA, 264 bp, synthetic construct
  misc_feature 1..264: note = Description of Artificial Sequence: Synthetic coding sequence
  source 1..264: mol_type = other DNA
atgatcaagttcaccaccaagatctaccaccccaacgtggatgaaaatggccagatctgcctgcccatcatcagcagcgagaactggaagccctgcaccaagacctgccaggtgctggaggccctgaatgtgctggtgaaccggcccaacatccgggagcccctgaggatggacctggccgacctgctgacccagaaccctgagctgttcaggaagaatgctgaggagttcaccctgcgctttggagtggaccggcccagctag

SEQ ID NO: 175276 - DNA, 198 bp, synthetic construct
  misc_feature 1..198: note = Description of Artificial Sequence: Synthetic coding sequence
  source 1..198: mol_type = other DNA
atgatcaagttcaccaccaagatctaccaccccaacgtggatgaaaatggccagatctgcctgcccatcatcagcagcgagaactggaagccctgcaccaagacctgccaggtgctggaggccctgaatgtgctggtgaaccggcccaacatccgggagcccctgaggatggacctggccgacctgctgacccagtag

SEQ ID NO: 175277 - DNA, 1128 bp, synthetic construct
  misc_feature 1..1128: note = Description of Artificial Sequence: Synthetic coding sequence
  source 1..1128: mol_type = other DNA
atgtctgtgtctggcctgaaggccgagctgaagttcctggccagcatctttgacaagaaccacgagcgcttccgcatcgtgtcctggaagctggatgagctgcactgccagttcctggtgccccagcagggcagcccccacagcctgcccccacccctgaccctgcactgcaacatcacagagagctaccccagcagcagccccatctggtttgtggacagcgaggaccccaacctgacctctgtgctggagcggctggaggacaccaagaacaacaacctgctgcggcagcagctgaagtggctgatctgtgagctgtgcagcctgtacaacctgcccaagcacctggatgtggagatgctggaccagcccctgcccaccggccagaatggcaccacagaggaggtgaccagcgaggaggaggaggaggaggaggagatggctgaagatattgaggacctggaccactatgagatgaaggaggaggagcccatcagcggcaagaagtcagaagatgagggcatcgagaaggagaacctggccatcctggagaagatcaggaagacccagaggcaggaccacctgaatggagctgtgtctggctctgtgcaggccagtgaccggctgatgaaggagctgcgggacatctaccgcagccagagctacaagacaggcatctacagcgtggagctgatcaatgacagcctgtatgactggcacgtgaagctgcagaaggtggaccctgacagccccctgcacagcgacctgcagatcctgaaggagaaggagggcatcgagtacatcctgctgaacttctccttcaaggacaacttcccctttgaccccccatttgtgcgggtggtgctgcctgtgctgagcggcggctacgtgctgggcggcggggccctgtgcatggagctgctgaccaagcagggctggagcagcgcctacagcattgaatctgtcatcatgcagatcaatgccaccctggtgaagggcaaggcccgggtgcagtttggagccaacaagaaccagtacaacctggcccgggcccagcagagctacaacagcatcgtgcagatccacgagaagaatggctggtacaccccacccaaggaggatggatag

SEQ ID NO: 175278 - DNA, 945 bp, synthetic construct
  misc_feature 1..945: note = Description of Artificial Sequence: Synthetic coding sequence
  source 1..945: mol_type = other DNA
atgtctgtgtctggcctgaaggccgagctgaagttcctggccagcatctttgacaagaaccacgagcgcttccgcatcgtgtcctggaagctggatgagctgcactgccagttcctggtgccccagcagggcagcccccacagcctgcccccacccctgaccctgcactgcaacatcacagagagctaccccagcagcagccccatctggtttgtggacagcgaggaccccaacctgacctctgtgctggagcggctggaggacaccaagaacaacaacctgctgcggcagcagctgaagtggctgatctgtgagctgtgcagcctgtacaacctgcccaagcacctggatgtggagatgctggaccagcccctgcccaccggccagaatggcaccacagaggaggtgaccagcgaggaggaggaggaggaggaggagatggctgaagatattgaggacctggaccactatgagatgaaggaggaggagcccatcagcggcaagaagtcagaagatgagggcatcgagaaggagaacctggccatcctggagaagatcaggaagacccagaggcaggaccacctgaatggagctgtgtctggctctgtgcaggccagtgaccggctgatgaaggagctgcgggacatctaccgcagccagagctacaagacaggcatctacagcgtggagctgatcaatgacagcctgtatgactggcacgtgaagctgcagaaggtggaccctgacagccccctgcacagcgacctgcagatcctgaaggagaaggagggcatcgagtacatcctgctgaacttctccttcaaggacaacttcccctttgaccccccatttgtgcgggtggtgctgcctgtgctgagcggcggcctggtgcaccccagcaagggccgctggctgaatgtgctgactgtggtgtgcctggactag

SEQ ID NO: 175279 - DNA, 1080 bp, synthetic construct
  misc_feature 1..1080: note = Description of Artificial Sequence: Synthetic coding sequence
  source 1..1080: mol_type = other DNA
atgaggatggacagcctgacagaggagaagctggagtgccgcctgtggtgctgcctgagtgaccccagccccccaggcctggccgcccgctgctgcgtgctggagaggagcatcgtgcccagcctgcggcaggagagctaccccagcagcagccccatctggtttgtggacagcgaggaccccaacctgacctctgtgctggagcggctggaggacaccaagaacaacaacctgctgcggcagcagctgaagtggctgatctgtgagctgtgcagcctgtacaacctgcccaagcacctggatgtggagatgctggaccagcccctgcccaccggccagaatggcaccacagaggaggtgaccagcgaggaggaggaggaggaggaggagatggctgaagatattgaggacctggaccactatgagatgaaggaggaggagcccatcagcggcaagaagtcagaagatgagggcatcgagaaggagaacctggccatcctggagaagatcaggaagacccagaggcaggaccacctgaatggagctgtgtctggctctgtgcaggccagtgaccggctgatgaaggagctgcgggacatctaccgcagccagagctacaagacaggcatctacagcgtggagctgatcaatgacagcctgtatgactggcacgtgaagctgcagaaggtggaccctgacagccccctgcacagcgacctgcagatcctgaaggagaaggagggcatcgagtacatcctgctgaacttctccttcaaggacaacttcccctttgaccccccatttgtgcgggtggtgctgcctgtgctgagcggcggctacgtgctgggcggcggggccctgtgcatggagctgctgaccaagcagggctggagcagcgcctacagcattgaatctgtcatcatgcagatcaatgccaccctggtgaagggcaaggcccgggtgcagtttggagccaacaagaaccagtacaacctggcccgggcccagcagagctacaacagcatcgtgcagatccacgagaagaatggctggtacaccccacccaaggaggatggatag

SEQ ID NO: 175280 - DNA, 1080 bp, synthetic construct; identical to SEQ ID NO: 175279
  misc_feature 1..1080: note = Description of Artificial Sequence: Synthetic coding sequence
  source 1..1080: mol_type = other DNA

SEQ ID NO: 175281 - DNA, 717 bp, synthetic construct
  misc_feature 1..717: note = Description of Artificial Sequence: Synthetic coding sequence
  source 1..717: mol_type = other DNA
atggcccagcagcagatgaccagcagccagaaggccctgatgctggagctgaagagcctgcaggaggagcctgtggagggcttccgcatcaccctggtggatgaaagtgacctgtacaactgggaggtggccatcttcggcccccccaacaccctgtatgaaggaggctacttcaaggcccacatcaagttccccatcgactacccctacagcccccccaccttccgcttcctgaccaagatgtggcaccccaacatctatgaaaatggagatgtgtgcatcagcatcctgcacccccctgtggatgacccccagagcggggagctgcccagcgagcgctggaaccccacccagaatgtgaggaccatcctgctgagcgtcatcagcctgctgaatgagcccaacaccttctccccagccaacgtggatgcctctgtgatgttcaggaagtggagggacagcaagggcaaggacaaggagtatgcagagatcatcaggaagcaggtgtctgccaccaaggccgaggccgagaaggatggagtgaaggtgcccaccaccctggccgagtactgcatcaagaccaaggtgcccagcaatgacaacagcagtgacctgctgtatgatgacctgtatgatgatgacattgatgatgaagatgaggaggaggaggatgctgactgctatgatgatgatgattctggaaatgaggagagctag

SEQ ID NO: 175282 - DNA, 669 bp, synthetic construct
  misc_feature 1..669: note = Description of Artificial Sequence: Synthetic coding sequence
  source 1..669: mol_type = other DNA
atgaacagcaatgtggagaacctgcccccccacatcatccggctggtgtacaaggaggtgaccaccctgacagctgaccccccagatggcatcaaggtgttccccaatgaggaggacctgacagacctgcaggtgaccatcgagggccctgagggcaccccctatgctgggggcctcttcaggatgaagctgctgctgggcaaggacttccctgccagcccccccaagggctacttcctgaccaagatcttccaccccaacgtgggcgccaatggagagatctgtgtgaatgtgctgaagagggactggacagctgagctgggcatcagacatgtgctgctgaccatcaagtgcctgctgatccaccccaaccctgagagcgccctgaatgaggaggccggccgcctgctgctggagaactatgaggagtatgctgcccgggcccggctgctgacagagatccatggaggagctgggggccccagcggccgggcagaggccggccgggccctggccagcggcacagaggccagcagcacagaccccggggcccctgggggccctgggggcgctgagggccccatggccaagaagcacgccggggagcgggacaagaagctggccgccaagaagaagacagacaagaagagggccctgcggcggctgtag

SEQ ID NO: 175283 - DNA, 594 bp, synthetic construct
  misc_feature 1..594: note = Description of Artificial Sequence: Synthetic coding sequence
  source 1..594: mol_type = other DNA
atgcagagggccagccggctgaagcgggagctgcacatgctggccacagagcccccacctggcatcacctgctggcaggacaaggaccagatggatgacctgcgggcccagatcctgggcggggccaacaccccctatgagaagggcgtcttcaagctggaggtgatcatccctgagcgctacccctttgagcccccccagatccgcttcctgacccccatctaccaccccaacattgattctgctggccgcatctgcctggatgtgctgaagctgccccccaagggggcctggaggcccagcctgaacatcgccaccgtgctgaccagcatccagctgctgatgtctgagcccaacccagatgaccccctgatggctgacatcagcagcgagttcaagtacaacaagccagccttcctgaagaatgcccggcagtggacagagaagcacgcccggcagaagcagaaggcagatgaggaggagatgctggacaacctgcctgaggccggggacagccgggtgcacaacagcacccagaagaggaaggccagccagctggtgggcatcgagaagaagttccacccagatgtgtag

SEQ ID NO: 175284 - DNA, 489 bp, synthetic construct
  misc_feature 1..489: note = Description of Artificial Sequence: Synthetic coding sequence
  source 1..489: mol_type = other DNA
atggcctccatgcagaccactggaagaagagtggaggtgtggttccccaagaggctgcagaaggagctgctggccctgcagaatgaccccccacctggcatgaccctgaatgagaagtctgtgcagaacagcatcacccagtggatcgtggacatggagggcgcccctggcaccctgtatgaaggagagaagttccagctgctcttcaagttcagcagccgctacccctttgacagcccccaggtgatgttcaccggggagaacatccctgtgcacccccacgtgtacagcaatggccacatctgcctgagcatcctgacagaggactggagccctgccctgtctgtgcagagcgtgtgcctgagcatcatctccatgctgagcagctgcaaggagaagaggcggcccccagacaacagcttctacgtgaggacctgcaacaagaaccccaagaagaccaagtggtggtaccatgatgacacctgctag

SEQ ID NO: 175285 - DNA, 480 bp, synthetic construct
  misc_feature 1..480: note = Description of Artificial Sequence: Synthetic coding sequence
  source 1..480: mol_type = other DNA
atggcctccatgcagaagaggctgcagaaggagctgctggccctgcagaatgaccccccacctggcatgaccctgaatgagaagtctgtgcagaacagcatcacccagtggatcgtggacatggagggcgcccctggcaccctgtatgaaggagagaagttccagctgctcttcaagttcagcagccgctacccctttgacagcccccaggtgatgttcaccggggagaacatccctgtgcacccccacgtgtacagcaatggccacatctgcctgagcatcctgacagaggactggagccctgccctgtctgtgcagagcgtgtgcctgagcatcatctccatgctgagcagctgcaaggagaagagaagacctccagacaacagcttctacgtgaggacctgcaacaagaaccccaagaagaccaagtggtggtaccacgagctgaagagcgccttcatcctgagcatcacagactag

SEQ ID NO: 175286 - DNA, 456 bp, synthetic construct
  misc_feature 1..456: note = Description of Artificial Sequence: Synthetic coding sequence
  source 1..456: mol_type = other DNA
atggcctccatgcagaagaggctgcagaaggagctgctggccctgcagaatgaccccccacctggcatgaccctgaatgagaagtctgtgcagaacagcatcacccagtggatcgtggacatggagggcgcccctggcaccctgtatgaaggagagaagttccagctgctcttcaagttcagcagccgctacccctttgacagcccccaggtgatgttcaccggggagaacatccctgtgcacccccacgtgtacagcaatggccacatctgcctgagcatcctgacagaggactggagccctgccctgtctgtgcagagcgtgtgcctgagcatcatctccatgctgagcagctgcaaggagaagagaagacctccagacaacagcttctacgtgaggacctgcaacaagaaccccaagaagaccaagtggtggtaccatgatgacacctgctag

SEQ ID NO: 175287 - DNA, 354 bp, synthetic construct
  misc_feature 1..354: note = Description of Artificial Sequence: Synthetic coding sequence
  source 1..354: mol_type = other DNA
atgagcagcaatgtgcctgctgacatgatcaacctgcggctcatcctggtgtctgggaagaccaaggagttcctgttcagccccaatgattctgccagtgacatcgccaagcacgtgtatgacaactggcccatggactgggaggaggagcaggtgagcagccccaacatcctgcggctcatctaccagggccgcttcctgcacggcaatgtgaccctgggcgccctgaagctgccctttgggaagaccaccgtgatgcacctggtggcccgggagaccctgcctgagcccaacagccagggccagaggaaccgggagaagacaggagagagcaactgctgcgtcatcctgtag

SEQ ID NO: 175288 - DNA, 474 bp, synthetic construct
  misc_feature 1..474: note = Description of Artificial Sequence: Synthetic coding sequence
  source 1..474: mol_type = other DNA
atgcagctgactgtgaaggccctgcagggccgggagtgcagcctgcaggtgcctgaagatgagctggtgtccaccctgaagcagctggtgtctgagaagctgaatgtgcctgtgcggcagcagaggctgctcttcaagggcaaggccctggctgatggcaagaggctgagtgactacagcatcggccccaacagcaagctgaacctggtggtgaagcccctggagaaggtgctgctggaggagggggaggcccagaggctggccgacagccccccaccccaggtgtggcagctgatcagcaaggtgctggcccggcacttctctgctgctgatgccagccgggtgctggagcagctgcagagggactatgaaagaagcctgagccggctgaccctggatgacatcgagcggctggccagccgcttcctgcaccctgaggtgacagagaccatggagaagggcttcagcaagtag

SEQ ID NO: 175289 - DNA, 525 bp, synthetic construct
  misc_feature 1..525: note = Description of Artificial Sequence: Synthetic coding sequence
  source 1..525: mol_type = other DNA
atgttcctgactgtgaagctgctgctgggccagcgctgcagcctgaaggtgtctggccaggagagcgtggccaccctgaagaggctggtgtcccggcggctgaaggtgcctgaggagcagcagcacctgctcttccggggccagctgctggaggatgacaagcacctgagtgactactgcatcggccccaatgccagcatcaacgtcatcatgcagcccctggagaagatggccctgaaggaggcccaccagccccagacccagcccctgtggcaccagctgggcctggtgctggccaagcactttgagccccaggatgccaaggctgtgctgcagctgctgcggcaggagcacgaggagcggctgcagaagatcagcctggagcacctggagcagctggcccagtacctgctggccgaggagccccacgtggagcctgctggggagcgggagctggaggccaaggcccggccccagagcagctgtgacatggaggagaaggaggaggccgctgctgaccagtag

SEQ ID NO: 175290 - DNA, 222 bp, synthetic construct
  misc_feature 1..222: note = Description of Artificial Sequence: Synthetic coding sequence
  source 1..222: mol_type = other DNA
atgattgaggtggtgtgcaatgaccggctgggcaagaaggtgcgggtgaagtgcaacacagatgacaccatcggggacctgaagaagctgattgctgcccagacaggcacccgctggaacaagatcgtgctgaagaagtggtacaccatcttcaaggaccacgtgtccctgggggactatgagatccatgatggcatgaacctggagctgtactaccagtag

SEQ ID NO: 175291 - DNA, 222 bp, synthetic construct; identical to SEQ ID NO: 175290
  misc_feature 1..222: note = Description of Artificial Sequence: Synthetic coding sequence
  source 1..222: mol_type = other DNA

SEQ ID NO: 175292 - DNA, 1143 bp, synthetic construct
  misc_feature 1..1143: note = Description of Artificial Sequence: Synthetic coding sequence
  source 1..1143: mol_type = other DNA
atgagcctgagtgactggcacctggccgtgaagctggccgaccagcccctgacccccaagagcatcctgcggctgcctgagacagagctgggggagtacagcctgggcggctacagcatctccttcctgaagcagctgattgctgggaagctgcaggagagcgtgcctgaccctgagctgattgacctgatctactgcggcaggaagctgaaggatgaccagaccctggacttctacggcatccagcccggcagcacagtgcacgtgctgaggaagtcctggccagagccagaccagaagccagagcctgtggacaaggtggccgccatgagggagttccgggtgctgcacacagccctgcacagcagcagcagctaccgggaggccgtgttcaagatgctgagcaacaaggagagcctggaccagatcatcgtggccaccccaggcctgagcagtgaccccatcgccctgggcgtgctgcaggacaaggacctcttctctgtgtttgctgaccccaacatgctggacaccctggtgcctgcccacccagccctggtgaatgccatcgtgctggtgctgcacagcgtggccggcagcgcccccatgcctggaacagacagcagcagccgctccatgcccagcagcagctacagagacatgcctgggggcttcctgtttgagggcctgagtgatgatgaagatgacttccaccccaacaccaggagcacccccagcagcagcacccccagcagcaggcctgccagcctgggctacagcggggccgccggcccccggcccatcacccagagcgagctggccacagccctggccctggccagcaccccagagagcagcagccacacccccaccccaggcacccagggccacagcagcggcaccagccccatgagcagtggagtgcagagcggcacccccatcaccaatgacctcttcagccaggccctgcagcacgccctgcaggccagcggccagcccagcctgcagagccagtggcagccccagctgcagcagctgcgggacatgggcatccaggatgatgagctgagcctgcgggccctgcaggccactggaggagacatccaggccgccctggagctgatctttgctgggggcgccccctag

SEQ ID NO: 175293 - DNA, 1143 bp, synthetic construct; identical to SEQ ID NO: 175292
  misc_feature 1..1143: note = Description of Artificial Sequence: Synthetic coding sequence
  source 1..1143: mol_type = other DNA

SEQ ID NO: 175294 - DNA, 957 bp, synthetic construct
  misc_feature 1..957: note = Description of Artificial Sequence: Synthetic coding sequence
  source 1..957: mol_type = other DNA
atggccctgcccatcatcgtgaagtggggcggccaggagtacagcgtgaccaccctgtctgaagatgacacagtgctggacctgaagcagttcctgaagaccctgactggagtgctgcctgagcggcagaagctgctgggcctgaaggtgaagggcaagccagcagaaaatgatgtgaagctgggcgccctgaagctgaagcccaacaccaagatcatgatgatgggcacccgggaggagagcctggaggatgtgctgggccccccaccagacaatgatgatgtggtgaatgactttgatattgaagatgaggtggtggaggtggagaaccgggaggagaacctgctgaagatcagccggcgggtgaaggagtacaaggtggagatcctgaaccccccccgggagggcaagaagctgctggtgctggatgtggactacaccctgtttgaccacaggagctgtgccgagactggagtggagctgatgaggccctacctgcacgagttcctgaccagcgcctatgaagattatgacatcgtcatctggagcgccaccaacatgaagtggattgaggccaagatgaaggagctgggcgtgtccaccaatgccaactacaagatcaccttcatgctggacagcgctgccatgatcaccgtgcacaccccaagaagaggcctgattgatgtgaagcccctgggcgtcatctggggcaagttcagcgagttctacagcaagaagaacaccatcatgtttgatgacatcggcaggaacttcctgatgaacccccagaatggcctgaagatccggcccttcatgaaggcccacctgaacagagacaaggacaaggagctgctgaagctgacccagtacctgaaggagatcgccaagctggatgacttcctggacctgaaccacaagtactgggagcgctacctgagcaagaagcagggccagtag

SEQ ID NO: 175295 - DNA, 1923 bp, synthetic construct
  misc_feature 1..1923: note = Description of Artificial Sequence: Synthetic coding sequence
  source 1..1923: mol_type = other DNA
atggccctgagccggggcctgccccgggagctggccgaggccgtggccggcggccgggtgctggtggtgggcgccggcggcatcggctgtgagctgctgaagaacctggtgctgaccggcttcagccacatcgacctgattgacctggacaccattgatgtgagcaacctgaaccggcagttcctgttccagaagaagcacgtgggccgcagcaaggcccaggtggccaaggagagcgtgctgcagttctaccccaaggccaacatcgtggcctaccatgacagcatcatgaacccagactacaacgtggagttcttccggcagttcatcctggtgatgaatgccctggacaacagagctgccaggaaccacgtgaacaggatgtgcctggccgcagatgtgcccctgattgaaagtggcacagctggctacctgggccaggtgaccaccatcaagaagggcgtgacagaatgttatgagtgccaccccaagcccacccagaggaccttccctggctgcaccatccggaacacccccagcgagcccatccactgcatcgtgtgggccaagtacctgttcaaccagctgtttggagaggaggatgctgaccaggaggtgtccccagacagagctgaccctgaggccgcctgggagcccacagaggccgaggcccgggcccgggccagcaatgaagatggagacatcaagaggatcagcaccaaggagtgggccaagagcacaggctatgaccctgtgaagctgttcaccaagctgttcaaggatgacatccgctacctgctgaccatggacaagctgtggaggaagaggaagccccctgtgcccctggactgggccgaggtgcagagccagggcgaggagaccaatgccagtgaccagcagaatgagccccagctgggcctgaaggaccagcaggtgctggatgtgaagagctatgcccggctcttcagcaagagcattgagaccctgcgggtgcacctggccgagaagggagatggagctgagctgatctgggacaaggatgaccccagcgccatggactttgtgaccagcgctgccaacctgaggatgcacatcttctccatgaacatgaagagcagatttgacatcaagtccatggccggcaacatcatcccagccatcgccaccaccaatgctgtgattgctggcctcatcgtgctggagggcctgaagatcctgagcggcaagattgaccagtgcaggaccatcttcctgaacaagcagcccaaccccaggaagaagctgctggtgccctgtgccctggacccccccaaccccaactgctacgtgtgtgccagcaagccagaggtgacagtgcggctgaatgtgcacaaggtgacagtgctgaccctgcaggacaagatcgtgaaggagaagtttgccatggtggccccagatgtgcagattgaagatggcaagggcaccatcctgatcagcagcgaggagggggagacagaggccaacaaccacaagaagctgtctgaatttggcatcagaaatggcagccggctgcaggctgatgacttcctgcaggactacaccctgctgatcaacatcctgcacagcgaggacctgggcaaggatgtggagtttgaggtggtgggagatgcccctgagaaggtgggccccaagcaggccgaggatgctgccaagagcatcaccaacggcagtgatgatggagcccagcccagcaccagcacagcccaggagcaggatgatgtgctgattgtggacagtgatgaggaggacagcagcaacaatgctgatgtgtctgaggaggagaggagcaggaagaggaagctggatgagaaggagaacctgagcgccaagaggagcagaattgagcagaaggaggagctggatgatgtgattgccctggactag

SEQ ID NO: 175296 - DNA, 1635 bp, synthetic construct
  misc_feature 1..1635: note = Description of Artificial Sequence: Synthetic coding sequence
  source 1..1635: mol_type = other DNA
atgaacccagactacaacgtggagttcttccggcagttcatcctggtgatgaatgccctggacaacagagctgccaggaaccacgtgaacaggatgtgcctggccgcagatgtgcccctgattgaaagtggcacagctggctacctgggccaggtgaccaccatcaagaagggcgtgacagaatgttatgagtgccaccccaagcccacccagaggaccttccctggctgcaccatccggaacacccccagcgagcccatccactgcatcgtgtgggccaagtacctgttcaaccagctgtttggagaggaggatgctgaccaggaggtgtccccagacagagctgaccctgaggccgcctgggagcccacagaggccgaggcccgggcccgggccagcaatgaagatggagacatcaagaggatcagcaccaaggagtgggccaagagcacaggctatgaccctgtgaagctgttcaccaagctgttcaaggatgacatccgctacctgctgaccatggacaagctgtggaggaagaggaagccccctgtgcccctggactgggccgaggtgcagagccagggcgaggagaccaatgccagtgaccagcagaatgagccccagctgggcctgaaggaccagcaggtgctggatgtgaagagctatgcccggctcttcagcaagagcattgagaccctgcgggtgcacctggccgagaagggagatggagctgagctgatctgggacaaggatgaccccagcgccatggactttgtgaccagcgctgccaacctgaggatgcacatcttctccatgaacatgaagagcagatttgacatcaagtccatggccggcaacatcatcccagccatcgccaccaccaatgctgtgattgctggcctcatcgtgctggagggcctgaagatcctgagcggcaagattgaccagtgcaggaccatcttcctgaacaagcagcccaaccccaggaagaagctgctggtgccctgtgccctggacccccccaaccccaactgctacgtgtgtgccagcaagccagaggtgacagtgcggctgaatgtgcacaaggtgacagtgctgaccctgcaggacaagatcgtgaaggagaagtttgccatggtggccccagatgtgcagattgaagatggcaagggcaccatcctgatcagcagcgaggagggggagacagaggccaacaaccacaagaagctgtctgaatttggcatcagaaatggcagccggctgcaggctgatgacttcctgcaggactacaccctgctgatcaacatcctgcacagcgaggacctgggcaaggatgtggagtttgaggtggtgggagatgcccctgagaaggtgggccccaagcaggccgaggatgctgccaagagcatcaccaacggcagtgatgatggagcccagcccagcaccagcacagcccaggagcaggatgatgtgctgattgtggacagtgatgaggaggacagcagcaacaatgctgatgtgtctgaggaggagaggagcaggaagaggaagctggatgagaaggagaacctgagcgccaagaggagcagaattgagcagaaggaggagctggatgatgtgattgccctggactag

SEQ ID NO: 175297 - DNA, 879 bp, synthetic construct
  misc_feature 1..879: note = Description of Artificial Sequence: Synthetic coding sequence
  source 1..879: mol_type = other DNA
atgtgcctggccgcagatgtgcccctcatcgagagcggcacagctggctacctgggccaggtgaccaccatcaagaagggcgtgacagagtgctatgagtgccaccccaagcccacccagaggaccttccctggctgcaccatccggaacaccccatctgagcccatccactgcatcgtgtgggccaagtacctgttcaaccagctgtttggagaagaagatgctgaccaggaggtgtccccagacagagctgaccctgaggccgcctgggagcccacagaagctgaggcccgggcccgggccagcaatgaagatggagacatcaagaggatcagcaccaaggagtgggccaagagcacaggctatgaccctgtgaagctgttcaccaagctgttcaaggatgacatccgctacctgctgaccatggacaagctgtggaggaagaggaagccccctgtgcccctggactgggccgaggtgcagagccagggcgaggagaccaatgccagtgaccagcagaatgagccccagctgggcctgaaggaccagcaggtgctggatgtgaagagctatgcccggctcttcagcaagagcattgagaccctgcgggtgcacctggccgagaagggagatggagctgagctgatctgggacaaggatgaccccagcgccatggactttgtgaccagcgctgccaacctgaggatgcacatcttctccatgaacatgaagagcagatttgacatcaagtccatggccggcaacatcatcccagccatcgccaccaccaatgctgtgattgctggcctgattgtgctggagggcctgaagatcctgagcggcaagattgaccagtgcaggacagacttctttgaatag

SEQ ID NO: 175298 - DNA, 1047 bp, synthetic construct
  misc_feature 1..1047: note = Description of Artificial Sequence: Synthetic coding sequence
  source 1..1047: mol_type = other DNA
atggccctgaagaggatgggcatcgtgtctgactatgagaagatccgcacctttgctgtggccatcgtgggcgtgggcggcgtgggctctgtgacagctgagatgctgacccgctgtggcatcggcaagctgctgctgtttgattatgacaaggtggagctggccaacatgaacagactcttcttccagccccaccaggccggcctgagcaaggtgcaggccgctgagcacaccctgaggaacatcaacccagatgtgctgtttgaggtgcacaactacaacatcaccaccgtggagaacttccagcacttcatggaccgcatcagcaatggaggcctggaggagggcaagcctgtggacctggtgctgagctgtgtggacaactttgaggccaggatgaccatcaacacagcctgcaatgagctgggccagacctggatggagagcggcgtgtctgaaaatgctgtgtctggccacatccagctgatcatccctggagagagcgcctgctttgcctgtgccccacccctggtggtggccgccaacattgatgagaagaccctgaagcgggagggcgtgtgtgccgccagcctgcccaccaccatgggcgtggtggccggcatcctggtgcagaatgtgctgaagttcctgctgaactttggcaccgtgtccttctacctgggctacaatgccatgcaggacttcttccccaccatgtccatgaagcccaacccccagtgtgatgacaggaactgcaggaagcagcaggaggagtacaagaagaaggtggccgccctgcccaagcaggaggtgatccaggaggaggaggagatcatccatgaagataatgagtggggcatcgagctggtgtctgaggtgtctgaggaggagctgaagaacttcagcggccctgtgcctgacctgcctgagggcatcaccgtggcctacaccatccccaagaagcaggaggacagcgtgacagagctgactgtggaggacagcggggagagcctggaggacctgatggccaagatgaagaacatgtag

SEQ ID NO: 175299 - DNA, 1215 bp, synthetic construct
  misc_feature 1..1215: note = Description of Artificial Sequence: Synthetic coding sequence
  source 1..1215: mol_type = other DNA
atggccgagagcgtggagcggctgcagcagagggtgcaggagctggagcgggagctggcccaggagaggagcctgcaggtgcccaggtctggagatggcggcggcggccgggtgcgcatcgagaagatgagcagcgaggtggtggacagcaacccctacagccggctgatggccctgaagaggatgggcatcgtgtctgactatgagaagatccgcacctttgctgtggccatcgtgggcgtgggcggcgtgggctctgtgacagctgagatgctgacccgctgtggcatcggcaagctgctgctgtttgattatgacaaggtggagctggccaacatgaacagactcttcttccagccccaccaggccggcctgagcaaggtgcaggccgctgagcacaccctgaggaacatcaacccagatgtgctgtttgaggtgcacaactacaacatcaccaccgtggagaacttccagcacttcatggaccgcatcagcaatggaggcctggaggagggcaagcctgtggacctggtgctgagctgtgtggacaactttgaggccaggatgaccatcaacacagcctgcaatgagctgggccagacctggatggagagcggcgtgtctgaaaatgctgtgtctggccacatccagctgatcatccctggagagagcgcctgctttgcctgtgccccacccctggtggtggccgccaacattgatgagaagaccctgaagcgggagggcgtgtgtgccgccagcctgcccaccaccatgggcgtggtggccggcatcctggtgcagaatgtgctgaagttcctgctgaactttggcaccgtgtccttctacctgggctacaatgccatgcaggacttcttccccaccatgtccatgaagcccaacccccagtgtgatgacaggaactgcaggaagcagcaggaggagtacaagaagaaggtggccgccctgcccaagcaggaggtgatccaggaggaggaggagatcatccatgaagataatgagtggggcatcgagctggtgtctgaggtgtctgaggaggagctgaagaacttcagcggccctgtgcctgacctgcctgagggcatcaccgtggcctacaccatccccaagaagcaggaggacagcgtgacagagctgactgtggaggacagcggggagagcctggaggacctgatggccaagatgaagaacatgtag

SEQ ID NO: 175300 - DNA, 2379 bp, synthetic construct
  misc_feature 1..2379: note = Description of Artificial Sequence: Synthetic coding sequence
  source 1..2379: mol_type = other DNA
atgtggatccaggtgaggaccatggatggccggcagacccacacagtggacagcctgagccggctgaccaaggtggaggagctgcggaggaagatccaggagctgttccacgtggagcccggcctgcagaggctcttctaccggggcaagcagatggaggatggccacaccctgtttgattatgaggtgcggctgaatgacaccatccagctgctggtgcggcagagcctggtgctgccccacagcaccaaggagcgggacagcgagctgagtgacacagattctggctgctgcctgggccagagcgagagtgacaagagcagcacccacggggaggccgctgctgagacagacagcaggcctgcagatgaggacatgtgggatgaaacagagctgggcctgtacaaggtgaatgaatatgtggatgcccgggacaccaacatgggcgcctggtttgaggcccaggtggtgcgggtgaccaggaaggcccccagcagagatgagccctgcagcagcaccagcaggcctgccctggaggaggatgtgatctaccacgtgaagtatgatgactacccagaaaatggagtggtgcagatgaacagcagagatgtgcgggcccgggcccggaccatcatcaagtggcaggacctggaggtgggccaggtggtgatgctgaactacaacccagacaaccccaaggagcggggcttctggtatgatgctgagatcagcaggaagcgggagaccaggacagcccgggagctgtatgccaacgtggtgctgggagatgacagcctgaatgactgccgcatcatctttgtggatgaggtgttcaagattgaaagacctggagagggcagccccatggtggacaaccccatgaggaggaagagcggccccagctgcaagcactgcaaggatgatgtgaaccggctgtgccgggtgtgtgcctgccacctgtgtggcggccggcaggaccctgacaagcagctgatgtgtgatgaatgtgacatggccttccacatctactgcctggacccccccctgagctctgtgcccagtgaagatgagtggtactgcccagagtgcagaaatgatgccagcgaggtggtgctggccggggagcggctgcgggagagcaagaagaaggccaagatggccagcgccaccagcagcagccagagggactggggcaagggcatggcctgtgtgggccgcaccaaggaatgtaccatcgtgcccagcaaccactacggccccatccctggcatccctgtgggcaccatgtggaggttccgggtgcaggtgtctgagagcggcgtgcaccggccccacgtggccggcatccacggccgcagcaatgatggagcctacagcctggtgctggccggcggctatgaagatgatgtggaccacggcaacttcttcacctacacaggcagcggcggccgggacctgagcggcaacaagaggacagctgagcagagctgtgaccagaagctgaccaacaccaacagagccctggccctgaactgctttgcccccatcaatgaccaggagggcgctgaggccaaggactggaggtctgggaagcctgtgcgggtggtgagaaatgtgaagggcggcaagaacagcaaatatgccccagctgagggcaacagatatgatggcatctacaaggtggtgaagtactggccagagaagggcaagagcggcttcctggtgtggagatacctgctgcggagagatgatgatgagcccggcccctggaccaaggagggcaaggaccgcatcaagaagctgggcctgaccatgcagtacccagagggctacctggaggccctggccaaccgggagcgggagaaggagaacagcaagcgggaggaggaggagcagcaggagggcggctttgccagccccaggacaggcaagggcaagtggaagaggaagtctgctgggggcggccccagcagagctggccccaggaggaccagcaagaagaccaaggtggagccctacagcctgacagcccagcagagcagcctcatccgggaggacaagagcaatgccaagctgtggaatgaggtgctggccagcctgaaggacaggcctgccagcggcagccccttccagctgttcctgagcaaggtggaggagaccttccagtgcatctgctgccaggagctggtgttccggcccatcaccaccgtgtgccagcacaacgtgtgcaaggactgcctggacaggagcttccgggcccaggtgttcagctgcccagcctgccgctatgacctgggccgctcctatgccatgcaggtgaaccagcccctgcagacagtgctgaaccagctgtttcctggctatggaaatggccgctag

SEQ ID NO: 175301 - DNA, 1224 bp, synthetic construct
  misc_feature 1..1224: note = Description of Artificial Sequence: Synthetic coding sequence
  source 1..1224: mol_type = other DNA
atggccagcgccaccagcagcagccagagggactggggcaagggcatggcctgtgtgggccgcaccaaggagtgcaccatcgtgcccagcaaccactacggccccatccctggcatccctgtgggcaccatgtggaggttccgggtgcaggtgtctgagagcggcgtgcaccggccccacgtggccggcatccacggccgcagcaatgatggagcctacagcctggtgctggccggcggctatgaagatgatgtggaccacggcaacttcttcacctacacaggcagcggcggccgggacctgagcggcaacaagaggacagctgagcagagctgtgaccagaagctgaccaacaccaacagagccctggccctgaactgctttgcccccatcaatgaccaggagggcgctgaggccaaggactggaggtctgggaagcctgtgcgggtggtgagaaatgtgaagggcggcaagaacagcaaatatgccccagctgagggcaacagatatgatggcatctacaaggtggtgaagtactggccagagaagggcaagagcggcttcctggtgtggagatacctgctgcggagagatgatgatgagcccggcccctggaccaaggagggcaaggaccgcatcaagaagctgggcctgaccatgcagtacccagagggctacctggaggccctggccaaccgggagcgggagaaggagaacagcaagcgggaggaggaggagcagcaggagggcggctttgccagccccaggacaggcaagggcaagtggaagaggaagtctgctgggggcggccccagccgggccggccccaggaggaccagcaagaagaccaaggtggagccctacagcctgacagcccagcagagcagcctcatccgggaggacaagagcaatgccaagctgtggaatgaggtgctggccagcctgaaggacaggcctgccagcggcagccccttccagctgttcctgagcaaggtggaggagaccttccagtgcatctgctgccaggagctggtgttccggcccatcaccaccgtgtgccagcacaacgtgtgcaaggactgcctggaccgctccttccgggcccaggtgttcagctgcccagcctgccgctatgacctgggccgctcctatgccatgcaggtgaaccagcccctgcagacagtgctgaaccagctgtttcctggctatggaaatggaagatag

SEQ ID NO: 175302 - DNA, 2418 bp, synthetic construct
  misc_feature 1..2418: note = Description of Artificial Sequence: Synthetic coding sequence
  source 1..2418: mol_type = other DNA
atgggcgtgtttgctgtgccccccctgtctgctgacaccatgtggatccaggtgaggaccatggatggccggcagacccacacagtggacagcctgagccggctgaccaaggtggaggagctgcggaggaagatccaggagctgttccacgtggagcccggcctgcagaggctcttctaccggggcaagcagatggaggatggccacaccctgtttgattatgaggtgcggctgaatgacaccatccagctgctggtgcggcagagcctggtgctgccccacagcaccaaggagcgggacagcgagctgagtgacacagacagcggctgctgcctgggccagagcgagagtgacaagagcagcacccatggagaggccgctgctgagacagacagcaggcctgcagatgaggacatgtgggatgaaacagagctgggcctgtacaaggtgaatgaatatgtggatgcccgggacaccaacatgggcgcctggtttgaggcccaggtggtgcgggtgaccaggaaggcccccagcagagatgagccctgcagcagcaccagcaggcctgccctggaggaggatgtgatctaccacgtgaagtatgatgactacccagaaaatggagtggtgcagatgaacagcagagatgtgcgggcccgggcccggaccatcatcaagtggcaggacctggaggtgggccaggtggtgatgctgaactacaacccagacaaccccaaggagcggggcttctggtatgatgctgagatcagcaggaagcgggagaccaggacagcccgggagctgtatgccaacgtggtgctgggagatgacagcctgaatgactgccgcatcatctttgtggatgaggtgttcaagattgaaagacctggagagggcagccccatggtggacaaccccatgaggaggaagagcggccccagctgcaagcactgcaaggatgatgtgaaccggctgtgccgggtgtgtgcctgccacctgtgtggcggccggcaggaccctgacaagcagctgatgtgtgatgaatgtgacatggccttccacatctactgcctggacccccccctgagctctgtgcccagtgaagatgagtggtactgcccagaatgtagaaatgatgccagcgaggtggtgctggccggggagcggctgcgggagagcaagaagaaggccaagatggccagcgccaccagcagcagccagagggactggggcaagggcatggcctgtgtgggccgcaccaaggagtgcaccatcgtgcccagcaaccactacggccccatccctggcatccctgtgggcaccatgtggaggttccgggtgcaggtgtctgagagcggcgtgcaccggccccacgtggccggcatccacggccgcagcaatgatggagcctacagcctggtgctggccggcggctatgaagatgatgtggaccacggcaacttcttcacctacacaggcagcggcggccgggacctgagcggcaacaagaggacagctgagcagagctgtgaccagaagctgaccaacaccaacagagccctggccctgaactgctttgcccccatcaatgaccaggagggcgctgaggccaaggactggaggtctgggaagcctgtgcgggtggtgagaaatgtgaagggcggcaagaacagcaaatatgccccagctgagggcaacagatatgatggcatctacaaggtggtgaagtactggccagagaagggcaagagcggcttcctggtgtggagatacctgctgcggagagatgatgatgagcccggcccctggaccaaggagggcaaggaccgcatcaagaagctgggcctgaccatgcagtacccagagggctacctggaggccctggccaaccgggagcgggagaaggagaacagcaagcgggaggaggaggagcagcaggagggcggctttgccagccccaggacaggcaagggcaagtggaagaggaagtctgctgggggcggccccagccgggccggccccaggaggaccagcaagaagaccaaggtggagccctacagcctgacagcccagcagagcagcctcatccgggaggacaagagcaatgccaagctgtggaatgaggtgctggccagcctgaaggacaggcctgccagcggcagccccttccagctgttcctgagcaaggtggaggagaccttccagtgcatctgctgccaggagctggtgttccggcccatcaccaccgtgtgccagcacaacgtgtgcaaggactgcctggaccgctccttccgggcccaggtgttcagctgcccagcctgccgctatgacctgggccgctcctatgccatgcaggtgaaccagcccctgcagacagtgctgaaccagctgtttcctggctatggaaatggaagatag

SEQ ID NO: 175303 - DNA, 2379 bp, synthetic construct; identical to SEQ ID NO: 175300
  misc_feature 1..2379: note = Description of Artificial Sequence: Synthetic coding sequence
  source 1..2379: mol_type = other DNA

SEQ ID NO: 175304 - DNA, 2379 bp, synthetic construct; identical to SEQ ID NO: 175300
  misc_feature 1..2379: note = Description of Artificial Sequence: Synthetic coding sequence
  source 1..2379: mol_type = other DNA

SEQ ID NO: 175305 - DNA, 3240 bp, synthetic construct
  misc_feature 1..3240: note = Description of Artificial Sequence: Synthetic coding sequence
  source 1..3240: mol_type = other DNA
atgaagagctgtgctgtgtccctgaccacagctgctgtggcctttggagatgaggccaagaagatggccgagggcaaggccagccgggagagcgaggaggagagcgtgtccctgactgtggaggagcgggaggccctgggcggcatggacagccggctgtttggatttgtgcggctgcatgaagatggagcccggaccaagaccctgctgggcaaggctgtgcgctgctatgagagcctcatcctgaaggccgagggcaaggtggagagtgacttcttctgccagctgggccacttcaacctgctgctggaggactacagcaaggccctgagcgcctaccagcgctactacagcctgcaggccgactactggaagaatgctgccttcctgtatggcctgggcctggtgtacttctactacaatgccttccactgggccatcaaggccttccaggatgtgctgtatgtggaccccagcttctgccgggccaaggagatccacctgcggctgggcctgatgttcaaggtgaacacagactacaagagcagcctgaagcacttccagctggccctgattgactgcaacccctgcaccctgagcaatgctgagatccagttccacatcgcccacctgtatgagacccagaggaagtaccacagcgccaaggaggcctatgagcagctgctgcagacagagaacctgcctgcccaggtgaaggccaccgtgctgcagcagctgggctggatgcaccacaacatggacctggtgggggacaaggccaccaaggagagctatgccatccagtacctgcagaagagcctggaggccgaccccaacagcggccagagctggtacttcctgggccgctgctacagcagcatcggcaaggtgcaggatgccttcatctcctaccggcagagcattgacaagtctgaggccagcgctgacacctggtgcagcattggagtgctgtaccagcagcagaaccagcccatggatgccctgcaggcctacatctgtgctgtgcagctggaccacggccatgctgctgcctggatggacctgggcaccctgtatgagagctgcaaccagccccaggatgccatcaagtgctacctgaatgctgcccggagcaagcgctgcagcaacaccagcaccctggccgcccgcatcaagttcctgcagaatggaagtgacaactggaatggaggccagagcctgagccaccaccctgtgcagcaggtgtacagcctgtgcctgaccccccagaagctgcagcacctggagcagctgcgggccaacagagacaacctgaacccagcccagaagcaccagctggagcagctggagagccagtttgtgctgatgcagcagatgaggcacaaggaggtggcccaggtgaggaccaccggcatccacaacggggccatcacagacagcagcctgcccaccaacagcgtgagcaaccggcagccccatggagccctgaccagggtgtcctctgtgtcccagcccggggtgcggcctgcctgtgtggagaagctgctgagcagcggggccttctctgctggctgcatcccctgtggcaccagcaagatcctgggcagcacagacaccatcctgctgggcagcaactgcatcgccggcagcgagagcaatggaaatgtgccctacctgcagcagaacacccacaccctgccccacaaccacacagacctgaacagcagcacagaggagccctggaggaagcagctgagcaacagcgcccagggcctgcacaagagccagagcagctgcctgagcggccccaatgaggagcagcccctcttcagcacaggcagcgcccagtaccaccaggccaccagcacaggcatcaagaaggccaatgagcacctgaccctgcccagcaacagcgtgccccagggagatgctgacagccacctgagctgccacacagccaccagcggcggccagcagggcatcatgttcaccaaggagagcaagcccagcaagaacagaagcctggtgcctgagaccagccgccacactggagacaccagcaatggctgtgctgatgtgaagggcctgagcaaccacgtgcaccagctgattgctgatgctgtgagcagccccaaccacggggacagccccaacctgctgattgctgacaacccccagctgagcgccctgctgattggcaaggccaatggaaatgtgggcaccggcacctgtgacaaggtgaacaacatccaccctgctgtgcacaccaagacagaccacagcgtggccagcagccccagcagcgccatcagcacagccacccccagccccaagagcacagagcagaggagcatcaacagcgtgaccagcctgaacagcccccacagcggcctgcacacagtgaatggagagggcctgggcaagagccagagcagcaccaaggtggacctgcccctggccagccacaggagcaccagccagatcctgcccagcatgtctgtgtccatctgccccagcagcacagaggtgctgaaggcctgcaggaaccctgggaagaatggcctgagcaacagctgcatcctgctggacaagtgccccccaccccggccccccaccagcccctacccacccctgcccaaggacaagctgaacccccccacccccagcatctacctggagaacaagagagatgccttcttcccccccctgcaccagttctgcaccaaccccaagaaccctgtgaccgtcatccggggcctggccggggccctgaagctggacctgggcctcttcagcaccaagaccctggtggaggccaacaatgagcacatggtggaggtgaggacccagctgctgcagcctgcagatgagaactgggaccccaccggcaccaagaagatctggaggtgtgagagcaacagaagccacaccaccatcgccaagtatgcccagtaccaggccagcagcttccaggagagcctgcgggccggcatgcagtggtgtgacctgagcagcctgcagcccccacctcctggcttcaagcgcttcagccacctgagcctgcccaacagctggaactaccgccacctgcccagctgccccaccaacttctgcatctttgtggagaccggcttccaccacgtgggccaggcctgcctggagctgctgaccagcggcggcctgctggccagcgccagccagagcgctggcatcaccggggtgagccaccacgccaggtag

SEQ ID NO: 175306 - DNA, 4044 bp, synthetic construct
  misc_feature 1..4044: note = Description of Artificial Sequence: Synthetic coding sequence
  source 1..4044: mol_type = other DNA
atgaagagctgtgctgtgtccctgaccacagctgctgtggcctttggagatgaggccaagaagatggccgagggcaaggccagccgggagagcgaggaggagagcgtgtccctgactgtggaggagcgggaggccctgggcggcatggacagccggctgtttggatttgtgcggctgcatgaagatggagcccggaccaagaccctgctgggcaaggctgtgcgctgctatgagagcctcatcctgaaggccgagggcaaggtggagagtgacttcttctgccagctgggccacttcaacctgctgctggaggactacagcaaggccctgagcgcctaccagcgctactacagcctgcaggccgactactggaagaatgctgccttcctgtatggcctgggcctggtgtacttctactacaatgccttccactgggccatcaaggccttccaggatgtgctgtatgtggaccccagcttctgccgggccaaggagatccacctgcggctgggcctgatgttcaaggtgaacacagactacaagagcagcctgaagcacttccagctggccctgattgactgcaacccctgcaccctgagcaatgctgagatccagttccacatcgcccacctgtatgagacccagaggaagtaccacagcgccaaggaggcctatgagcagctgctgcagacagagaacctgcctgcccaggtgaaggccaccgtgctgcagcagctgggctggatgcaccacaacatggacctggtgggggacaaggccaccaaggagagctatgccatccagtacctgcagaagagcctggaggccgaccccaacagcggccagagctggtacttcctgggccgctgctacagcagcatcggcaaggtgcaggatgccttcatctcctaccggcagagcattgacaagtctgaggccagcgctgacacctggtgcagcattggagtgctgtaccagcagcagaaccagcccatggatgccctgcaggcctacatctgtgctgtgcagctggaccacggccatgctgctgcctggatggacctgggcaccctgtatgagagctgcaaccagccccaggatgccatcaagtgctacctgaatgctgcccggagcaagcgctgcagcaacaccagcaccctggccgcccgcatcaagttcctgcagaatggaagtgacaactggaatggaggccagagcctgagccaccaccctgtgcagcaggtgtacagcctgtgcctgaccccccagaagctgcagcacctggagcagctgcgggccaacagagacaacctgaacccagcccagaagcaccagctggagcagctggagagccagtttgtgctgatgcagcagatgaggcacaaggaggtggcccaggtgaggaccaccggcatccacaacggggccatcacagacagcagcctgcccaccaacagcgtgagcaaccggcagccccatggagccctgaccagggtgtcctctgtgtcccagcccggggtgcggcctgcctgtgtggagaagctgctgagcagcggggccttctctgctggctgcatcccctgtggcaccagcaagatcctgggcagcacagacaccatcctgctgggcagcaactgcatcgccggcagcgagagcaatggaaatgtgccctacctgcagcagaacacccacaccctgccccacaaccacacagacctgaacagcagcacagaggagccctggaggaagcagctgagcaacagcgcccagggcctgcacaagagccagagcagctgcctgagcggccccaatgaggagcagcccctcttcagcacaggcagcgcccagtaccaccaggccaccagcacaggcatcaagaaggccaatgagcacctgaccctgcccagcaacagcgtgccccagggagatgctgacagccacctgagctgccacacagccaccagcggcggccagcagggcatcatgttcaccaaggagagcaagcccagcaagaacagaagcctggtgcctgagaccagccgccacactggagacaccagcaatggctgtgctgatgtgaagggcctgagcaaccacgtgcaccagctgattgctgatgctgtgagcagccccaaccacggggacagccccaacctgctgattgctgacaacccccagctgagcgccctgctgattggcaaggccaatggaaatgtgggcaccggcacctgtgacaaggtgaacaacatccaccctgctgtgcacaccaagacagaccacagcgtggccagcagccccagcagcgccatcagcacagccacccccagccccaagagcacagagcagaggagcatcaacagcgtgaccagcctgaacagcccccacagcggcctgcacacagtgaatggagagggcctgggcaagagccagagcagcaccaaggtggacctgcccctggccagccacaggagcaccagccagatcctgcccagcatgtctgtgtccatctgccccagcagcacagaggtgctgaaggcctgcaggaaccctgggaagaatggcctgagcaacagctgcatcctgctggacaagtgccccccaccccggccccccaccagcccctacccacccctgcccaaggacaagctgaacccccccacccccagcatctacctggagaacaagagagatgccttcttcccccccctgcaccagttctgcaccaaccccaagaaccctgtgaccgtcatccggggcctggccggggccctgaagctggacctgggcctcttcagcaccaagaccctggtggaggccaacaatgagcacatggtggaggtgaggacccagctgctgcagcctgcagatgagaactgggaccccaccggcaccaagaagatctggaggtgtgagagcaacagaagccacaccaccatcgccaagtatgcccagtaccaggccagcagcttccaggagagcctgcgggaggagaatgagaagaggacccagcacaaggaccacagcgacaatgaaagcaccagcagcgagaacagcggcagaagaaggaagggccccttcaagaccatcaagtttggcaccaacatcgacctgagtgacaacaagaagtggaagctgcagctgcacgagctgaccaagctgcctgcctttgcccgggtggtgtctgctggcaacctgctgacccacgtgggccacaccatcctgggcatgaacacagtgcagctgtacatgaaggtgcccggcagcaggaccccaggccaccaggagaacaacaacttctgcagcgtgaacatcaacatcggccctggggactgtgagtggtttgtggtgcctgaggactactggggcgtgctgaatgacttctgtgagaagaacaacctgaacttcctgatgagctcctggtggcccaacctggaggacctgtatgaggccaacgtgcctgtgtaccgcttcatccagaggcctggggacctggtgtggatcaatgccggcaccgtgcactgggtgcaggccgtgggctggtgcaacaacatcgcctggaatgtgggccccctgacagcctgccagtacaagctggccgtggagagatatgagtggaacaagctgaagtctgtgaagagccctgtgcccatggtgcacctgtcctggaacatggccaggaacatcaaggtgtctgaccccaagctgtttgagatgatcaagtactgcctgctgaagatcctgaagcagtaccagaccctgcgggaggccctggtggccgccggcaaggaggtgatctggcacggccgcaccaatgatgagcccgcccactactgcagcatctgtgaggtggaggtgttcaacctgctgtttgtgaccaatgaaagcaacacccagaagacctacatcgtgcactgccacgactgtgccaggaagaccagcaagagcctggagaactttgtggtgctggagcagtacaagatggaggacctgatccaggtgtatgaccagttcaccctggccctgagcctgagcagcagcagctag

SEQ ID NO: 175307 - DNA, 3723 bp, synthetic construct
  misc_feature 1..3723: note = Description of Artificial Sequence: Synthetic coding sequence
  source 1..3723: mol_type = other DNA
atgaagagctgtgctgtgtccctgaccacagctgctgtggcctttggagatgaggccaagaagatggccgagggcaaggccagccgggagagcgaggaggagagcgtgtccctgactgtggaggagcgggaggccctgggcggcatggacagccggctgtttggatttgtgcggctgcatgaagatggagcccggaccaagaccctgctgggcaaggctgtgcgctgctatgagagcctcatcctgaaggccgagggcaaggtggagagtgacttcttctgccagctgggccacttcaacctgctgctggaggactacagcaaggccctgagcgcctaccagcgctactacagcctgcaggccgactactggaagaatgctgccttcctgtatggcctgggcctggtgtacttctactacaatgccttccactgggccatcaaggccttccaggatgtgctgtatgtggaccccagcttctgccgggccaaggagatccacctgcggctgggcctgatgttcaaggtgaacacagactacaagagcagcctgaagcacttccagctggccctgattgactgcaacccctgcaccctgagcaatgctgagatccagttccacatcgcccacctgtatgagacccagaggaagtaccacagcgccaaggaggcctatgagcagctgctgcagacagagaacctgcctgcccaggtgaaggccaccgtgctgcagcagctgggctggatgcaccacaacatggacctggtgggggacaaggccaccaaggagagctatgccatccagtacctgcagaagagcctggaggccgaccccaacagcggccagagctggtacttcctgggccgctgctacagcagcatcggcaaggtgcaggatgccttcatctcctaccggcagagcattgacaagtctgaggccagcgctgacacctggtgcagcattggagtgctgtaccagcagcagaaccagcccatggatgccctgcaggcctacatctgtgctgtgcagctggaccacggccatgctgctgcctggatggacctgggcaccctgtatgagagctgcaaccagccccaggatgccatcaagtgctacctgaatgctgcccggagcaagcgctgcagcaacaccagcaccctggccgcccgcatcaagttcctgcagaatggaagtgacaactggaatggaggccagagcctgagccaccaccctgtgcagcaggtgtacagcctgtgcctgaccccccagaagctgcagcacctggagcagctgcgggccaacagagacaacctgaacccagcccagaagcaccagctggagcagctggagagccagtttgtgctgatgcagcagatgaggcacaaggaggtggcccaggtgaggaccaccggcatccacaacggggccatcacagacagcagcctgcccaccaacagcgtgagcaaccggcagccccatggagccctgaccagggtgtcctctgtgtcccagcccggggtgcggcctgcctgtgtggagaagctgctgagcagcggggccttctctgctggctgcatcccctgtggcaccagcaagatcctgggcagcacagacaccatcctgctgggcagcaactgcatcgccggcagcgagagcaatggaaatgtgccctacctgcagcagaacacccacaccctgccccacaaccacacagacctgaacagcagcacagaggagccctggaggaagcagctgagcaacagcgcccagggcctgcacaagagccagagcagctgcctgagcggccccaatgaggagcagcccctcttcagcacaggcagcgcccagtaccaccaggccaccagcacaggcatcaagaaggccaatgagcacctgaccctgcccagcaacagcgtgccccagggagatgctgacagccacctgagctgccacacagccaccagcggcggccagcagggcatcatgttcaccaaggagagcaagcccagcaagaacagaagcctggtgcctgagaccagccgccacactggagacaccagcaatggctgtgctgatgtgaagggcctgagcaaccacgtgcaccagctgattgctgatgctgtgagcagccccaaccacggggacagccccaacctgctgattgctgacaacccccagctgagcgccctgctgattggcaaggccaatggaaatgtgggcaccggcacctgtgacaaggtgaacaacatccaccctgctgtgcacaccaagacagaccacagcgtggccagcagccccagcagcgccatcagcacagccacccccagccccaagagcacagagcagaggagcatcaacagcgtgaccagcctgaacagcccccacagcggcctgcacacagtgaatggagagggcctgggcaagagccagagcagcaccaaggtggacctgcccctggccagccacaggagcaccagccagatcctgcccagcatgtctgtgtccatctgccccagcagcacagaggtgctgaaggcctgcaggaaccctgggaagaatggcctgagcaacagctgcatcctgctggacaagtgccccccaccccggccccccaccagcccctacccacccctgcccaaggacaagctgaacccccccacccccagcatctacctggagaacaagagagatgccttcttcccccccctgcaccagttctgcaccaaccccaagaaccctgtgaccgtcatccggggcctggccggggccctgaagctggacctgggcctcttcagcaccaagaccctggtggaggccaacaatgagcacatggtggaggtgaggacccagctgctgcagcctgcagatgagaactgggaccccaccggcaccaagaagatctggaggtgtgagagcaacagaagccacaccaccatcgccaagtatgcccagtaccaggccagcagcttccaggagagcctgcgggaggagaatgagaagaggacccagcacaaggaccacagcgacaatgaaagcaccagcagcgagaacagcggcagaagaaggaagggccccttcaagaccatcaagtttggcaccaacatcgacctgagtgacaacaagaagtggaagctgcagctgcacgagctgaccaagctgcctgcctttgcccgggtggtgtctgctggcaacctgctgacccacgtgggccacaccatcctgggcatgaacacagtgcagctgtacatgaaggtgcccggcagcaggaccccaggccaccaggagaacaacaacttctgcagcgtgaacatcaacatcggccctggggactgtgagtggtttgtggtgcctgaggactactggggcgtgctgaatgacttctgtgagaagaacaacctgaacttcctgatgagctcctggtggcccaacctggaggacctgtatgaggccaacgtgcctgtgtaccgcttcatccagaggcctggggacctggtgtggatcaatgccggcaccgtgcactgggtgcaggccgtgggctggtgcaacaacatcgcctggaatgtgggccccctgacagcctgccagtacaagctggccgtggagagatatgagtggaacaagctgaagtctgtgaagagccctgtgcccatggtgcacctgtcctggaacatggccaggaacatcaaggtgtctgaccccaagctgtttgagatgatcaagtag

SEQ ID NO: 175308 - DNA, 624 bp, synthetic construct
  misc_feature 1..624: note = Description of Artificial Sequence: Synthetic coding sequence
  source 1..624: mol_type = other DNA
atgaagagctgtgctgtgtccctgaccacagctgctgtggcctttggagatgaggccaagaagatggccgagggcaaggccagccgggagagcgaggaggagagcgtgtccctgactgtggaggagcgggaggccctgggcggcatggacagccggctgtttggatttgtgcggctgcatgaagatggagcccggaccaagaccctgctgggcaaggctgtgcgctgctatgagagcctcatcctgaaggccgagggcaaggtggagagtgacttcttctgccagctgggccacttcaacctgctgctggaggactacagcaaggccctgagcgcctaccagcgctactacagcctgcaggccgactactggaagaatgctgccttcctgtatggcctgggcctggtgtacttctactacaatgccttccactgggccatcaaggccttccaggatgtgctgtatgtggaccccagcttctgccgggccaaggagatccacctgcggctgggcctgatgttcaaggtgaacacagactacaagagcagcctgaagcacttccagctggccctgattgactgcaacccctgcaccctgagcaatgctgagagcaagtacttctag

SEQ ID NO: 175309 - DNA, 4179 bp, synthetic construct
  misc_feature 1..4179: note = Description of Artificial Sequence: Synthetic coding sequence
  source 1..4179: mol_type = other DNA
atgaagagctgtgctgtgtccctgaccacagctgctgtggcctttggagatgaggccaagaagatggccgagggcaaggccagccgggagagcgaggaggagagcgtgtccctgactgtggaggagcgggaggccctgggcggcatggacagccggctgtttggatttgtgcggctgcatgaagatggagcccggaccaagaccctgctgggcaaggctgtgcgctgctatgagagcctcatcctgaaggccgagggcaaggtggagagtgacttcttctgccagctgggccacttcaacctgctgctggaggactacagcaaggccctgagcgcctaccagcgctactacagcctgcaggccgactactggaagaatgctgccttcctgtatggcctgggcctggtgtacttctactacaatgccttccactgggccatcaaggccttccaggatgtgctgtatgtggaccccagcttctgccgggccaaggagatccacctgcggctgggcctgatgttcaaggtgaacacagactacaagagcagcctgaagcacttccagctggccctgattgactgcaacccctgcaccctgagcaatgctgagatccagttccacatcgcccacctgtatgagacccagaggaagtaccacagcgccaaggaggcctatgagcagctgctgcagacagagaacctgcctgcccaggtgaaggccaccgtgctgcagcagctgggctggatgcaccacaacatggacctggtgggggacaaggccaccaaggagagctatgccatccagtacctgcagaagagcctggaggccgaccccaacagcggccagagctggtacttcctgggccgctgctacagcagcatcggcaaggtgcaggatgccttcatctcctaccggcagagcattgacaagtctgaggccagcgctgacacctggtgcagcattggagtgctgtaccagcagcagaaccagcccatggatgccctgcaggcctacatctgtgctgtgcagctggaccacggccatgctgctgcctggatggacctgggcaccctgtatgagagctgcaaccagccccaggatgccatcaagtgctacctgaatgctgcccggagcaagcgctgcagcaacaccagcaccctggccgcccgcatcaagttcctgcaggcccagctgtgcaacctgccccagagcagcctgcagaacaagaccaagctgctgcccagcattgaggaggcctggagcctgcccatcccagctgagctgaccagccggcagggcgccatgaacacagcccagcagaatggaagtgacaactggaatggaggccagagcctgagccaccaccctgtgcagcaggtgtacagcctgtgcctgaccccccagaagctgcagcacctggagcagctgcgggccaacagagacaacctgaacccagcccagaagcaccagctggagcagctggagagccagtttgtgctgatgcagcagatgaggcacaaggaggtggcccaggtgaggaccaccggcatccacaatggagccatcacagacagcagcctgcccaccaacagcgtgagcaaccggcagccccacggggccctgaccagggtgtcctctgtgtcccagcccggggtgcggcctgcctgtgtggagaagctgctgagcagcggggccttctctgctggctgcatcccctgtggcaccagcaagatcctgggcagcacagacaccatcctgctgggcagcaactgcatcgccggcagcgagagcaatggaaatgtgccctacctgcagcagaacacccacaccctgccccacaaccacacagacctgaacagcagcacagaggagccctggaggaagcagctgagcaacagcgcccagggcctgcacaagagccagagcagctgcctgagcggccccaatgaggagcagcccctcttcagcactggaagtgcccagtaccaccaggccaccagcacaggcatcaagaaggccaatgagcacctgaccctgcccagcaacagcgtgccccagggagatgctgacagccacctgagctgccacacagccaccagcggcggccagcagggcatcatgttcaccaaggagagcaagcccagcaagaacagaagcctggtgcctgagaccagccgccacactggagacaccagcaatggctgtgctgatgtgaagggcctgagcaaccacgtgcaccagctgattgctgatgctgtgagcagccccaaccacggggacagccccaacctgctgattgctgacaacccccagctgagcgccctgctgattggcaaggccaatggaaatgtgggcaccggcacctgtgacaaggtgaacaacatccaccctgctgtgcacaccaagacagaccacagcgtggccagcagccccagcagcgccatcagcacagccacccccagccccaagagcacagagcagaggagcatcaacagcgtgaccagcctgaacagcccccacagcggcctgcacacagtgaatggagagggcctgggcaagagccagagcagcaccaaggtggacctgcccctggccagccacaggagcaccagccagatcctgcccagcatgtctgtgtccatctgccccagcagcacagaggtgctgaaggcctgcagaaatcctgggaagaatggcctgagcaacagctgcatcctgctggacaagtgccccccacccaggcctcccaccagcccctacccacccctgcccaaggacaagctgaacccccccacccccagcatctacctggagaacaagagagatgccttcttcccccccctgcaccagttctgcaccaaccccaagaaccctgtgaccgtcatccggggcctggccggggccctgaagctggacctgggcctcttcagcaccaagaccctggtggaggccaacaatgagcacatggtggaggtgaggacccagctgctgcagcctgcagatgagaactgggaccccaccggcaccaagaagatctggaggtgtgagagcaacagaagccacaccaccatcgccaagtatgcccagtaccaggccagcagcttccaggagagcctgcgggaggagaatgagaagaggacccagcacaaggaccacagcgacaatgaaagcaccagcagtgaaaattctggaagaagaaggaagggccccttcaagaccatcaagtttggcaccaacatcgacctgagtgacaacaagaagtggaagctgcagctgcacgagctgaccaagctgcctgcctttgcccgggtggtgtctgctggcaacctgctgacccacgtgggccacaccatcctgggcatgaacacagtgcagctgtacatgaaggtgcccggcagcaggaccccaggccaccaggagaacaacaacttctgcagcgtgaacatcaacatcggccctggggactgtgagtggtttgtggtgcctgaggactactggggcgtgctgaatgacttctgtgagaagaacaacctgaacttcctgatgagctcctggtggcccaacctggaggacctgtatgaggccaacgtgcctgtgtaccgcttcatccagaggcctggggacctggtgtggatcaatgccggcaccgtgcactgggtgcaggccgtgggctggtgcaacaacatcgcctggaatgtgggccccctgacagcctgccagtacaagctggccgtggagagatatgagtggaacaagctgaagtctgtgaagagccctgtgcccatggtgcacctgtcctggaacatggccaggaacatcaaggtgtctgaccccaagctgtttgagatgatcaagtactgcctgctgaagatcctgaagcagtaccagaccctgcgggaggccctggtggccgccggcaaggaggtgatctggcacggccgcaccaatgatgagcccgcccactactgcagcatctgtgaggtggaggtgttcaacctgctgtttgtgaccaatgaaagcaacacccagaagacctacatcgtgcactgccacgactgtgccaggaagaccagcaagagcctggagaactttgtggtgctggagcagtacaagatggaggacctgatccaggtgtatgaccagttcaccctggccctgagcctgagcagcagcagctag

SEQ ID NO: 175310 - DNA, 3636 bp, synthetic construct
  misc_feature 1..3636: note = Description of Artificial Sequence: Synthetic coding sequence
  source 1..3636: mol_type = other DNA
atgaagagctgtgctgtgtccctgaccacagctgctgtggcctttggagatgaggccaagaagatggccgagggcaaggccagccgggagagcgaggaggagagcgtgtccctgactgtggaggagcgggaggccctgggcggcatggacagccggctgtttggatttgtgcggctgcatgaagatggagcccggaccaagaccctgctgggcaaggctgtgcgctgctatgagagcctcatcctgaaggccgagggcaaggtggagagtgacttcttctgccagctgggccacttcaacctgctgctggaggactacagcaaggccctgagcgcctaccagcgctactacagcctgcaggccgactactggaagaatgctgccttcctgtatggcctgggcctggtgtacttctactacaatgccttccactgggccatcaaggccttccaggatgtgctgtatgtggaccccagcttctgccgggccaaggagatccacctgcggctgggcctgatgttcaaggtgaacacagactacaagagcagcctgaagcacttccagctggccctgattgactgcaacccctgcaccctgagcaatgctgagatccagttccacatcgcccacctgtatgagacccagaggaagtaccacagcgccaaggaggcctatgagcagctgctgcagacagagaacctgcctgcccaggtgaaggccaccgtgctgcagcagctgggctggatgcaccacaacatggacctggtgggggacaaggccaccaaggagagctatgccatccagtacctgcagaagagcctggaggccgaccccaacagcggccagagctggtacttcctgggccgctgctacagcagcatcggcaaggtgcaggatgccttcatctcctaccggcagagcattgacaagtctgaggccagcgctgacacctggtgcagcattggagtgctgtaccagcagcagaaccagcccatggatgccctgcaggcctacatctgtgctgtgcagctggaccacggccatgctgctgcctggatggacctgggcaccctgtatgagagctgcaaccagccccaggatgccatcaagtgctacctgaatgctgcccggagcaagcgctgcagcaacaccagcaccctggccgcccgcatcaagttcctgcaggcccagctgtgcaacctgccccagagcagcctgcagaacaagaccaagctgctgcccagcattgaggaggcctggagcctgcccatcccagctgagctgaccagccggcagggcgccatgaacacagcccagcagaatggaagtgacaactggaatggaggccagagcctgagccaccaccctgtgcagcaggtgtacagcctgtgcctgaccccccagaagctgcagcacctggagcagctgcgggccaacagagacaacctgaacccagcccagaagcaccagctggagcagctggagagccagtttgtgctgatgcagcagatgaggcacaaggaggtggcccagggcctgcacaagagccagagcagctgcctgagcggccccaatgaggagcagcccctcttcagcactggaagtgcccagtaccaccaggccaccagcacaggcatcaagaaggccaatgagcacctgaccctgcccagcaacagcgtgccccagggagatgctgacagccacctgagctgccacacagccaccagcggcggccagcagggcatcatgttcaccaaggagagcaagcccagcaagaacagaagcctggtgcctgagaccagccgccacactggagacaccagcaatggctgtgctgatgtgaagggcctgagcaaccacgtgcaccagctgattgctgatgctgtgagcagccccaaccacggggacagccccaacctgctgattgctgacaacccccagctgagcgccctgctgattggcaaggccaatggaaatgtgggcaccggcacctgtgacaaggtgaacaacatccaccctgctgtgcacaccaagacagaccacagcgtggccagcagccccagcagcgccatcagcacagccacccccagccccaagagcacagagcagaggagcatcaacagcgtgaccagcctgaacagcccccacagcggcctgcacacagtgaatggagagggcctgggcaagagccagagcagcaccaaggtggacctgcccctggccagccacaggagcaccagccagatcctgcccagcatgtctgtgtccatctgccccagcagcacagaggtgctgaaggcctgcagaaatcctgggaagaatggcctgagcaacagctgcatcctgctggacaagtgccccccacccaggcctcccaccagcccctacccacccctgcccaaggacaagctgaacccccccacccccagcatctacctggagaacaagagagatgccttcttcccccccctgcaccagttctgcaccaaccccaagaaccctgtgaccgtcatccggggcctggccggggccctgaagctggacctgggcctcttcagcaccaagaccctggtggaggccaacaatgagcacatggtggaggtgaggacccagctgctgcagcctgcagatgagaactgggaccccaccggcaccaagaagatctggaggtgtgagagcaacagaagccacaccaccatcgccaagtatgcccagtaccaggccagcagcttccaggagagcctgcgggaggagaatgagaagaggacccagcacaaggaccacagcgacaatgaaagcaccagcagtgaaaattctggaagaagaaggaagggccccttcaagaccatcaagtttggcaccaacatcgacctgagtgacaacaagaagtggaagctgcagctgcacgagctgaccaagctgcctgcctttgcccgggtggtgtctgctggcaacctgctgacccacgtgggccacaccatcctgggcatgaacacagtgcagctgtacatgaaggtgcccggcagcaggaccccaggccaccaggagaacaacaacttctgcagcgtgaacatcaacatcggccctggggactgtgagtggtttgtggtgcctgaggactactggggcgtgctgaatgacttctgtgagaagaacaacctgaacttcctgatgagctcctggtggcccaacctggaggacctgtatgaggccaacgtgcctgtgtaccgcttcatccagaggcctggggacctggtgtggatcaatgccggcaccgtgcactgggtgcaggccgtgggctggtgcaacaacatcgcctggaatgtgggccccctgacagcctgccagtacaagctggccgtggagagatatgagtggaacaagctgaagtctgtgaagagccctgtgcccatggtgcacctgtcctggaacatggccaggaacatcaaggtgtctgaccccaagctgtttgagatgatcaagtactgcctgctgaagatcctgaagcagtaccagaccctgcgggaggccctggtggccgccggcaaggaggtgatctggcacggccgcaccaatgatgagcccgcccactactgcagcatctgtgaggccctgagcctgagcagcagcagctag

SEQ ID NO: 175311 - DNA, 3141 bp, synthetic construct
  misc_feature 1..3141: note = Description of Artificial Sequence: Synthetic coding sequence
  source 1..3141: mol_type = other DNA
atgaagagctgtgctgtgtccctgaccacagctgctgtggcctttggagatgaggccaagaagatggccgagggcaaggccagccgggagagcgaggaggagagcgtgtccctgactgtggaggagcgggaggccctgggcggcatggacagccggctgtttggatttgtgcggctgcatgaagatggagcccggaccaagaccctgctgggcaaggctgtgcgctgctatgagagcctcatcctgaaggccgagggcaaggtggagagtgacttcttctgccagctgggccacttcaacctgctgctggaggactacagcaaggccctgagcgcctaccagcgctactacagcctgcaggccgactactggaagaatgctgccttcctgtatggcctgggcctggtgtacttctactacaatgccttccactgggccatcaaggccttccaggatgtgctgtatgtggaccccagcttctgccgggccaaggagatccacctgcggctgggcctgatgttcaaggtgaacacagactacaagagcagcctgaagcacttccagctggccctgattgactgcaacccctgcaccctgagcaatgctgagatccagttccacatcgcccacctgtatgagacccagaggaagtaccacagcgccaaggaggcctatgagcagctgctgcagacagagaacctgcctgcccaggtgaaggccaccgtgctgcagcagctgggctggatgcaccacaacatggacctggtgggggacaaggccaccaaggagagctatgccatccagtacctgcagaagagcctggaggccgaccccaacagcggccagagctggtacttcctgggctctgtgctgtaccagcagcagaaccagcccatggatgccctgcaggcctacatctgtgctgtgcagctggaccacggccacgccgccgcctggatggacctgggcaccctgtatgagagctgcaaccagccccaggatgccatcaagtgctacctgaatgctgcccggagcaagcgctgcagcaacaccagcaccctggccgcccgcatcaagttcctgcagaatggaagtgacaactggaatggaggccagagcctgagccaccaccctgtgcagcaggtgtacagcctgtgcctgaccccccagaagctgcagcacctggagcagctgcgggccaacagagacaacctgaacccagcccagaagcaccagctggagcagctggagagccagtttgtgctgatgcagcagatgaggcacaaggaggtggcccaggtgaggaccaccggcatccacaatggagccatcacagacagcagcctgcccaccaacagcgtgagcaaccggcagccccacggggccctgaccagggtgtcctctgtgtcccagcccggggtgcggcctgcctgtgtggagaagctgctgagcagcggggccttctctgctggctgcatcccctgtggcaccagcaagatcctgggcagcacagacaccatcctgctgggcagcaactgcatcgccggcagcgagagcaatggaaatgtgccctacctgcagcagaacacccacaccctgccccacaaccacacagacctgaacagcagcacagaggagccctggaggaagcagctgagcaacagcgcccagggcctgcacaagagccagagcagctgcctgagcggccccaatgaggagcagcccctcttcagcactggaagtgcccagtaccaccaggccaccagcacaggcatcaagaaggccaatgagcacctgaccctgcccagcaacagcgtgccccagggagatgctgacagccacctgagctgccacacagccaccagcggcggccagcagggcatcatgttcaccaaggagagcaagcccagcaagaacagaagcctggtgcctgagaccagccgccacactggagacaccagcaatggctgtgctgatgtgaagggcctgagcaaccacgtgcaccagctgattgctgatgctgtgagcagccccaaccacggggacagccccaacctgctgattgctgacaacccccagctgagcgccctgctgattggcaaggccaatggaaatgtgggcaccggcacctgtgacaaggtgaacaacatccaccctgctgtgcacaccaagacagaccacagcgtggccagcagccccagcagcgccatcagcacagccacccccagccccaagagcacagagcagaggagcatcaacagcgtgaccagcctgaacagcccccacagcggcctgcacacagtgaatggagagggcctgggcaagagccagagcagcaccaaggtggacctgcccctggccagccacaggagcaccagccagatcctgcccagcatgtctgtgtccatctgccccagcagcacagaggtgctgaaggcctgcagaaatcctgggaagaatggcctgagcaacagctgcatcctgctggacaagtgccccccacccaggcctcccaccagcccctacccacccctgcccaaggacaagctgaacccccccacccccagcatctacctggagaacaagagagatgccttcttcccccccctgcaccagttctgcaccaaccccaagaaccctgtgaccgtcatccggggcctggccggggccctgaagctggacctgggcctcttcagcaccaagaccctggtggaggccaacaatgagcacatggtggaggtgaggacccagctgctgcagcctgcagatgagaactgggaccccaccggcaccaagaagatctggaggtgtgagagcaacagaagccacaccaccatcgccaagtatgcccagtaccaggccagcagcttccaggagagcctgcgggccggcatgcagtggtgtgacctgagcagcctgcagcccccacctcctggcttcaagcgcttcagccacctgagcctgcccaacagctggaactaccgccacctgcccagctgccccaccaacttctgcatctttgtggagaccggcttccaccacgtgggccaggcctgcctggagctgctgaccagcggcggcctgctggccagcgccagccagagcgctggcatcactggagtgagccaccacgccaggtag

SEQ ID NO: 175312 - DNA, 3018 bp, synthetic construct
  misc_feature 1..3018: note = Description of Artificial Sequence: Synthetic coding sequence
  source 1..3018: mol_type = other DNA
atgaagagctgtgctgtgtccctgaccacagctgctgtggcctttggagatgaggccaagaagatggccgagggcaaggccagccgggagagcgaggaggagagcgtgtccctgactgtggaggagcgggaggccctgggcggcatggacagccggctgtttggatttgtgcggctgcatgaagatggagcccggaccaagaccctgctgggcaaggctgtgcgctgctatgagagcctcatcctgaaggccgagggcaaggtggagagtgacttcttctgccagctgggccacttcaacctgctgctggaggactacagcaaggccctgagcgcctaccagcgctactacagcctgcaggccgactactggaagaatgctgccttcctgtatggcctgggcctggtgtacttctactacaatgccttccactgggccatcaaggccttccaggatgtgctgtatgtggaccccagcttctgccgggccaaggagatccacctgcggctgggcctgatgttcaaggtgaacacagactacaagagcagcctgaagcacttccagctggccctgattgactgcaacccctgcaccctgagcaatgctgagatccagttccacatcgcccacctgtatgagacccagaggaagtaccacagcgccaaggaggcctatgagcagctgctgcagacagagaacctgcctgcccaggtgaaggccaccgtgctgcagcagctgggctggatgcaccacaacatggacctggtgggggacaaggccaccaaggagagctatgccatccagtacctgcagaagagcctggaggccgaccccaacagcggccagagctggtacttcctgggctctgtgctgtaccagcagcagaaccagcccatggatgccctgcaggcctacatctgtgctgtgcagctggaccacggccacgccgccgcctggatggacctgggcaccctgtatgagagctgcaaccagccccaggatgccatcaagtgctacctgaatgctgcccggagcaagcgctgcagcaacaccagcaccctggccgcccgcatcaagttcctgcagcagagcctgagcctgcacatgatcaccagcagccaggtggagggcctgagcagccctgccaagaagaagaggaccagcagccccaccaagaatggaagtgacaactggaatggaggccagagcctgagccaccaccctgtgcagcaggtgtacagcctgtgcctgaccccccagaagctgcagcacctggagcagctgcgggccaacagagacaacctgaacccagcccagaagcaccagctggagcagctggagagccagtttgtgctgatgcagcagatgaggcacaaggaggtggcccaggtgaggaccaccggcatccacaatggagccatcacagacagcagcctgcccaccaacagcgtgagcaaccggcagccccacggggccctgaccagggtgtcctctgtgtcccagcccggggtgcggcctgcctgtgtggagaagctgctgagcagcggggccttctctgctggctgcatcccctgtggcaccagcaagatcctgggcagcacagacaccatcctgctgggcagcaactgcatcgccggcagcgagagcaatggaaatgtgccctacctgcagcagaacacccacaccctgccccacaaccacacagacctgaacagcagcacagaggagccctggaggaagcagctgagcaacagcgcccagggcctgcacaagagccagagcagctgcctgagcggccccaatgaggagcagcccctcttcagcactggaagtgcccagtaccaccaggccaccagcacaggcatcaagaaggccaatgagcacctgaccctgcccagcaacagcgtgccccagggagatgctgacagccacctgagctgccacacagccaccagcggcggccagcagggcatcatgttcaccaaggagagcaagcccagcaagaacagaagcctggtgcctgagaccagccgccacactggagacaccagcaatggctgtgctgatgtgaagggcctgagcaaccacgtgcaccagctgattgctgatgctgtgagcagccccaaccacggggacagccccaacctgctgattgctgacaacccccagctgagcgccctgctgattggcaaggccaatggaaatgtgggcaccggcacctgtgacaaggtgaacaacatccaccctgctgtgcacaccaagacagaccacagcgtggccagcagccccagcagcgccatcagcacagccacccccagccccaagagcacagagcagaggagcatcaacagcgtgaccagcctgaacagcccccacagcggcctgcacacagtgaatggagagggcctgggcaagagccagagcagcaccaaggtggacctgcccctggccagccacaggagcaccagccagatcctgcccagcatgtctgtgtccatctgccccagcagcacagaggtgctgaaggcctgcagaaatcctgggaagaatggcctgagcaacagctgcatcctgctggacaagtgccccccacccaggcctcccaccagcccctacccacccctgcccaaggacaagctgaacccccccacccccagcatctacctggagaacaagagagatgccttcttcccccccctgcaccagttctgcaccaaccccaagaaccctgtgaccgtcatccggggcctggccggggccctgaagctggacctgggcctcttcagcaccaagaccctggtggaggccaacaatgagcacatggtggaggtgaggacccagctgctgcagcctgcagatgagaactgggaccccaccggcaccaagaagatctggaggtgtgagagcaacagaagccacaccaccatcgccaagtatgcccagtaccaggccagcagcttccaggagagcctgcggagcctcatcctgagccaccctggctggaatgccatggtgtag

SEQ ID NO: 175313 - DNA, 3213 bp, synthetic construct
  misc_feature 1..3213: note = Description of Artificial Sequence: Synthetic coding sequence
  source 1..3213: mol_type = other DNA
atgaagagctgtgctgtgtccctgaccacagctgctgtggcctttggagatgaggccaagaagatggccgagggcaaggccagccgggagagcgaggaggagagcgtgtccctgactgtggaggagcgggaggccctgggcggcatggacagccggctgtttggatttgtgcggctgcatgaagatggagcccggaccaagaccctgctgggcaaggctgtgcgctgctatgagagcctcatcctgaaggccgagggcaaggtggagagtgacttcttctgccagctgggccacttcaacctgctgctggaggactacagcaaggccctgagcgcctaccagcgctactacagcctgcaggccgactactggaagaatgctgccttcctgtatggcctgggcctggtgtacttctactacaatgccttccactgggccatcaaggccttccaggatgtgctgtatgtggaccccagcttctgccgggccaaggagatccacctgcggctgggcctgatgttcaaggtgaacacagactacaagagcagcctgaagcacttccagctggccctgattgactgcaacccctgcaccctgagcaatgctgagatccagttccacatcgcccacctgtatgagacccagaggaagtaccacagcgccaaggaggcctatgagcagctgctgcagacagagaacctgcctgcccaggtgaaggccaccgtgctgcagcagctgggctggatgcaccacaacatggacctggtgggggacaaggccaccaaggagagctatgccatccagtacctgcagaagagcctggaggccgaccccaacagcggccagagctggtacttcctgggccgctgctacagcagcatcggcaaggtgcaggatgccttcatctcctaccggcagagcattgacaagtctgaggccagcgctgacacctggtgcagcattggagtgctgtaccagcagcagaaccagcccatggatgccctgcaggcctacatctgtgctgtgcagctggaccacggccatgctgctgcctggatggacctgggcaccctgtatgagagctgcaaccagccccaggatgccatcaagtgctacctgaatgctgcccggagcaagcgctgcagcaacaccagcaccctggccgcccgcatcaagttcctgcaggcccagctgtgcaacctgccccagagcagcctgcagaacaagaccaagctgctgcccagcattgaggaggcctggagcctgcccatcccagctgagctgaccagccggcagggcgccatgaacacagcccagcagcagagcctgagcctgcacatgatcaccagcagccaggtggagggcctgagcagccctgccaagaagaagaggaccagcagccccaccaagaatggaagtgacaactggaatggaggccagagcctgagccaccaccctgtgcagcaggtgtacagcctgtgcctgaccccccagaagctgcagcacctggagcagctgcgggccaacagagacaacctgaacccagcccagaagcaccagctggagcagctggagagccagtttgtgctgatgcagcagatgaggcacaaggaggtggcccaggtgaggaccaccggcatccacaatggagccatcacagacagcagcctgcccaccaacagcgtgagcaaccggcagccccacggggccctgaccagggtgtcctctgtgtcccagcccggggtgcggcctgcctgtgtggagaagctgctgagcagcggggccttctctgctggctgcatcccctgtggcaccagcaagatcctgggcagcacagacaccatcctgctgggcagcaactgcatcgccggcagcgagagcaatggaaatgtgccctacctgcagcagaacacccacaccctgccccacaaccacacagacctgaacagcagcacagaggagccctggaggaagcagctgagcaacagcgcccagggcctgcacaagagccagagcagctgcctgagcggccccaatgaggagcagcccctcttcagcactggaagtgcccagtaccaccaggccaccagcacaggcatcaagaaggccaatgagcacctgaccctgcccagcaacagcgtgccccagggagatgctgacagccacctgagctgccacacagccaccagcggcggccagcagggcatcatgttcaccaaggagagcaagcccagcaagaacagaagcctggtgcctgagaccagccgccacactggagacaccagcaatggctgtgctgatgtgaagggcctgagcaaccacgtgcaccagctgattgctgatgctgtgagcagccccaaccacggggacagccccaacctgctgattgctgacaacccccagctgagcgccctgctgattggcaaggccaatggaaatgtgggcaccggcacctgtgacaaggtgaacaacatccaccctgctgtgcacaccaagacagaccacagcgtggccagcagccccagcagcgccatcagcacagccacccccagccccaagagcacagagcagaggagcatcaacagcgtgaccagcctgaacagcccccacagcggcctgcacacagtgaatggagagggcctgggcaagagccagagcagcaccaaggtggacctgcccctggccagccacaggagcaccagccagatcctgcccagcatgtctgtgtccatctgccccagcagcacagaggtgctgaaggcctgcagaaatcctgggaagaatggcctgagcaacagctgcatcctgctggacaagtgccccccacccaggcctcccaccagcccctacccacccctgcccaaggacaagctgaacccccccacccccagcatctacctggagaacaagagagatgccttcttcccccccctgcaccagttctgcaccaaccccaagaaccctgtgaccgtcatccggggcctggccggggccctgaagctggacctgggcctcttcagcaccaagaccctggtggaggccaacaatgagcacatggtggaggtgaggacccagctgctgcagcctgcagatgagaactgggaccccaccggcaccaagaagatctggaggtgtgagagcaacagaagccacaccaccatcgccaagtatgcccagtaccaggccagcagcttccaggagagcctgaggtag

SEQ ID NO: 175314 - DNA, 798 bp, synthetic construct
  misc_feature 1..798: note = Description of Artificial Sequence: Synthetic coding sequence
  source 1..798: mol_type = other DNA
atgcccaacatggtgttcatcggcggcatcaactgcaagaagaggaaggacctgagccaggagtttgaggcctacatcaatgccagcggggagcacggcatcgtggtgttcagcctgggctccatggtgtctgagatccctgagaagaaggccatggccatcgcagatgccctgggcaagatcccccagacagtgctgtggagatacacaggcacccggcccagcaacctggccaacaacaccatcctggtgaagtggctgccccagaatgacctgctgggccaccccatgacccgggccttcatcacccatgctggcagccacggcgtgtatgagagcatctgcaatggagtgcccatggtgatgatgcccctgtttggagaccagatggacaatgccaagaggatggagaccaagggagctggggtgaccctgaatgtgctggagatgaccagcgaggacctggagaatgccctgaaggctgtgatcaatgacaagagctacaaggagaacatcatgaggctgagcagcctgcacaaggacaggcctgtggagcccctggacctggccgtgttctgggtggagtttgtgatgaggcacaagggggccccccacctgcggcctgctgcccatgacctgacctggtaccagtaccacagcctggatgtgattggcttcctgctggccgtggtgctgactgtggccttcatcaccttcaagtgctgtgcctacggctacaggaagtgcctgggcaagaagggccgggtgaagaaggcccacaagagcaagacccactag

SEQ ID NO: 175315 - DNA, 1605 bp, synthetic construct
  misc_feature 1..1605: note = Description of Artificial Sequence: Synthetic coding sequence
  source 1..1605: mol_type = other DNA
atggccaccggcctgcaggtgcccctgccccagctggccaccggcctgctgctgctgctgtctgtgcagccctgggccgagagcggcaaggtgctggtggtgcccacagatggcagccactggctgtccatgagggaggccctgcgggacctgcacgcccggggccaccaggtggtggtgctgaccctggaggtgaacatgtacatcaaggaggagaacttcttcaccctgaccacctacgccatctcctggacccaggatgaatttgaccggctgctgctgggccacacccagagcttctttgaaacagagcacctgctgatgaagttcagcaggaggatggccatcatgaacaacatgagcctcatcatccacaggagctgtgtggagctgctgcacaatgaggccctgatccgccacctgcacgccaccagctttgatgtggtgctgacagaccccttccacctgtgtgccgctgtgctggccaagtacctgagcatcccagctgtgttcttcctgaggaacatcccctgtgacctggacttcaagggcacccagtgccccaaccccagcagctacatcccccggctgctgaccaccaacagcgaccacatgaccttcctgcagagggtgaagaacatgctgtaccccctggccctgagctacctgtgccacgctgtgtctgccccctatgccagcctggccagcgagctgttccagcgggaggtgtctgtggtggacctggtgtcccatgcctctgtgtggctgttccggggggactttgtgatggactacccccggcccatcatgcccaacatggtgttcatcggcggcatcaactgtgccaacgggaagcccctgagccaggagtttgaggcctacatcaatgccagcggggagcacggcatcgtggtgttcagcctgggctccatggtgtctgagatccctgagaagaaggccatggccatcgcagatgccctgggcaagatcccccagacagtgctgtggagatacacaggcacccggcccagcaacctggccaacaacaccatcctggtgaagtggctgccccagaatgacctgctgggccaccccatgacccgggccttcatcacccacgccggcagccatggagtgtatgagagcatctgcaatggagtgcccatggtgatgatgcccctgtttggagaccagatggacaatgccaagaggatggagaccaagggggccggcgtgaccctgaatgtgctggagatgaccagcgaggacctggagaatgccctgaaggccgtcatcaatgacaagagctacaaggagaacatcatgaggctgagcagcctgcacaaggacaggcctgtggagcccctggacctggccgtgttctgggtggagtttgtgatgaggcacaagggggccccccacctgcggcctgctgcccatgacctgacctggtaccagtaccacagcctggatgtgattggcttcctgctggccgtggtgctgactgtggccttcatcaccttcaagtgctgtgcctacggctacaggaagtgcctgggcaagaagggccgggtgaagaaggcccacaagagcaagacccactag

SEQ ID NO: 175316 - DNA, 1599 bp, synthetic construct
  misc_feature 1..1599: note = Description of Artificial Sequence: Synthetic coding sequence
  source 1..1599: mol_type = other DNA
atggcctgcctgctgcgctccttccagaggatctctgctggggtcttcttcctggccctgtggggcatggtggtgggggacaagctgctggtggtgccccaggacggcagccactggctgtccatgaaggacatcgtggaggtgctgagtgaccggggccacgagatcgtggtggtggtgcctgaggtgaacctgctgctgaaggagagcaagtactacaccaggaagatctaccctgtgccctatgaccaggaggagctgaagaaccgctaccagagctttggaaacaaccactttgctgagaggagcttcctgacagccccccagacagagtacagaaacaacatgattgtgattggcctgtacttcatcaactgccagagcctgctgcaggaccgggacaccctgaacttcttcaaggagagcaagtttgatgccctcttcacagatcctgccctgccctgtggggtcatcctggccgagtacctgggcctgcccagcgtgtacctgttccggggcttcccctgcagcctggagcacaccttcagccgcagcccagaccctgtgtcctacatcccccgctgctacaccaagttcagtgaccacatgaccttcagccagagggtggccaacttcctggtgaacctgctggagccctacctgttctactgcctcttcagcaaatatgaggagctggccagcgctgtgctgaagagagatgtggacatcatcaccctgtaccagaaggtgtctgtgtggctgctgcgctatgactttgtgctggagtaccccaggcctgtgatgcccaacatggtgttcatcggcggcatcaactgcaagaagaggaaggacctgagccaggagtttgaggcctacatcaatgccagcggggagcacggcatcgtggtgttcagcctgggctccatggtgtctgagatccctgagaagaaggccatggccatcgcagatgccctgggcaagatcccccagacagtgctgtggagatacacaggcacccggcccagcaacctggccaacaacaccatcctggtgaagtggctgccccagaatgacctgctgggccaccccatgacccgggccttcatcacccacgccggcagccatggagtgtatgagagcatctgcaatggagtgcccatggtgatgatgcccctgtttggagaccagatggacaatgccaagaggatggagaccaagggggccggcgtgaccctgaatgtgctggagatgaccagcgaggacctggagaatgccctgaaggccgtcatcaatgacaagagctacaaggagaacatcatgaggctgagcagcctgcacaaggacaggcctgtggagcccctggacctggccgtgttctgggtggagtttgtgatgaggcacaagggggccccccacctgcggcctgctgcccatgacctgacctggtaccagtaccacagcctggatgtgattggcttcctgctggccgtggtgctgactgtggccttcatcaccttcaagtgctgtgcctacggctacaggaagtgcctgggcaagaagggccgggtgaagaaggcccacaagagcaagacccactag

SEQ ID NO: 175317 - DNA, 570 bp, synthetic construct
  misc_feature 1..570: note = Description of Artificial Sequence: Synthetic coding sequence
  source 1..570: mol_type = other DNA
atggcctgcctgctgcgctccttccagaggatctctgctggggtcttcttcctggccctgtggggcatggtggtgggggacaagctgctggtggtgccccaggacggcagccactggctgtccatgaaggacatcgtggaggtgctgagtgaccggggccacgagatcgtggtggtggtgcctgaggtgaacctgctgctgaaggagagcaagtactacaccaggaagatctaccctgtgccctatgaccaggaggagctgaagaaccgctaccagagctttggaaacaaccactttgctgagaggagcttcctgacagccccccagacagagtacagaaacaacatgattgtgattggcctgtacttcatcaactgccagagcctgctgcaggaccgggacaccctgaacttcttcaaggagagcaagtttgatgccctcttcacagatcctgccctgccctgtggggtcatcctggccgagtacctgggcctgcccagcgtgtacctgttccggggcttcccctgcagcctggagcacaccttcagccgcagcccagaccctgtgtag

SEQ ID NO: 175318 - DNA, 1593 bp, synthetic construct
  misc_feature 1..1593: note = Description of Artificial Sequence: Synthetic coding sequence
  source 1..1593: mol_type = other DNA
atggcccgggccggctggacaggcctgctgcccctgtatgtgtgcctgctgctgacctgtggctttgccaaggccggcaagctgctggtggtgcccatggatggcagccactggttcaccatgcagagcgtggtggagaagctgatcctgcggggccacgaggtggtggtggtgatgcctgaggtgtcctggcagctgggccgcagcctgaactgcaccgtgaagacctacagcaccagctacaccctggaggaccaggaccgggagttcatggtgtttgctgatgcccgctggacagcccccctgcggagcgccttcagcctgctgaccagcagcagcaatggcatctttgacctcttcttcagcaactgccgcagcctcttcaatgacaggaagctggtggagtacctgaaggagagctgctttgatgctgtgttcctggacccctttgatgcctgtggcctcatcgtggccaagtacttcagcctgcccagcgtggtgtttgcccggggcatcttctgccactacctggaggagggcgcccagtgcccagcccccctgtcctatgtgccccggctgctgctgggcttcagtgatgccatgaccttcaaggagcgggtgtggaaccacatcatgcacctggaggagcacctgttctgcccctacttcttcaagaatgtgctggagatcgccagcgagatcctgcagacccctgtgacagcctatgacctgtacagccacaccagcatctggctgctgaggacagactttgtgctggagtaccccaagcctgtgatgcccaacatgatcttcatcggcggcatcaactgccaccagggcaagcctgtgcccatggagtttgaggcctacatcaatgccagcggggagcacggcatcgtggtgttcagcctgggctccatggtgtctgagatccctgagaagaaggccatggccatcgcagatgccctgggcaagatcccccagacagtgctgtggagatacacaggcacccggcccagcaacctggccaacaacaccatcctggtgaagtggctgccccagaatgacctgctgggccaccccatgacccgggccttcatcacccacgccggcagccatggagtgtatgagagcatctgcaatggagtgcccatggtgatgatgcccctgtttggagaccagatggacaatgccaagaggatggagaccaagggggccggcgtgaccctgaatgtgctggagatgaccagcgaggacctggagaatgccctgaaggccgtcatcaatgacaagagctacaaggagaacatcatgaggctgagcagcctgcacaaggacaggcctgtggagcccctggacctggccgtgttctgggtggagtttgtgatgaggcacaagggggccccccacctgcggcctgctgcccatgacctgacctggtaccagtaccacagcctggatgtgattggcttcctgctggccgtggtgctgactgtggccttcatcaccttcaagtgctgtgcctacggctacaggaagtgcctgggcaagaagggccgggtgaagaaggcccacaagagcaagacccactag

SEQ ID NO: 175319 - DNA, 1593 bp, synthetic construct
  misc_feature 1..1593: note = Description of Artificial Sequence: Synthetic coding sequence
  source 1..1593: mol_type = other DNA
atggccaggacaggctggaccagccccatccccctgtgtgtgtccctgctgctgacctgtggctttgctgaggccggcaagctgctggtggtgcccatggatggcagccactggttcaccatgcagagcgtggtggagaagctgatcctgcggggccacgaggtggtggtggtgatgcctgaggtgtcctggcagctgggcaagagcctgaactgcaccgtgaagacctacagcaccagctacaccctggaggacctggaccgggagttcatggactttgctgatgcccagtggaaggcccaggtgcgcagcctcttcagcctcttcctgagcagcagcaatggcttcttcaacctcttcttcagccactgccgcagcctcttcaatgacaggaagctggtggagtacctgaaggagagcagctttgatgctgtgttcctggacccctttgatgcctgtggcctcatcgtggccaagtacttcagcctgcccagcgtggtgtttgcccggggcatcgcctgccactacctggaggagggcgcccagtgcccagcccccctgtcctatgtgccccgcatcctgctgggcttcagtgatgccatgaccttcaaggagcgggtgaggaaccacatcatgcacctggaggagcacctgttctgccagtacttcagcaagaatgccctggagatcgccagcgagatcctgcagacccctgtgacagcctatgacctgtacagccacaccagcatctggctgctgaggacagactttgtgctggactaccccaagcctgtgatgcccaacatgatcttcatcggcggcatcaactgccaccagggcaagcccctgcccatggagtttgaggcctacatcaatgccagcggggagcacggcatcgtggtgttcagcctgggctccatggtgtctgagatccctgagaagaaggccatggccatcgcagatgccctgggcaagatcccccagacagtgctgtggagatacacaggcacccggcccagcaacctggccaacaacaccatcctggtgaagtggctgccccagaatgacctgctgggccaccccatgacccgggccttcatcacccacgccggcagccatggagtgtatgagagcatctgcaatggagtgcccatggtgatgatgcccctgtttggagaccagatggacaatgccaagaggatggagaccaagggggccggcgtgaccctgaatgtgctggagatgaccagcgaggacctggagaatgccctgaaggccgtcatcaatgacaagagctacaaggagaacatcatgaggctgagcagcctgcacaaggacaggcctgtggagcccctggacctggccgtgttctgggtggagtttgtgatgaggcacaagggggccccccacctgcggcctgctgcccatgacctgacctggtaccagtaccacagcctggatgtgattggcttcctgctggccgtggtgctgactgtggccttcatcaccttcaagtgctgtgcctacggctacaggaagtgcctgggcaagaagggccgggtgaagaaggcccacaagagcaagacccactag

SEQ ID NO: 175320 - DNA, 1593 bp, synthetic construct
  misc_feature 1..1593: note = Description of Artificial Sequence: Synthetic coding sequence
  source 1..1593: mol_type = other DNA
atggcctgcaccggctggaccagccccctgcccctgtgtgtgtgcctgctgctgacctgtggctttgctgaggccggcaagctgctggtggtgcccatggatggcagccactggttcaccatgaggtctgtggtggagaagctgatcctgcggggccacgaggtggtggtggtgatgcctgaggtgtcctggcagctgggccgcagcctgaactgcaccgtgaagacctacagcaccagctacaccctggaggacctggaccgggagttcaaggcctttgcccacgcccagtggaaggcccaggtgcgcagcatctacagcctgctgatgggcagctacaatgacatctttgacctcttcttcagcaactgccgcagcctcttcaaggacaagaagctggtggagtacctgaaggagagcagctttgatgctgtgttcctggacccctttgacaactgtggcctcatcgtggccaagtacttcagcctgcccagcgtggtgtttgcccggggcatcctgtgccactacctggaggagggcgcccagtgcccagcccccctgtcctatgtgccccgcatcctgctgggcttcagtgatgccatgaccttcaaggagcgggtgaggaaccacatcatgcacctggaggagcacctgctgtgccaccgcttcttcaagaatgccctggagatcgccagcgagatcctgcagacccctgtgacagaatatgacctgtacagccacaccagcatctggctgctgaggacagactttgtgctggactaccccaagcctgtgatgcccaacatgatcttcatcggcggcatcaactgccaccagggcaagcccctgcccatggagtttgaggcctacatcaatgccagcggggagcacggcatcgtggtgttcagcctgggctccatggtgtctgagatccctgagaagaaggccatggccatcgcagatgccctgggcaagatcccccagacagtgctgtggagatacacaggcacccggcccagcaacctggccaacaacaccatcctggtgaagtggctgccccagaatgacctgctgggccaccccatgacccgggccttcatcacccacgccggcagccatggagtgtatgagagcatctgcaatggagtgcccatggtgatgatgcccctgtttggagaccagatggacaatgccaagaggatggagaccaagggggccggcgtgaccctgaatgtgctggagatgaccagcgaggacctggagaatgccctgaaggccgtcatcaatgacaagagctacaaggagaacatcatgaggctgagcagcctgcacaaggacaggcctgtggagcccctggacctggccgtgttctgggtggagtttgtgatgaggcacaagggggccccccacctgcggcctgctgcccatgacctgacctggtaccagtaccacagcctggatgtgattggcttcctgctggccgtggtgctgactgtggccttcatcaccttcaagtgctgtgcctacggctacaggaagtgcctgggcaagaagggccgggtgaagaaggcccacaagagcaagacccactag

SEQ ID NO: 175321 - DNA, 1584 bp, synthetic construct
  misc_feature 1..1584: note = Description of Artificial Sequence: Synthetic coding sequence
  source 1..1584: mol_type = other DNA
atgctgaacaacctgctgctcttcagcctgcagatcagcctgattggcaccaccctgggcggcaatgtgctgatctggcccatggagggcagccactggctgaatgtgaagatcatcattgatgagctgatcaagaaggagcacaacgtgacagtgctggtggccagcggggccctcttcatcacccccaccagcaaccccagcctgacctttgagatctacagagtgccctttgggaaggagagaattgaaggagtcatcaaggactttgtgctgacctggctggagaaccggcccagccccagcaccatctggaggttctaccaggagatggccaaggtgatcaaggacttccacatggtgtcccaggagatctgtgatggagtgctgaagaaccagcagctgatggccaagctgaagaagagcaagtttgaggtgctggtgtctgaccctgtgttcccctgtggggacatcgtggccctgaagctgggcatccccttcatgtacagcctgcgcttctccccagccagcacagtggagaagcactgcggcaaggtgccctacccacccagctatgtgcctgctgtgctgtctgagctgacagaccagatgtccttcacagaccgcatccggaacttcatctcctaccacctgcaggactacatgtttgagaccctgtggaagtcctgggacagctactacagcaaggccctgggcggcctgctgctgtgctgccccggctggagcgctgtggccgacctgggcagcctgcagcccctgctgcccggcttcaagcgcttcagccggctgagcctgcactgctcctgggactaccgcctgcctgctggccggcccaccaccctgtgtgagaccatgggcaaggccgagatctggctgatccgcacctactgggactttgagttcccccggccctacctgcccaactttgaatttgtgggcggcctgcactgcaagccagccaagcccctgcccaaggtgctgtggagatacaagggcaagaagccagccaccctgggcaacaacacccagctgtttgactggatcccccagaatgacctgctgggccaccccaagaccaaggccttcatcacccacggcggcaccaacggcatctatgaggccatctaccacggcgtgcccatggtgggcgtgcccatgtttgctgaccagcctgacaacatcgcccacatgaaggccaagggagctgctgtggaggtgaacctgaacaccatgacctctgtggacctgctgagcgccctgaggacagtcatcaatgagcccagctacaaggaaaatgccatgaggctgagccgcatccaccacgaccagcctgtgaagcccctggacagagctgtgttctggattgaatttgtgatgaggcacaagggggccaagcacctgcgggtggccgcccatgacctgacctggttccagtaccacagcctggatgtgattggcttcctgctggtgtgtgtgaccacagccatcttcctggtgatccagtgctgcctcttcagctgccagaagtttgggaagattggcaagaagaagaagcgggagtag

SEQ ID NO: 175322 - DNA, 2082 bp, synthetic construct
  misc_feature 1..2082: note = Description of Artificial Sequence: Synthetic coding sequence
  source 1..2082: mol_type = other DNA
atgctgaacaacctgctgctcttcagcctgcagatcagcctgattggcaccaccctgggcggcaatgtgctgatctggcccatggagggcagccactggctgaatgtgaagatcatcattgatgagctgatcaagaaggagcacaacgtgacagtgctggtggccagcggggccctcttcatcacccccaccagcaaccccagcctgacctttgagatctacagagtgccctttgggaaggagagaattgaaggagtcatcaaggactttgtgctgacctggctggagaaccggcccagccccagcaccatctggaggttctaccaggagatggccaaggtgatcaaggacttccacatggtgtcccaggagatctgtgatggagtgctgaagaaccagcagctgatggccaagctgaagaagagcaagtttgaggtgctggtgtctgaccctgtgttcccctgtggggacatcgtggccctgaagctgggcatccccttcatgtacagcctgcgcttctccccagccagcacagtggagaagcactgcggcaaggtgccctacccacccagctatgtgcctgctgtgctgtctgagctgacagaccagatgtccttcacagaccgcatccggaacttcatctcctaccacctgcaggactacatgtttgagaccctgtggaagtcctgggacagctactacagcaaggccctggatggcagccactggctgaacatcaagatcatcctggaggagctgatccagaggaaccacaacgtgacagtgctggccagcagcgccaccctcttcatcaacagcaacccagacagccctgtgaactttgaagtcatccctgtgtcctacaagaagagcaacatcgacagcctgattgagcacatgatcatgctgtggattgaccaccggcccacccccctgaccatctgggccttctacaaggagctgggcaagctgctggacaccttcttccagatcaacatccagctgtgtgatggagtgctgaagaaccccaagctgatggcccggctgcagaagggcggctttgatgtgctggtggccgaccctgtgaccatctgtggggacctggtggccctgaagctgggcatccccttcatgtacaccctgcgcttctccccagccagcacagtggagcggcactgcggcaagatcccagcccctgtgtcctatgtgcctgctgccctgtctgagctgacagaccagatgaccttcggggagcgcatcaagaacaccatctcctacagcctgcaggactacatcttccagagctactggggcgagtggaacagctactacagcaagatcctgggccggcccaccaccctgtgtgagaccatgggcaaggccgagatctggctgatccgcacctactgggactttgagttcccccggccctacctgcccaactttgaatttgtgggcggcctgcactgcaagccagccaagcccctgcccaaggtgctgtggagatacaagggcaagaagccagccaccctgggcaacaacacccagctgtttgactggatcccccagaatgacctgctgggccaccccaagaccaaggccttcatcacccacggcggcaccaacggcatctatgaggccatctaccacggcgtgcccatggtgggcgtgcccatgtttgctgaccagcctgacaacatcgcccacatgaaggccaagggagctgctgtggaggtgaacctgaacaccatgacctctgtggacctgctgagcgccctgaggacagtcatcaatgagcccagctacaaggaaaatgccatgaggctgagccgcatccaccacgaccagcctgtgaagcccctggacagagctgtgttctggattgaatttgtgatgaggcacaagggggccaagcacctgcgggtggccgcccatgacctgacctggttccagtaccacagcctggatgtgattggcttcctgctggtgtgtgtgaccacagccatcttcctggtgatccagtgctgcctcttcagctgccagaagtttgggaagattggcaagaagaagaagcgggagtag

SEQ ID NO: 175323 - DNA, 1611 bp, synthetic construct
  misc_feature 1..1611: note = Description of Artificial Sequence: Synthetic coding sequence
  source 1..1611: mol_type = other DNA
atggtgtccatccgggacttcaccatgcccaagaagtttgtgcagatgctggtgttcaacctgaccctgacagaggtggtgctgtctggaaatgtgctgatctggcccacagatggcagccactggctgaacatcaagatcatcctggaggagctgatccagaggaaccacaacgtgacagtgctggccagcagcgccaccctcttcatcaacagcaacccagacagccctgtgaactttgaggtgattcctgtgtcctacaagaagagcaacatcgacagcctcatcgagcacatgatcatgctgtggattgaccaccggcccacccccctgaccatctgggccttctacaaggagctgggcaagctgctggacaccttcttccagatcaacatccagctgtgtgatggagtgctgaagaaccccaagctgatggcccggctgcagaagggcggctttgatgtgctggtggccgaccctgtgaccatctgtggggacctggtggccctgaagctgggcatccccttcatgtacaccctgcgcttcagccctgccagcacagtggagcggcactgtgggaagatcccagcccctgtgtcctatgtgcctgctgccctgtctgagctgacagaccagatgacctttggagagcgcatcaagaacaccatctcctacagcctgcaggactacatcttccagagctactggggcgagtggaacagctactacagcaagatcctgggccggcccaccaccctgtgtgagaccatgggcaaggccgagatctggctgatccgcacctactgggactttgagttcccccggccctacctgcccaactttgaatttgtgggcggcctgcactgcaagccagccaagcccctgcccaaggagatggaggagttcatccagagcagcggcaagaatggagtggtggtgttcagcctgggctccatggtgaagaacctgacagaggagaaggccaacctgattgccagcgccctggcccagatcccccagaaggtgctgtggagatacaagggcaagaagccagccaccctgggcaacaacacccagctgtttgactggatcccccagaatgacctgctgggccaccccaagaccaaggccttcatcacccatggaggcaccaacggcatctatgaggccatctaccatggagtgcccatggtgggcgtgcccatgtttgctgaccagcctgacaacatcgcccacatgaaggccaagggagctgctgtggaggtgaacctgaacaccatgacctctgtggacctgctgagcgccctgaggacagtcatcaatgagcccagctacaaggaaaatgccatgaggctgagccgcatccaccacgaccagcctgtgaagcccctggacagagctgtgttctggattgaatttgtgatgaggcacaagggggccaagcacctgcgggtggccgcccatgacctgacctggttccagtaccacagcctggatgtgattggcttcctgctggtgtgtgtgaccacagccatcttcctggtgatccagtgctgcctcttcagctgccagaagtttgggaagattggcaagaagaagaagcgggagtag

SEQ ID NO: 175324 - DNA, 1584 bp, synthetic construct
  misc_feature 1..1584: note = Description of Artificial Sequence: Synthetic coding sequence
  source 1..1584: mol_type = other DNA
atgctgaacaacctgctgctcttcagcctgcagatcagcctgattggcaccaccctgggcggcaatgtgctgatctggcccatggagggcagccactggctgaatgtgaagatcatcattgatgagctgatcaagaaggagcacaacgtgacagtgctggtggccagcggggccctcttcatcacccccaccagcaaccccagcctgacctttgagatctacagagtgccctttgggaaggagagaattgaaggagtcatcaaggactttgtgctgacctggctggagaaccggcccagccccagcaccatctggaggttctaccaggagatggccaaggtgatcaaggacttccacatggtgtcccaggagatctgtgatggagtgctgaagaaccagcagctgatggccaagctgaagaagagcaagtttgaggtgctggtgtctgaccctgtgttcccctgtggggacatcgtggccctgaagctgggcatccccttcatgtacagcctgcgcttctccccagccagcacagtggagaagcactgcggcaaggtgccctacccacccagctatgtgcctgctgtgctgtctgagctgacagaccagatgtccttcacagaccgcatccggaacttcatctcctaccacctgcaggactacatgtttgagaccctgtggaagtcctgggacagctactacagcaaggccctgggccggcccaccaccctgtgtgagaccatgggcaaggccgagatctggctgatccgcacctactgggactttgagttcccccggccctacctgcccaactttgaatttgtgggcggcctgcactgcaagccagccaagcccctgcccaaggagatggaggagttcatccagagcagcggcaagaatggagtggtggtgttcagcctgggctccatggtgaagaacctgacagaggagaaggccaacctgattgccagcgccctggcccagatcccccagaaggtgctgtggagatacaagggcaagaagccagccaccctgggcaacaacacccagctgtttgactggatcccccagaatgacctgctgggccaccccaagaccaaggccttcatcacccacggcggcaccaacggcatctatgaggccatctaccacggcgtgcccatggtgggcgtgcccatgtttgctgaccagcctgacaacatcgcccacatgaaggccaagggagctgctgtggaggtgaacctgaacaccatgacctctgtggacctgctgagcgccctgaggacagtcatcaatgagcccagctacaaggaaaatgccatgaggctgagccgcatccaccacgaccagcctgtgaagcccctggacagagctgtgttctggattgaatttgtgatgaggcacaagggggccaagcacctgcgggtggccgcccatgacctgacctggttccagtaccacagcctggatgtgattggcttcctgctggtgtgtgtgaccacagccatcttcctggtgatccagtgctgcctcttcagctgccagaagtttgggaagattggcaagaagaagaagcgggagtag

SEQ ID NO: 175325 - DNA, 477 bp, synthetic construct
  misc_feature 1..477: note = Description of Artificial Sequence: Synthetic coding sequence
  source 1..477: mol_type = other DNA
atgctgaacaacctgctgctcttcagcctgcagatcagcctgattggcaccaccctgggcggcaatgtgctgatctggcccatggagggcagccactggctgaatgtgaagatcatcattgatgagctgatcaagaaggagcacaacgtgacagtgctggtggccagcggggccctcttcatcacccccaccagcaaccccagcctgacctttgagatctacagagtgccctttgggaaggagagaattgaaggagtcatcaaggactttgtgctgacctggctggagaaccggcccagccccagcaccatctggaggttctaccaggagatggccaaggtgatcaaggacttccacatggtgtcccaggagatctgtgatggagtgctgaagaaccagcagctgatggccaagctgaagaagagcaagtttgaggtgctggtgtctgaccctgtgttcccctgtggggacatctag

SEQ ID NO: 175326 - DNA, 1590 bp, synthetic construct
  misc_feature 1..1590: note = Description of Artificial Sequence: Synthetic coding sequence
  source 1..1590: mol_type = other DNA
atgaccctgaagtggacctctgtgctgctgctgatccacctgagctgctacttcagcagcggcagctgtgggaaggtgctggtgtgggccgctgagtacagccactggatgaacatgaagaccatcctgaaggagctggtgcagaggggccacgaggtgacagtgctggccagcagcgccagcatcctgtttgaccccaatgatgccagcaccctgaagtttgaggtgtaccccaccagcctgaccaagacagaatttgagaacatcatcatgcagcaggtgaagcgctggagcgacatcaggaaggacagcttctggctgtacttcagccaggagcaggagatcctgtgggagctgtatgacatcttcaggaacttctgcaaggatgtggtgagcaacaagaaggtgatgaagaagctgcaggagagcagatttgatattgtgtttgctgatgctgtgttcccctgtggggagctgctggccgccctgctgaacatccgctttgtgtacagcctgcgcttcaccccaggctacaccatcgagcggcacagcggcggcctcatcttcccccccagctacatccccatcgtgatgagcaagctgagtgaccagatgaccttcatggagcgggtgaagaacatgatctacgtgctgtactttgacttctggttccagatgtctgacatgaagaagtgggaccagttctacagcgaggtgctgggccggcccaccaccctgtttgagaccatgggcaaggctgacatctggctgatgagaaattcctggagcttccagttcccccaccccttcctgcccaacgtggactttgtgggcggcttccactgcaagccagccaagcccctgcccaaggagatggaggagtttgtgcagagcagtggagaaaatggagtggtggtgttcagcctgggcagcgtcatcagcaacatgacagctgagcgggccaacgtcatcgccacagccctggccaagatcccccagaaggtgctgtggaggtttgatggcaacaagccagatgccctgggcctgaacacccggctgtacaagtggatcccccagaatgacctgctgggccaccccaagacccgggccttcatcacccacggcggggccaacggcatctatgaggccatctaccacggcatccccatggtgggcatccccctcttctttgaccagcctgacaacatcgcccacatgaaggccaagggagctgctgtgcggctggacttcaacaccatgagcagcacagacctgctgaatgccctgaagacagtcatcaatgaccccctgtacaaggagaacatcatgaagctgagccgcatccagcacgaccagcctgtgaagcccctggacagagctgtgttctggattgaatttgtgatgccccacaagggggccaagcacctgcgggtggccgcccatgacctgacctggttccagtaccacagcctggatgtgattggcttcctgctggcctgtgtggccaccgtcatcttcatcatcaccaagttctgcctcttctgcttctggaagtttgccaggaagggcaagaagggcaagagggactag

SEQ ID NO: 175327 - DNA, 1593 bp, synthetic construct
  misc_feature 1..1593: note = Description of Artificial Sequence: Synthetic coding sequence
  source 1..1593: mol_type = other DNA
atgagcctgaagtggacctctgtgttcctgctgatccagctgagctgctacttcagcagcggcagctgtgggaaggtgctggtgtggcccacagagtacagccactggatcaacatgaagaccatcctggaggagctggtgcagaggggccacgaggtgacagtgctgaccagcagcgccagcaccctggtgaatgccagcaagagcagcgccatcaagctggaggtgtaccccaccagcctgaccaagaactacctggaggacagcctgctgaagatcctggaccgctggatctatggagtgtccaagaacaccttctggagctacttcagccagctgcaggagctgtgctgggagtactatgactacagcaacaagctgtgcaaggatgctgtgctgaacaagaagctgatgatgaagctgcaggagagcaagtttgatgtgatcctggctgatgccctgaacccctgtggggagctgctggccgagctgttcaacatccccttcctgtacagcctgcgcttctctgtgggctacacctttgagaagaatggaggcggcttcctgtttcctccttcctatgtgcctgtggtgatgtctgagctgagtgaccagatgatcttcatggagcgcatcaagaacatgatccacatgctgtactttgacttctggttccagatctatgacctgaagaagtgggaccagttctacagcgaggtgctgggccggcccaccaccctgtttgagaccatgggcaaggccgagatgtggctgatccgcacctactgggactttgagttcccccggcccttcctgcccaacgtggactttgtgggcggcctgcactgcaagccagccaagcccctgcccaaggagatggaggagtttgtgcagagcagcggggagaatggaattgtggtgttcagcctgggctccatgatcagcaacatgtctgaggagagcgccaacatgattgccagcgccctggcccagatcccccagaaggtgctgtggaggtttgatggcaagaagcccaacaccctgggcagcaacacccggctgtacaagtggctgccccagaatgacctgctgggccaccccaagaccaaggccttcatcacccatggaggcaccaacggcatctatgaggccatctaccacggcatccccatggtgggcatccccctgtttgctgaccagcacgacaacatcgcccacatgaaggccaagggggccgccctgtctgtggacatccgcaccatgagcagccgggacctgctgaatgccctgaagagcgtcatcaatgaccctgtgtacaaggaaaatgtgatgaagctgagccgcatccaccacgaccagcccatgaagcccctggacagagctgtgttctggattgaatttgtgatgaggcacaagggggccaagcacctgcgggtggccgcccacaacctgacctggatccagtaccacagcctggatgtgattgccttcctgctggcctgtgtggccaccgtcatcttcatcatcaccaagttctgcctcttctgcttcaggaagctggccaagaagggcaagaagaagaagagggactag

SEQ ID NO: 175328 - DNA, 1593 bp, synthetic construct
  misc_feature 1..1593: note = Description of Artificial Sequence: Synthetic coding sequence
  source 1..1593: mol_type = other DNA
atgagcctgaagtggatgtctgtgttcctgctgatgcagctgagctgctacttcagcagcggcagctgtgggaaggtgctggtgtggcccacagagtacagccactggatcaacatgaagaccatcctggaggagctggtgcagaggggccatgaagtcatcgtgctgaccagcagcgccagcatcctggtgaatgccagcaagagcagcgccatcaagctggaggtgtaccccaccagcctgaccaagaatgacctggaggacttcttcatgaagatgtttgaccgctggacctacagcatcagcaagaacaccttctggagctacttcagccagctgcaggagctgtgctgggagtacagcgactacaacatcaagctgtgtgaagatgctgtgctgaacaagaagctgatgaggaagctgcaggagagcaagtttgatgtgctgctggctgatgctgtgaacccctgtggggagctgctggccgagctgctgaacatccccttcctgtacagcctgcgcttctctgtgggctacacagtggagaagaatggaggcggcttcctgtttcctccttcctatgtgcctgtggtgatgtctgagctgagtgaccagatgatcttcatggagcgcatcaagaacatgatctacatgctgtactttgacttctggttccaggcctatgacctgaagaagtgggaccagttctacagcgaggtgctgggccggcccaccaccctgtttgagaccatgggcaaggccgagatgtggctgatccgcacctactgggactttgagttcccccggcccttcctgcccaacgtggactttgtgggcggcctgcactgcaagccagccaagcccctgcccaaggagatggaggagtttgtgcagagcagcggggagaatggaattgtggtgttcagcctgggctccatgatcagcaacatgtctgaggagagcgccaacatgattgccagcgccctggcccagatcccccagaaggtgctgtggaggtttgatggcaagaagcccaacaccctgggcagcaacacccggctgtacaagtggctgccccagaatgacctgctgggccaccccaagaccaaggccttcatcacccatggaggcaccaacggcatctatgaggccatctaccacggcatccccatggtgggcatccccctgtttgctgaccagcacgacaacatcgcccacatgaaggccaagggggccgccctgtctgtggacatccgcaccatgagcagccgggacctgctgaatgccctgaagagcgtcatcaatgaccccatctacaaggagaacatcatgaagctgagccgcatccaccacgaccagcctgtgaagcccctggacagagctgtgttctggattgaatttgtgatgaggcacaagggggccaagcacctgcgggtggccgcccacaacctgacctggatccagtaccacagcctggatgtgattgccttcctgctggcctgtgtggccaccatgatcttcatgatcaccaagtgctgcctcttctgcttcaggaagctggccaagacaggcaagaagaagaagagggactag

SEQ ID NO: 175329 - DNA, 1590 bp, synthetic construct
  misc_feature 1..1590: note = Description of Artificial Sequence: Synthetic coding sequence
  source 1..1590: mol_type = other DNA
atggccctgaagtggacctctgtgctgctgctgatccacctgggctgctacttcagcagcggcagctgtgggaaggtgctggtgtggacaggagagtacagccactggatgaacatgaagaccatcctgaaggagctggtgcagaggggccacgaggtgacagtgctggccagcagcgccagcatcctgtttgaccccaatgatgccttcaccctgaagctggaggtgtaccccaccagcctgaccaagacagaatttgagaacatcatcatgcagcaggtgaagcgctggagcgacatccagaaggacagcttctggctgtacttcagccaggagcaggagatcctgtgggagttccatgacatcttcaggaacttctgcaaggatgtggtgagcaacaagaaggtgatgaagaagctgcaggagagcagatttgacatcatctttgctgatgccttcttcccctgtggggagctgctggccgccctgctgaacatcccctttgtgtacagcctgtgcttcaccccaggctacaccatcgagcggcacagcggcggcctcatcttcccccccagctacatccctgtggtgatgagcaagctgagtgaccagatgaccttcatggagcgggtgaagaacatgatctacgtgctgtactttgacttctggttccagatgtgtgacatgaagaagtgggaccagttctacagcgaggtgctgggccggcccaccaccctgtttgagaccatgggcaaggctgacatctggctgatgagaaattcctggagcttccagttcccccaccccttcctgcccaacatcgactttgtgggcggcctgcactgcaagccagccaagcccctgcccaaggagatggaggagtttgtgcagagcagtggagaaaatggagtggtggtgttcagcctgggcagcgtcatcagcaacatgacagctgagcgggccaacgtcatcgccacagccctggccaagatcccccagaaggtgctgtggaggtttgatggcaacaagccagatgccctgggcctgaacacccggctgtacaagtggatcccccagaatgacctgctgggcctgcccaagacccgggccttcatcacccacggcggggccaacggcatctatgaggccatctaccacggcatccccatggtgggcatccccctcttctgggaccagcctgacaacatcgcccacatgaaggccaagggagctgctgtgcggctggacttccacaccatgagcagcacagacctgctgaatgccctgaagacagtcatcaatgaccccagctacaaggaaaatgtgatgaagctgagcatcatccagcacgaccagcctgtgaagcccctgcacagagctgtgttctggattgaatttgtgatgtgccacaagggggccaagcacctgcgggtggccgcccgggacctgacctggttccagtaccacagcctggatgtgattggcttcctgctggcctgtgtggccaccgtcatctttgtggtgaccaagttctgcctcttctgcttctggaagtttgccaggaagggcaagaagggcaagagggactag

SEQ ID NO: 175330 - DNA, 1008 bp, synthetic construct
  misc_feature 1..1008: note = Description of Artificial Sequence: Synthetic coding sequence
  source 1..1008: mol_type = other DNA
atggccctgaagtggacctctgtgctgctgctgatccacctgggctgctacttcagcagcggcagctgtgggaaggtgctggtgtggacaggagagtacagccactggatgaacatgaagaccatcctgaaggagctggtgcagaggggccacgaggtgacagtgctggccagcagcgccagcatcctgtttgaccccaatgatgccttcaccctgaagctggaggtgtaccccaccagcctgaccaagacagaatttgagaacatcatcatgcagcaggtgaagcgctggagcgacatccagaaggacagcttctggctgtacttcagccaggagcaggagatcctgtgggagttccatgacatcttcaggaacttctgcaaggatgtggtgagcaacaagaaggtgatgaagaagctgcaggagagcagatttgacatcatctttgctgatgccttcttcccctgtggggagctgctggccgccctgctgaacatcccctttgtgtacagcctgtgcttcaccccaggctacaccatcgagcggcacagcggcggcctcatcttcccccccagctacatccctgtggtgatgagcaagctgagtgaccagatgaccttcatggagcgggtgaagaacatgatctacgtgctgtactttgacttctggttccagatgtgtgacatgaagaagtgggaccagttctacagcgaggtgctgggccggcccaccaccctgtttgagaccatgggcaaggctgacatctggctgatgagaaattcctggagcttccagttcccccaccccttcctgcccaacatcgactttgtgggcggcctgcactgcaagccagccaagcccctgcccaaggagatggaggagtttgtgcagagcagtggagaaaatggagtggtggtgttcagcctgggcagcgtcatcagcaacatgacagctgagcgggccaacgtcatcgccacagccctggccaagatcccccagaagatctag

SEQ ID NO: 175331 - DNA, 1587 bp, synthetic construct
  misc_feature 1..1587: note = Description of Artificial Sequence: Synthetic coding sequence
  source 1..1587: mol_type = other DNA
atgtccatgaagtggaccagcgccctgctgctgatccagctgagctgctacttcagcagcggcagctgtgggaaggtgctggtgtggcccacagagttcagccactggatgaacatcaagaccatcctggatgagctggtgcagaggggccacgaggtgacagtgctggccagcagcgccagcatcagctttgaccccaacagccccagcaccctgaagtttgaggtgtaccctgtgtccctgaccaagacagaatttgaggacatcatcaagcagctggtgaagcgctgggccgagctgcccaaggacaccttctggagctacttcagccaggtgcaggagatcatgtggaccttcaatgacatcctgaggaagttctgcaaggacatcgtgagcaacaagaagctgatgaagaagctgcaggagagcagatttgatgtggtgctggctgatgctgtgttcccctttggagagctgctggccgagctgctgaagatcccctttgtgtacagcctgcgcttcagccctggctacgccatcgagaagcacagcggcggcctgctcttcccccccagctatgtgcctgtggtgatgtctgagctgagtgaccagatgaccttcatcgagcgggtgaagaacatgatctacgtgctgtactttgagttctggttccagatctttgacatgaagaagtgggaccagttctacagcgaggtgctgggccggcccaccaccctgtctgagaccatggccaaggctgacatctggctgatccggaactactgggacttccagttcccccaccccctgctgcccaacgtggagtttgtgggcggcctgcactgcaagccagccaagcccctgcccaaggagatggaggagtttgtgcagagcagtggagaaaatggagtggtggtgttcagcctgggctccatggtgagcaacaccagcgaggagcgggccaacgtcatcgccagcgccctggccaagatcccccagaaggtgctgtggaggtttgatggcaacaagccagacaccctgggcctgaacacccggctgtacaagtggatcccccagaatgacctgctgggccaccccaagacccgggccttcatcacccacggcggggccaacggcatctatgaggccatctaccacggcatccccatggtgggcgtgcccctgtttgctgaccagcctgacaacatcgcccacatgaaggccaagggagctgctgtgtccctggacttccacaccatgagcagcacagacctgctgaatgccctgaagacagtcatcaatgaccccctgtacaaggaaaatgccatgaagctgagccgcatccaccacgaccagcctgtgaagcccctggacagagctgtgttctggattgaatttgtgatgaggcacaagggggccaagcacctgcgggtggccgcccatgacctgacctggttccagtaccacagcctggatgtgacaggcttcctgctggcctgtgtggccaccgtcatcttcatcatcaccaagtgcctcttctgtgtgtggaagtttgtgaggacaggcaagaagggcaagagggactag

SEQ ID NO: 175332 - DNA, 1179 bp, synthetic construct
  misc_feature 1..1179: note = Description of Artificial Sequence: Synthetic coding sequence
  source 1..1179: mol_type = other DNA
atgttctttgccctgctgcacgtgagcagcaccaacggcctggatgctgtgttcccctttggagagctgctggccgagctgctgaagatcccctttgtgtacagcctgcgcttcagccctggctacgccatcgagaagcacagcggcggcctgctcttcccccccagctatgtgcctgtggtgatgtctgagctgagtgaccagatgaccttcatcgagcgggtgaagaacatgatctacgtgctgtactttgagttctggttccagatctttgacatgaagaagtgggaccagttctacagcgaggtgctgggccggcccaccaccctgtctgagaccatggccaaggctgacatctggctgatccggaactactgggacttccagttcccccaccccctgctgcccaacgtggagtttgtgggcggcctgcactgcaagccagccaagcccctgcccaaggagatggaggagtttgtgcagagcagtggagaaaatggagtggtggtgttcagcctgggctccatggtgagcaacaccagcgaggagcgggccaacgtcatcgccagcgccctggccaagatcccccagaaggtgctgtggaggtttgatggcaacaagccagacaccctgggcctgaacacccggctgtacaagtggatcccccagaatgacctgctgggccaccccaagacccgggccttcatcacccacggcggggccaacggcatctatgaggccatctaccacggcatccccatggtgggcgtgcccctgtttgctgaccagcctgacaacatcgcccacatgaaggccaagggagctgctgtgtccctggacttccacaccatgagcagcacagacctgctgaatgccctgaagacagtcatcaatgaccccctgtacaaggaaaatgccatgaagctgagccgcatccaccacgaccagcctgtgaagcccctggacagagctgtgttctggattgaatttgtgatgaggcacaagggggccaagcacctgcgggtggccgcccatgacctgacctggttccagtaccacagcctggatgtgacaggcttcctgctggcctgtgtggccaccgtcatcttcatcatcaccaagtgcctcttctgtgtgtggaagtttgtgaggacaggcaagaagggcaagagggactag

SEQ ID NO: 175333 - DNA, 165 bp, synthetic construct
  misc_feature 1..165: note = Description of Artificial Sequence: Synthetic coding sequence
  source 1..165: mol_type = other DNA
atgtccatgaagtggaccagcgccctgctgctgatccagctgagctgctacttcagcagcggcagctgtgggaaggtgctggtgtggcccacagagttcagccactggatgaacatcaagaccatcctggatgagctggtgcagaggggccacgaggtgacctag

SEQ ID NO: 175334 - DNA, 1590 bp, synthetic construct
  misc_feature 1..1590: note = Description of Artificial Sequence: Synthetic coding sequence
  source 1..1590: mol_type = other DNA
atgtctgtgaagtggaccagcgtcatcctgctgatccagctgtccttctgcttcagcagcggcaactgtgggaaggtgctggtgtgggccgctgagtacagccactggatgaacatcaagaccatcctggatgagctgatccagaggggccacgaggtgacagtgctggccagcagcgccagcatcctgtttgaccccaacaacagcagcgccctgaagattgagatctaccccaccagcctgaccaagacagagctggagaacttcatcatgcagcagatcaagcgctggagcgacctgcccaaggacaccttctggctgtacttcagccaggtgcaggagatcatgagcatctttggagacatcaccaggaagttctgcaaggatgtggtgagcaacaagaagttcatgaagaaggtgcaggagagcagatttgatgtgatctttgctgatgccatcttcccctgcagcgagctgctggccgagctgttcaacatcccctttgtgtacagcctgtccttcagccctggctacacctttgagaagcacagcggcggcttcatcttcccccccagctatgtgcctgtggtgatgtctgagctgacagaccagatgaccttcatggagcgggtgaagaacatgatctacgtgctgtactttgacttctggtttgagatctttgacatgaagaagtgggaccagttctacagcgaggtgctgggccggcccaccaccctgtctgagaccatgggcaaggcagatgtgtggctgatcagaaattcctggaacttccagttcccctaccccctgctgcccaacgtggactttgtgggcggcctgcactgcaagccagccaagcccctgcccaaggagatggaggactttgtgcagagcagtggagaaaatggagtggtggtgttcagcctgggctccatggtgagcaacatgacagaggagcgggccaacgtcatcgccagcgccctggcccagatcccccagaaggtgctgtggaggtttgatggcaacaagccagacaccctgggcctgaacacccggctgtacaagtggatcccccagaatgacctgctgggccaccccaagacccgggccttcatcacccacggcggggccaacggcatctatgaggccatctaccacggcatccccatggtgggcatccccctgtttgctgaccagcctgacaacatcgcccacatgaaggcccggggagctgctgtgcgggtggacttcaacaccatgagcagcacagacctgctgaatgccctgaagagggtcatcaatgaccccagctacaaggaaaatgtgatgaagctgagccgcatccagcacgaccagcctgtgaagcccctggacagagctgtgttctggattgaatttgtgatgaggcacaagggggccaagcacctgcgggtggccgcccatgacctgacctggttccagtaccacagcctggatgtgattggcttcctgctggtgtgtgtggccaccgtcatcttcatcgtgaccaagtgctgcctcttctgcttctggaagtttgccaggaaggccaagaagggcaagaatgactag

SEQ ID NO: 175335 - DNA, 1269 bp, synthetic construct
  misc_feature 1..1269: note = Description of Artificial Sequence: Synthetic coding sequence
  source 1..1269: mol_type = other DNA
atgctgcagtggaggcggcggcactgctgctttgccaagatgacctggaatgccaagaggagcctcttccgcacccacctgattggagtgctgagcctggtgttcctgtttgccatgttcctgttcttcaaccaccacgactggctgcccggccgggccggcttcaaggaaaatcctgtgacctacaccttccggggcttccgcagcaccaagtctgagaccaaccacagcagcctgaggaacatctggaaggagaccgtgccccagaccctgcggccccagacagccaccaacagcaacaacacagacctgagcccccagggcgtgacaggcctggagaacaccctgagcgccaacggcagcatctacaatgagaagggcaccggccaccccaacagctaccacttcaagtacatcatcaatgaacctgagaagtgccaggagaagagccccttcctgatcctgctgattgctgctgagcccggccagatcgaggcccggcgggccatccggcagacctggggcaatgaaagcctggcccctggcatccagatcacccgcatcttcctgctgggcctgagcatcaagctgaatggctacctgcagagggccatcctggaggagagccggcagtaccatgacatcatccagcaggagtacctggacacctactacaacctgaccatcaagaccctgatgggcatgaactgggtggccacctactgcccccacatcccctacgtgatgaagacagacagcgacatgtttgtgaacacagagtacctgatcaacaagctgctgaagccagacctgccccccaggcacaactacttcaccggctacctgatgaggggctacgcccccaacagaaacaaggacagcaagtggtacatgcccccagacctgtaccccagcgagcgctaccctgtgttctgcagcggcaccggctacgtgttcagcggggacctggccgagaagatcttcaaggtgtccctgggcatccggcggctgcacctggaggatgtgtatgtgggcatctgcctggccaagctgagaattgatcctgtgcccccaccaaatgaatttgtgttcaaccactggagggtgtcctacagcagctgcaagtacagccacctgatcaccagccaccagttccagcccagcgagctgatcaagtactggaaccacctgcagcagaacaagcacaatgcctgtgccaatgctgccaaggagaaggccggccgctaccgccacaggaagctgcactag

SEQ ID NO: 175336 - DNA, 1137 bp, synthetic construct
  misc_feature 1..1137: note = Description of Artificial Sequence: Synthetic coding sequence
  source 1..1137: mol_type = other DNA
atgcagctgcggctcttccggcggctgctgctggccgccctgctgctggtgattgtgtggaccctgtttggccccagcggcctgggggaggagctgctgagcctgagcctggccagcctgctgcctgccccagccagccctggcccccccctggccctgccccggctgctgatccccaaccaggaggcctgcagcggccctggggccccacccttcctgctgatcctggtgtgcacagcccctgagaacctgaaccagagaaatgccatccgggcctcctggggcggcctgcgggaggcccggggcctgcgggtgcagaccctcttcctgctgggggagcccaatgcccagcaccctgtgtggggcagccagggcagtgacctggccagcgagagcgctgcccagggcgacatcctgcaggccgccttccaggacagctacagaaacctgaccctgaagaccctgagcggcctgaactgggccgagaagcactgccccatggcccgctacgtgctgaagacagatgatgatgtgtatgtgaatgtgcctgagctggtgtctgagctggtgctgcggggcggccgctggggccagtgggagaggagcacagagccccagcgggaggccgagcaggagggcggccaggtgctgcacagcgaggaggtgcccctgctgtacctgggccgggtgcactggagggtgaaccccagcaggacccctgggggccgccaccgggtgtctgaggagcagtggccccacacctggggccccttccccccctatgccagcggcaccggctacgtgctgagcgccagcgctgtgcagctgatcctgaaggtggccagccgggcccccctgctgcccctggaggatgtgtttgtgggcgtgtctgccaggagaggaggcctggcccccacccagtgtgtgaagctggccggggccacccactaccccctggaccgctgctgctacggcaagttcctgctgaccagccaccggctggacccctggaagatgcaggaggcctggaagctggtgggcggcagtgatggagagaggacagcccccttctgctcctggttccagggcgtgctgggcatcctgcgctgccgggccatcgcctggctgcagagctag

SEQ ID NO: 175337 - DNA, 1137 bp, synthetic construct; identical to SEQ ID NO: 175336
  misc_feature 1..1137: note = Description of Artificial Sequence: Synthetic coding sequence
  source 1..1137: mol_type = other DNA

SEQ ID NO: 175338 - DNA, 1137 bp, synthetic construct; identical to SEQ ID NO: 175336
  misc_feature 1..1137: note = Description of Artificial Sequence: Synthetic coding sequence
  source 1..1137: mol_type = other DNA

SEQ ID NO: 175339 - DNA, 1137 bp, synthetic construct; identical to SEQ ID NO: 175336
  misc_feature 1..1137: note = Description of Artificial Sequence: Synthetic coding sequence
  source 1..1137: mol_type = other DNA

SEQ ID NO: 175340 - DNA, 1137 bp, synthetic construct; identical to SEQ ID NO: 175336
  misc_feature 1..1137: note = Description of Artificial Sequence: Synthetic coding sequence
  source 1..1137: mol_type = other DNA

SEQ ID NO: 175341 - DNA, 933 bp, synthetic construct
  misc_feature 1..933: note = Description of Artificial Sequence: Synthetic coding sequence
  source 1..933: mol_type = other DNA
atggccttccccaagatgaggctgatgtacatctgcctgctggtgctgggcgccctgtgcctgtacttctccatgtacagcctgaaccccttcaaggagcagagctttgtgtacaagaaggatggcaacttcctgaagctgcctgacacagactgccggcagaccccacccttcctggtgctgctggtgaccagcagccacaagcagctggccgagaggatggccatccggcagacctggggcaaggagaggatggtgaagggcaagcagctgaagaccttcttcctgctgggcaccaccagcagcgctgctgagaccaaggaggtggaccaggagagccagagacatggagacatcatccagaaggacttcctggatgtgtactacaacctgaccctgaagaccatgatgggcatcgagtgggtgcaccgcttctgcccccaggccgcctttgtgatgaagacagacagcgacatgttcatcaacgtggactacctgacagagctgctgctgaagaagaacagaaccacccgcttcttcaccggcttcctgaagctgaatgagttccccatccggcagcccttcagcaagtggtttgtgtccaagtctgagtacccctgggaccgctacccacccttctgcagcggcaccggctacgtgttttctggagatgtggccagccaggtgtacaacgtgtccaagtctgtgccctacatcaagctggaggatgtgtttgtgggcctgtgcctggagcggctgaacatccggctggaggagctgcacagccagcccaccttcttccctgggggcctgcgcttctctgtgtgcctcttcagaagaattgtggcctgccacttcatcaagcccaggaccctgctggactactggcaggccctggagaacagcagaggagaggactgcccccctgtgtag

SEQ ID NO: 175342 - DNA, 933 bp, synthetic construct; identical to SEQ ID NO: 175341
  misc_feature 1..933: note = Description of Artificial Sequence: Synthetic coding sequence
  source 1..933: mol_type = other DNA

SEQ ID NO: 175343 - DNA, 933 bp, synthetic construct; identical to SEQ ID NO: 175341
  misc_feature 1..933: note = Description of Artificial Sequence: Synthetic coding sequence
  source 1..933: mol_type = other DNA

SEQ ID NO: 175344 - DNA, 933 bp, synthetic construct; identical to SEQ ID NO: 175341
  misc_feature 1..933: note = Description of Artificial Sequence: Synthetic coding sequence
  source 1..933: mol_type = other DNA

SEQ ID NO: 175345 - DNA, 1197 bp, synthetic construct
  misc_feature 1..1197: note = Description of Artificial Sequence: Synthetic coding sequence
  source 1..1197: mol_type = other DNA
atgaggctgcgggagcccctgctgagcggcagcgctgccatgcctggggccagcctgcagagggcctgccgcctgctggtggccgtgtgtgccctgcacctgggcgtgaccctggtgtactacctggccggccgggacctgagccggctgccccagctggtgggcgtgtccacccccctgcagggcggcagcaacagcgctgctgccatcggccagagcagcggggagctgaggactggaggagcccggcccccaccacccctgggcgccagcagccagcccaggcctggaggagacagcagccctgtggtggacagcggccctggccctgccagcaacctgacctctgtgcctgtgccccacaccacagccctgagcctgcctgcctgcccagaggagagccccctgctggtgggccccatgctgattgagttcaacatgcctgtggacctggagctggtggccaagcagaaccccaacgtgaagatgggcggccgctatgccccccgggactgtgtgagcccccacaaggtggccatcatcatccccttcaggaaccggcaggagcacctgaagtactggctgtactacctgcaccctgtgctgcagaggcagcagctggactatggcatctacgtgatcaaccaggccggggacaccatcttcaacagagccaagctgctgaatgtgggcttccaggaggccctgaaggactatgactacacctgctttgtgttcagtgatgtggacctgatccccatgaatgaccacaatgcctaccgctgcttcagccagcccaggcacatctctgtggccatggacaagtttggcttcagcctgccctacgtgcagtactttggaggagtgtctgccctgagcaagcagcagttcctgaccatcaatggcttccccaacaactactggggctggggcggagaagatgatgacatcttcaaccggctggtgttccggggcatgagcatcagccggcccaatgctgtggtgggccgctgcaggatgatccgccacagccgggacaagaagaatgagcccaacccccagagatttgacagaattgcccacaccaaggagaccatgctgagtgatggcctgaacagcctgacctaccaggtgctggatgtgcagcgctaccccctgtacacccagatcaccgtggacatcggcacccccagctag

SEQ ID NO: 175346 - DNA, 678 bp, synthetic construct
  misc_feature 1..678: note = Description of Artificial Sequence: Synthetic coding sequence
  source 1..678: mol_type = other DNA
atgaggctgcgggagcccctgctgagcggcagcgctgccatgcctggggccagcctgcagagggcctgccgcctgctggtggccgtgtgtgccctgcacctgggcgtgaccctggtgtactacctggccggccgggacctgagccggctgccccagctggtgggcgtgtccacccccctgcagggcggcagcaacagcgctgctgccatcggccagagcagcggggagctgaggactggaggagcccggcccccaccacccctgggcgccagcagccagcccaggcctggaggagacagcagccctgtggtggacagcggccctggccctgccagcaacctgacctctgtgcctgtgccccacaccacagccctgagcctgcctgcctgcccagaggagagccccctgctggtgggccccatgctgattgagttcaacatgcctgtggacctggagctggtggccaagcagaaccccaacgtgaagatgggcggccgctatgccccccgggactgtgtgagcccccacaaggtggccatcatcatccccttcaggaaccggcaggagcacctgaagtactggctgtactacctgcaccctgtgctgcagaggcagcagctggactatggcatctacgtgatcaaccagtatgagaagatccggcggctgctgtggtag

SEQ ID NO: 175347 - DNA, 1068 bp, synthetic construct
  misc_feature 1..1068: note = Description of Artificial Sequence: Synthetic coding sequence
  source 1..1068: mol_type = other DNA
atgaggctgcgggagcccctgctgagcggcagcgctgccatgcctggggccagcctgcagagggcctgccgcctgctggtggccgtgtgtgccctgcacctgggcgtgaccctggtgtactacctggccggccgggacctgagccggctgccccagctggtgggcgtgtccacccctgtggtggacagcggccctggccctgccagcaacctgacctctgtgcctgtgccccacaccacagccctgagcctgcctgcctgcccagaggagagccccctgctggtgggccccatgctgattgagttcaacatgcctgtggacctggagctggtggccaagcagaaccccaacgtgaagatgggcggccgctatgccccccgggactgtgtgagcccccacaaggtggccatcatcatccccttcaggaaccggcaggagcacctgaagtactggctgtactacctgcaccctgtgctgcagaggcagcagctggactatggcatctacgtgatcaaccaggccggggacaccatcttcaacagagccaagctgctgaatgtgggcttccaggaggccctgaaggactatgactacacctgctttgtgttcagtgatgtggacctgatccccatgaatgaccacaatgcctaccgctgcttcagccagcccaggcacatctctgtggccatggacaagtttggcttcagcctgccctacgtgcagtactttggaggagtgtctgccctgagcaagcagcagttcctgaccatcaatggcttccccaacaactactggggctggggcggggaggatgatgacatcttcaaccggctggtgttccggggcatgagcatcagccggcccaatgctgtggtgggccgctgcaggatgatccgccacagccgggacaagaagaatgagcccaacccccagagatttgaccgcatcgcccacaccaaggagaccatgctgagtgatggcctgaacagcctgacctaccaggtgctggatgtgcagcgctaccccctgtacacccagatcaccgtggacatcggcacccccagctag

SEQ ID NO: 175348 - DNA, 438 bp, synthetic construct
  misc_feature 1..438: note = Description of Artificial Sequence: Synthetic coding sequence
  source 1..438: mol_type = other DNA
atgaatgaccacaatgcctaccgctgcttcagccagcccaggcacatctctgtggccatggacaagtttggcttcagcctgccctacgtgcagtactttggaggagtgtctgccctgagcaagcagcagttcctgaccatcaatggcttccccaacaactactggggctggggcggggaggatgatgacatcttcaaccggctggtgttccggggcatgagcatcagccggcccaatgctgtggtgggccgctgcaggatgatccgccacagccgggacaagaagaatgagcccaacccccagagatttgaccgcatcgcccacaccaaggagaccatgctgagtgatggcctgaacagcctgacctaccaggtgctggatgtgcagcgctaccccctgtacacccagatcaccgtggacatcggcacccccagctag

SEQ ID NO: 175349 - DNA, 1206 bp, synthetic construct
  misc_feature 1..1206: note = Description of Artificial Sequence: Synthetic coding sequence
  source 1..1206: mol_type = other DNA
atggctgtggaggtgcaggagcagtggccctgcctgcctgctgctggctgccccggccccctgggcggccctgtggccgcctgtggcatgagccggctgctgggcggcaccctggagcgggtgtgcaaggctgtgctgctgctgtgcctgctgcacttcctggtggccgtcatcctgtactttgatgtgtatgcccagcacctggccttcttcagccgcttcagcgcccggggccctgcccacgccctgcaccctgctgccagcagcagcagcagcagcagcaactgcagccggcccaatgccacagccagcagcagcggcctgcctgaggtgcccagcgccctgcccggccccacagcccccaccctgcccccctgcccagacagccccccaggcctggtgggccgcctgctgattgagttcaccagccccatgcccctggagcgggtgcagagagaaaatcctggggtgctgatgggcggccgctacaccccaccagactgcaccccagcccagacagtggccgtcatcatccccttccgccaccgggagcaccacctgcgctactggctgcactacctgcaccccatcctgcggcggcagaggctgcgctatggagtgtatgtgatcaaccagcacggggaggacaccttcaacagagccaagctgctgaatgtgggcttcctggaggccctgaaggaggatgctgcctatgactgcttcatcttcagtgatgtggacctggtgcccatggatgacaggaacctgtaccgctgtggggaccagcccaggcactttgccatcgccatggacaagtttggcttccggctgccctatgccggctactttggaggagtgtctggcctgagcaaggcccagttcctgcgcatcaatggcttccccaatgagtactggggctggggcggggaggatgatgacatcttcaaccgcatcagcctgaccggcatgaagatcagcaggccagacatccgcatcggccgctacaggatgatcaagcatgaccgggacaagcacaatgagcccaacccccagcgcttcaccaagatccagaacaccaagctgaccatgaagagagatggcatcggctctgtgcgctaccaggtgctggaggtgtcccggcagcccctcttcaccaacatcaccgtggacatcggccggccccccagctggccaccccggggctag

SEQ ID NO: 175350 - DNA, 1119 bp, synthetic construct
  misc_feature 1..1119: note = Description of Artificial Sequence: Synthetic coding sequence
  source 1..1119: mol_type = other DNA
atgagccggctgctgggcggcaccctggagcgggtgtgcaaggctgtgctgctgctgtgcctgctgcacttcctggtggccgtcatcctgtactttgatgtgtatgcccagcacctggccttcttcagccgcttcagcgcccggggccctgcccacgccctgcaccctgctgccagcagcagcagcagcagcagcaactgcagccggcccaatgccacagccagcagcagcggcctgcctgaggtgcccagcgccctgcccggccccacagcccccaccctgcccccctgcccagacagccccccaggcctggtgggccgcctgctgattgagttcaccagccccatgcccctggagcgggtgcagcgggagaaccctggggtgctgatgggcggccgctacaccccaccagactgcaccccagcccagacagtggccgtcatcatccccttccgccaccgggagcaccacctgcgctactggctgcactacctgcaccccatcctgcggcggcagaggctgcgctatggagtgtatgtgatcaaccagcacggggaggacaccttcaacagagccaagctgctgaatgtgggcttcctggaggccctgaaggaggatgctgcctatgactgcttcatcttcagtgatgtggacctggtgcccatggatgacaggaacctgtaccgctgtggggaccagcccaggcactttgccatcgccatggacaagtttggcttccggctgccctatgccggctactttggaggagtgtctggcctgagcaaggcccagttcctgcgcatcaatggcttccccaatgagtactggggctggggcggagaagatgatgacatcttcaaccgcatcagcctgaccggcatgaagatcagcaggccagacatcagaattggccgctacaggatgatcaagcatgaccgggacaagcacaatgagcccaacccccagcgcttcaccaagatccagaacaccaagctgaccatgaagagagatggcatcggctctgtgcgctaccaggtgctggaggtgtcccggcagcccctcttcaccaacatcaccgtggacatcggccggcccccatcctggccaccccggggctag

SEQ ID NO: 175351 - DNA, 1119 bp, synthetic construct; identical to SEQ ID NO: 175350
  misc_feature 1..1119: note = Description of Artificial Sequence: Synthetic coding sequence
  source 1..1119: mol_type = other DNA

SEQ ID NO: 175352 - DNA, 921 bp, synthetic construct
  misc_feature 1..921: note = Description of Artificial Sequence: Synthetic coding sequence
  source 1..921: mol_type = other DNA
atgcccagcacccagctgctggccgctgctgctgctgctgccacagcccctggccccaccccaccacccctggcccctggcagcctgcggagccctgtgccctgccctgtgccccggctgccccgctgccaccctgtgctgaccaggcacctggtgctgcgggtgcagcgggagaaccctggggtgctgatgggcggccgctacaccccaccagactgcaccccagcccagacagtggccgtcatcatccccttccgccaccgggagcaccacctgcgctactggctgcactacctgcaccccatcctgcggcggcagaggctgcgctatggagtgtatgtgatcaaccagcacggggaggacaccttcaacagagccaagctgctgaatgtgggcttcctggaggccctgaaggaggatgctgcctatgactgcttcatcttcagtgatgtggacctggtgcccatggatgacaggaacctgtaccgctgtggggaccagcccaggcactttgccatcgccatggacaagtttggcttccggctgccctatgccggctactttggaggagtgtctggcctgagcaaggcccagttcctgcgcatcaatggcttccccaatgagtactggggctggggcggagaagatgatgacatcttcaaccgcatcagcctgaccggcatgaagatcagcaggccagacatcagaattggccgctacaggatgatcaagcatgaccgggacaagcacaatgagcccaacccccagcgcttcaccaagatccagaacaccaagctgaccatgaagagagatggcatcggctctgtgcgctaccaggtgctggaggtgtcccggcagcccctcttcaccaacatcaccgtggacatcggccggcccccatcctggccaccccggggctag

SEQ ID NO: 175353 - DNA, 441 bp, synthetic construct
  misc_feature 1..441: note = Description of Artificial Sequence: Synthetic coding sequence
  source 1..441: mol_type = other DNA
atgctgcggcggctgctggagcggccctgcaccctggccctgctggtgggcagccagctggccgtgatgatgtacctgagcctgggcggcttccgcagcctgagcgccctgtttggccgggaccagggccccacctttgactacagccaccccagagatgtgtacagcaacctgagccacctgcccggggcccctgggggccccccagccccccagggcctgccctactgcccagagaggagccccctgctggtgggccctgtgtctgtgtccttcagccctgtgcccagcctggccgagatcgtggagaggaacccccgggtggagcccggcggccgctaccggcccccagctgccctgcccccagcccccctgctggccgccccagctgcctgcctgtggcacctgtgccaccccccaggctggaagtggaacatctag

SEQ ID NO: 175354 - DNA, 1182 bp, synthetic construct
  misc_feature 1..1182: note = Description of Artificial Sequence: Synthetic coding sequence
  source 1..1182: mol_type = other DNA
atgctgcggcggctgctggagcggccctgcaccctggccctgctggtgggcagccagctggccgtgatgatgtacctgagcctgggcggcttccgcagcctgagcgccctgtttggccgggaccagggccccacctttgactacagccaccccagagatgtgtacagcaacctgagccacctgcccggggcccctgggggccccccagccccccagggcctgccctactgcccagagaggagccccctgctggtgggccctgtgtctgtgtccttcagccctgtgcccagcctggccgagatcgtggagaggaacccccgggtggagcccggcggccgctacagacctgctggctgtgagcccaggagcaggacagccatcatcgtgccccaccgggcccgggagcaccacctgcggctgctgctgtaccacctgcaccccttcctgcagaggcagcagctggcctacggcatctacgtgatccaccaggccggaaatggcaccttcaacagagccaagctgctgaatgtgggcgtgcgggaggccctgagagatgaggagtgggactgcctcttcctgcatgatgtggacctgctgcctgaaaatgaccacaacctgtatgtgtgtgacccccggggccccaggcatgtggccgtggccatgaacaagtttggctacagcctgccctacccccagtactttggaggagtgtctgccctgaccccagaccagtacctgaagatgaatggcttccccaatgagtactggggctggggcggagaagatgatgacatcgccaccagggtgcggctggccggcatgaagatcagcaggcctcccacctctgtgggccactacaagatggtgaagcacagaggagacaagggaaatgaggagaacccccacagatttgacctgctggtgaggacccagaacagctggacccaggacggcatgaacagcctgacctaccagctgctggcccgggagctgggccccctgtacaccaacatcacagctgacatcggcacagacccccggggcccccgggcccccagcggcccccgctacccacctggcagcagccaggccttccggcaggagatgctgcagaggcggcccccagcccggcccggccccctgagcacagccaaccacacagccctgcggggcagccactag

SEQ ID NO: 175355 - DNA, 1182 bp, synthetic construct
  misc_feature 1..1182: note = Description of Artificial Sequence: Synthetic coding sequence
  source 1..1182: mol_type = other DNA
atgctgcggcggctgctggagcggccctgcaccctggccctgctggtgggcagccagctggccgtgatgatgtacctgagcctgggcggcttccgcagcctgagcgccctgtttggccgggaccagggccccacctttgactacagccaccccagagatgtgtacagcaacctgagccacctgcccggggcccctgggggccccccagccccccagggcctgccctactgcccagagaggagccccctgctggtgggccctgtgtctgtgtccttcagccctgtgcccagcctggccgagatcgtggagaggaacccccgggtggagcccggcggccgctacagacctgctggctgtgagcccaggagcaggacagccatcatcgtgccccaccgggcccgggagcaccacctgcggctgctgctgtaccacctgcaccccttcctgcagaggcagcagctggcctacggcatctacgtgatccaccaggccggaaatggcaccttcaacagagccaagctgctgaatgtgggcgtgcgggaggccctgagagatgaggagtgggactgcctcttcctgcatgatgtggacctgctgcctgaaaatgaccacaacctgtatgtgtgtgacccccggggccccaggcatgtggccgtggccatgaacaagtttggctacagcctgccctacccccagtactttggaggagtgtctgccctgaccccagaccagtacctgaagatgaatggcttccccaatgagtactggggctggggcggagaagatgatgacatcgccaccagggtgcggctggccggcatgaagatcagcaggcctcccacctctgtgggccactacaagatggtgaagcacagaggagacaagggaaatgaggagaacccccacagatttgacctgctggtgaggacccagaacagctggacccaggacggcatgaacagcctgacctaccagctgctggcccgggagctgggccccctgtacaccaacatcacagctgacatcggcacagacccccggggcccccgggcccccagcggcccccgctacccacctggcagcagccaggccttccggcaggagatgctgcagaggcggcccccagcccggcccggccccctgagcacagccaaccacaccccatctgaggtgcacacctag

SEQ ID NO: 175356 - DNA, 1182 bp, synthetic construct; identical to SEQ ID NO: 175354
  misc_feature 1..1182: note = Description of Artificial Sequence: Synthetic coding sequence
  source 1..1182: mol_type = other DNA

SEQ ID NO: 175357 - DNA, 1113 bp, synthetic construct
  misc_feature 1..1113: note = Description of Artificial Sequence: Synthetic coding sequence
  source 1..1113: mol_type = other DNA
atgctgcggcggctgctggagcggccctgcaccctggccctgtttggccgggaccagggccccacctttgactacagccaccccagagatgtgtacagcaacctgagccacctgcccggggcccctgggggccccccagccccccagggcctgccctactgcccagagaggagccccctgctggtgggccctgtgtctgtgtccttcagccctgtgcccagcctggccgagatcgtggagaggaacccccgggtggagcccggcggccgctacagacctgctggctgtgagcccaggagcaggacagccatcatcgtgccccaccgggcccgggagcaccacctgcggctgctgctgtaccacctgcaccccttcctgcagaggcagcagctggcctacggcatctacgtgatccaccaggccggaaatggcaccttcaacagagccaagctgctgaatgtgggcgtgcgggaggccctgagagatgaggagtgggactgcctcttcctgcatgatgtggacctgctgcctgaaaatgaccacaacctgtatgtgtgtgacccccggggccccaggcatgtggccgtggccatgaacaagtttggctacagcctgccctacccccagtactttggaggagtgtctgccctgaccccagaccagtacctgaagatgaatggcttccccaatgagtactggggctggggcggggaggatgatgacatcgccaccagggtgcggctggccggcatgaagatcagccggccccccacctctgtgggccactacaagatggtgaagcacagaggagacaagggaaatgaggagaacccccacagatttgacctgctggtgaggacccagaacagctggacccaggacggcatgaacagcctgacctaccagctgctggcccgggagctgggccccctgtacaccaacatcacagctgacattggaacagacccccggggcccccgggcccccagcggcccccgctacccacctggcagcagccaggccttccggcaggagatgctgcagaggcggcccccagcccggcccggccccctgagcacagccaaccacacagccctgcggggcagccactag

SEQ ID NO: 175358 - DNA, 684 bp, synthetic construct
  misc_feature 1..684: note = Description of Artificial Sequence: Synthetic coding sequence
  source 1..684: mol_type = other DNA
atgctgcggcggctgctggagcggccctgcaccctggccctgctggtgggcagccagctggccgtgatgatgtacctgagcctgggcggcttccgcagcctgagcgccctgtttggccgggaccagggccccacctttgactacagccaccccagagatgtgtacagcaacctgagccacctgcccggggcccctgggggccccccagccccccagggcctgccctactgcccagagaggagccccctgctggtgggccctgtgtctgtgtccttcagccctgtgcccagcctggccgagatcgtggagaggaacccccgggtggagcccggcggccgctacagacctgctggctgtgagcccaggagcaggacagccatcatcgtgccccaccgggcccgggagcaccacctgcggctgctgctgtaccacctgcaccccttcctgcagaggcagcagctggcctacggcatctacgtgatccaccaggccggaaatggcaccttcaacagagccaagctgctgaatgtgggcgtgcgggaggccctgagagatgaggagtgggactgcctcttcctgcatgatgtggacctgctgcctgaaaatgaccacaacctgtatgtgtgtgacccccggggccccaggcatgtggccgtggccatgaacaagtttggctacagatag

SEQ ID NO: 175359 - DNA, 1035 bp, synthetic construct
  misc_feature 1..1035: note = Description of Artificial Sequence: Synthetic coding sequence
  source 1..1035: mol_type = other DNA
atgggcttcaacctgaccttccacctgagctacaagttccggctgctgctgctgctgaccctgtgcctgactgtggtgggctgggccaccagcaactactttgtgggcgccatccaggagatccccaaggccaaggagttcatggccaacttccacaagaccctcatcctgggcaagggcaagaccctgaccaatgaggccagcaccaagaaggtggagctggacaactgccccagcgtgagcccctacctgcggggccagagcaagctgatcttcaagccagacctgaccctggaggaggtgcaggccgagaaccccaaggtgtcccggggccgctaccggccccaggagtgcaaggccctgcagagggtggccatcctggtgccccacaggaaccgggagaagcacctgatgtacctgctggagcacctgcaccccttcctgcagaggcagcagctggactatggcatctacgtgatccaccaggccgagggcaagaagttcaacagagccaagctgctgaatgtgggctacctggaggccctgaaggaggagaactgggactgcttcatcttccatgatgtggacctggtgcctgaaaatgacttcaacctgtacaagtgtgaggagcaccccaagcacctggtggtgggcaggaacagcacaggctaccgcctgcgctacagcggctactttggaggagtgacagccctgagccgggagcagttcttcaaggtgaatggcttcagcaacaactactggggctggggcggagaagatgatgacctgcggctgcgggtggagctgcagaggatgaagatcagccggcccctgcctgaggtgggcaagtacaccatggtgttccacacccgggacaagggaaatgaggtgaatgctgagaggatgaagctgctgcaccaggtgtcccgggtgtggaggacagatggcctgagcagctgcagctacaagctggtgtctgtggagcacaaccccctgtacatcaacatcaccgtggacttctggtttggagcctag

SEQ ID NO: 175360 - DNA, 1035 bp, synthetic construct; identical to SEQ ID NO: 175359
  misc_feature 1..1035: note = Description of Artificial Sequence: Synthetic coding sequence
  source 1..1035: mol_type = other DNA

SEQ ID NO: 175361 - DNA, 21 bp, synthetic construct
  misc_feature 1..21: note = Description of Artificial Sequence: Synthetic coding sequence
  source 1..21: mol_type = other DNA
atgggcttcaacctgacctag

SEQ ID NO: 175362 - skipped

SEQ ID NO: 175363 - DNA, 168 bp, synthetic construct
  misc_feature 1..168: note = Description of Artificial Sequence: Synthetic coding sequence
  source 1..168: mol_type = other DNA
atgggcttcaacctgaccttccacctgagctacaagttccggctgctgctgctgctgaccctgtgcctgactgtggtgggctgggccaccagcaactactttgtgggcgccatccaggagatccccaaggccaaggagttcatggccaacttccacaagaccctgtag

SEQ ID NO: 175364 - DNA, 66 bp, synthetic construct
  misc_feature 1..66: note = Description of Artificial Sequence: Synthetic coding sequence
  source 1..66: mol_type = other DNA
atgggcttcaacctgaccttccacctgagctacaagttccggctgctgctgctgctgaccctgtag

SEQ ID NO: 175365 - DNA, 411 bp, synthetic construct
  misc_feature 1..411: note = Description of Artificial Sequence: Synthetic coding sequence
  source 1..411: mol_type = other DNA
atgggcttcaacctgaccttccacctgagctacaagttccggctgctgctgctgctgaccctgtgcctgactgtggtgggctgggccaccagcaactactttgtgggcgccatccaggagatccccaaggccaaggagttcatggccaacttccacaagaccctcatcctgggcaagggcaagaccctgaccaatgaggccagcaccaagaaggtggagctggacaactgccccagcgtgagcccctacctgcggggccagagcaagctgatcttcaagccagacctgaccctggaggaggtgcaggccgagaaccccaaggtgtcccggggccgctaccggccccaggagtgcaaggccctgcagagggtggccatcctggtgccccacaggaaccgggagaagcactag

SEQ ID NO: 175366 - DNA, 357 bp, synthetic construct
  misc_feature 1..357: note = Description of Artificial Sequence: Synthetic coding sequence
  source 1..357: mol_type = other DNA
atgggcttcaacctgaccttccacctgagctacaagttccggctgctgctgctgctgaccctgtgcctgactgtggtgggctgggccaccagcaactactttgtgggcgccatccaggagatccccaaggccaaggagttcatggccaacttccacaagaccctcatcctgggcaagggcaagaccctgaccaatgaggccagcaccaagaaggtggagctggacaactgccccagcgtgagcccctacctgcggggccagagcaagctgatcttcaagccagacctgaccctggaggaggtgcaggccgagaaccccaaggtgtcccggggccgctaccggccccaggagtgctag

SEQ ID NO: 175367 - DNA, 1035 bp, synthetic construct; identical to SEQ ID NO: 175359
  misc_feature 1..1035: note = Description of Artificial Sequence: Synthetic coding sequence
  source 1..1035: mol_type = other DNA

SEQ ID NO: 175368 - DNA, 129 bp, synthetic construct
  misc_feature 1..129: note = Description of Artificial Sequence: Synthetic coding sequence
  source 1..129: mol_type = other DNA
atgggcttcaacctgaccttccacctgagctacaagttccggctgctgctgctgctgaccctgtgcctgactgtggtgggctgggccaccagcaactactttgtgggcgccatccaggagatcccctag

SEQ ID NO: 175369 - DNA, 1167 bp, synthetic construct
  misc_feature 1..1167: note = Description of Artificial Sequence: Synthetic coding sequence
  source 1..1167: mol_type = other DNA
atgagggcccggcggggcctgctgcggctgccccggcgcagcctgctggccgccctcttcttcttcagcctgagcagcagcctgctgtactttgtgtatgtggcccctggcatcgtgaacacctacctgttcatgatgcaggcccagggcatcctgatccgggacaacgtgaggaccatcggggcccaggtgtatgagcaggtgctgcggagcgcctatgccaagaggaacagctctgtgaatgacagcgactaccccctggacctgaaccacagcgagaccttcctgcagaccaccaccttcctgcctgaggacttcacctactttgccaaccacacctgcccagagcggctgcccagcatgaagggccccatcgacatcaacatgtctgagatcggcatggactacatccacgagctgttcagcaaggaccccaccatcaagctgggcggccactggaagcccagcgactgcatgccccgctggaaggtggccatcctgatccccttcaggaacagacatgagcacctgcctgtgctcttccgccacctgctgcccatgctgcagaggcagaggctgcagtttgccttctacgtggtggagcaggtgggcacccagcccttcaacagagccatgctgttcaacgtgggcttccaggaggccatgaaggacctggactgggactgcctgatcttccatgatgtggaccacatccctgagagtgacaggaactactacggctgcggccagatgcccaggcactttgccaccaagctggacaagtacatgtacctgctgccctacacagagttcttcggcggcgtgtctggcctgactgtggagcagttcaggaagatcaatggcttccccaatgccttctggggctggggcggagaagatgatgacctgtggaacagagtgcagaatgccggctacagcgtgtccaggcctgagggggacaccgggaagtacaagagcatcccccaccaccacagaggagaggtgcagttcctgggccgctatgccctgctgaggaagagcaaggagcggcagggcctggatggcctgaacaacctgaactactttgccaacatcacctatgatgccctgtacaagaacatcaccgtgaacctgaccccagagctggcccaggtgaatgagtactag

SEQ ID NO: 175370 - DNA, 1032 bp, synthetic construct
  misc_feature 1..1032: note = Description of Artificial Sequence: Synthetic coding sequence
  source 1..1032: mol_type = other DNA
atgtctgtgctgcggaggatgatgagggtgagcaacagaagcctgctggccttcatcttcttcttcagcctgagcagcagctgcctgtacttcatctacgtggcccctggcatcgactacccagagggcaacaacagcagtgactacctggtgcagaccaccacctacctgcctgagaacttcacctacagcccctacctgccctgcccagagaagctgccctacatgaggggcttcctgaatgtgaatgtgtctgaggtgtcctttgatgagatccaccagctgttcagcaaggacctggacatcgagcccggcggccactggaggcccaaggactgcaagccccgctggaaggtggccgtgctgatccccttcaggaacagacatgagcacctgcccatcttcttcctgcacctgatccccatgctgcagaagcagaggctggagtttgccttctacgtgattgagcagacaggcacccagcccttcaacagagccatgctgttcaacgtgggcttcaaggaggccatgaaggacagcgtgtgggactgtgtgatcttccatgatgtggaccacctgcctgaaaatgacaggaactactacggctgtggggagatgcccaggcactttgctgccaagctggacaagtacatgtacatcctgccctacaaggagttctttggaggagtgtctggcctgactgtggagcagttcaggaagatcaatggcttccccaatgccttctggggctggggcggggaggatgatgacctgtggaacagagtgcactacgccggctacaacgtgaccaggcctgagggggacctgggcaagtacaagagcatcccccaccaccacagaggagaggtgcagttcctgggccgctacaagctgctgcgctacagcaaggagcggcagtacattgatggcctgaacaacctgatctaccggcccaagatcctggtggaccggctgtacaccaacatctctgtgaacctgatgcctgagctggcccccatcgaggactactag

SEQ ID NO: 175371 - DNA, 1149 bp, synthetic construct
  misc_feature 1..1149: note = Description of Artificial Sequence: Synthetic coding sequence
  source 1..1149: mol_type = other DNA
atgtctgtgctgcggaggatgatgagggtgagcaacagaagcctgctggccttcatcttcttcttcagcctgagcagcagctgcctgtacttcatctacgtggcccctggcatcgccaacacctacctgttcatggtgcaggcccggggcatcatgctgagagaaaatgtgaagaccatcggccacatgatccggctgtacaccaacaagaacagcaccctgaatggaacagactacccagagggcaacaacagcagtgactacctggtgcagaccaccacctacctgcctgagaacttcacctacagcccctacctgccctgcccagagaagctgccctacatgaggggcttcctgaatgtgaatgtgtctgaggtgtcctttgatgagatccaccagctgttcagcaaggacctggacatcgagcccggcggccactggaggcccaaggactgcaagccccgctggaaggtggccgtgctgatccccttcaggaacagacatgagcacctgcccatcttcttcctgcacctgatccccatgctgcagaagcagaggctggagtttgccttctacgtgattgagcagacaggcacccagcccttcaacagagccatgctgttcaacgtgggcttcaaggaggccatgaaggacagcgtgtgggactgtgtgatcttccatgatgtggaccacctgcctgaaaatgacaggaactactacggctgtggggagatgcccaggcactttgctgccaagctggacaagtacatgtacatcctgccctacaaggagttcttcggcggcgtgtctggcctgactgtggagcagttcaggaagatcaatggcttccccaatgccttctggggctggggcggagaagatgatgacctgtggaacagagtgcactacgccggctacaacgtgaccaggcctgagggggacctgggcaagtacaagagcatcccccaccaccacagaggagaggtgcagttcctgggccgctacaagctgctgcgctacagcaaggagcggcagtacattgatggcctgaacaacctgatctaccggcccaagatcctggtggaccggctgtacaccaacatctctgtgaacctgatgcctgagctggcccccatcgaggactactag

SEQ ID NO: 175372 - DNA, 1032 bp, synthetic construct
  misc_feature 1..1032: note = Description of Artificial Sequence: Synthetic coding sequence
  source 1..1032: mol_type = other DNA
atgtctgtgctgcggaggatgatgagggtgagcaacagaagcctgctggccttcatcttcttcttcagcctgagcagcagctgcctgtacttcatctacgtggcccctggcatcgccaacacctacctgttcatggtgcaggcccggggcatcatgctgagagaaaatgtgaagaccatcggccacatgatccggctgtacaccaacaagaacagcaccctgaatggaacagactacccagagggcaacaacagcagtgactacctggtgcagaccaccacctacctgcctgagaacttcacctacagcccctacctgccctgcccagagaagctgccctacatgaggggcttcctgaatgtgaatgtgtctgaggtgtcctttgatgagatccaccagctgttcagcaaggacctggacatcgagcccggcggccactggaggcccaaggactgcaagccccgctggaagacaggcacccagcccttcaacagagccatgctgttcaacgtgggcttcaaggaggccatgaaggacagcgtgtgggactgtgtgatcttccatgatgtggaccacctgcctgaaaatgacaggaactactacggctgtggggagatgcccaggcactttgctgccaagctggacaagtacatgtacatcctgccctacaaggagttctttggaggagtgtctggcctgactgtggagcagttcaggaagatcaatggcttccccaatgccttctggggctggggcggggaggatgatgacctgtggaacagagtgcactacgccggctacaacgtgaccaggcctgagggggacctgggcaagtacaagagcatcccccaccaccacagaggagaggtgcagttcctgggccgctacaagctgctgcgctacagcaaggagcggcagtacattgatggcctgaacaacctgatctaccggcccaagatcctggtggaccggctgtacaccaacatctctgtgaacctgatgcctgagctggcccccatcgaggactactag

SEQ ID NO: 175373 - DNA, 1047 bp, synthetic construct
  misc_feature 1..1047: note = Description of Artificial Sequence: Synthetic coding sequence
  source 1..1047: mol_type = other DNA
atggccgagaaggtgctggtgactggaggagctggctacatcggcagccacacagtgctggagctgctggaggccggctacctgcctgtggtgattgacaacttccacaatgccttccggggcggcggcagcctgcctgagagcctgcggcgggtgcaggagctgaccggccgctctgtggagtttgaggagatggacatcctggaccagggcgccctgcagaggctcttcaagaagtacagcttcatggccgtcatccactttgctggcctgaaggctgtgggggagagcgtgcagaagcccctggactactacagagtgaacctgaccggcaccatccagctgctggagatcatgaaggcccacggcgtgaagaacctggtgttcagcagcagcgccaccgtgtatggcaacccccagtacctgcccctggatgaggcccaccccaccggcggctgcaccaacccctacggcaagagcaagttcttcatcgaggagatgatccgggacctgtgccaggccgacaagacctggaatgctgtgctgctgcgctacttcaaccccactggagcccacgccagcggctgcattggagaggacccccagggcatccccaacaacctgatgccctacgtgtcccaggtggccatcggcagaagagaggccctgaatgtgtttggaaatgactatgacacagaagatggcaccggggtgcgggactacatccacgtggtggacctggccaagggccacatcgccgccctgaggaagctgaaggagcagtgtggctgccgcatctacaacctgggcactggaacaggctacagcgtgctgcagatggtgcaggccatggagaaggccagcggcaagaagatcccctacaaggtggtggcccggcgggagggagatgtggccgcctgctacgccaaccccagcctggcccaggaggagctgggctggacagctgccctgggcctggacaggatgtgtgaggacctgtggcgctggcagaagcagaaccccagcggcttcggcacccaggcctag

SEQ ID NO: 175374 - DNA, 777 bp, synthetic construct
  misc_feature 1..777: note = Description of Artificial Sequence: Synthetic coding sequence
  source 1..777: mol_type = other DNA
atggacatcctggaccagggcgccctgcagaggctcttcaagaagtacagcttcatggccgtcatccactttgctggcctgaaggctgtgggggagagcgtgcagaagcccctggactactacagagtgaacctgaccggcaccatccagctgctggagatcatgaaggcccacggcgtgaagaacctggtgttcagcagcagcgccaccgtgtatggcaacccccagtacctgcccctggatgaggcccaccccaccggcggctgcaccaacccctacggcaagagcaagttcttcatcgaggagatgatccgggacctgtgccaggccgacaagacctggaatgctgtgctgctgcgctacttcaaccccactggagcccacgccagcggctgcattggagaggacccccagggcatccccaacaacctgatgccctacgtgtcccaggtggccatcggcagaagagaggccctgaatgtgtttggaaatgactatgacacagaagatggcaccggggtgcgggactacatccacgtggtggacctggccaagggccacatcgccgccctgaggaagctgaaggagcagtgtggctgccgcatcccctacaaggtggtggcccggcgggagggagatgtggccgcctgctacgccaaccccagcctggcccaggaggagctgggctggacagctgccctgggcctggacaggatgtgtgaggacctgtggcgctggcagaagcagaaccccagcggcttcggcacccaggcctag

SEQ ID NO: 175375 - DNA, 684 bp, synthetic construct
  misc_feature 1..684: note = Description of Artificial Sequence: Synthetic coding sequence
  source 1..684: mol_type = other DNA
atggacatcctggaccagggcgccctgcagaggctcttcaagaagtacagcttcatggccgtcatccactttgctggcctgaaggctgtgggggagagcgtgcagaagcccctggactactacagagtgaacctgaccggcaccatccagctgctggagatcatgaaggcccacggcgtgaagaacctggtgttcagcagcagcgccaccgtgtatggcaacccccagtacctgcccctggatgaggcccaccccaccggcggctgcaccaacccctacggcaagagcaagttcttcatcgaggagatgatccgggacctgtgccaggccgacaagacctggaatgctgtgctgctgcgctacttcaaccccactggagcccacgccagcggctgcattggagaggacccccagggcatccccaacaacctgatgccctacgtgtcccaggtggccatcggcagaagagaggccctgaatgtgtttggaaatgactatgacacagaagatggcaccggggtgcgggactacatccacgtggtggacctggccaagggccacatcgccgccctgaggaagctgaaggagcagtgtggctgccgcatctacaacctgggcactggaacaggctacagcgtgctgcagatggtgcaggccatggagaaggccagcggcaagaagtag

SEQ ID NO: 175376 - DNA, 588 bp, synthetic construct
  misc_feature 1..588: note = Description of Artificial Sequence: Synthetic coding sequence
  source 1..588: mol_type = other DNA
atggccgagaaggtgctggtgactggaggagctggctacatcggcagccacacagtgctggagctgctggaggccggctacctgcctgtggtgattgacaacttccacaatgccttccggggcggcggcagcctgcctgagagcctgcggcgggtgcaggagctgaccggccgctctgtggagtttgaggagatggacatcctggaccagggcgccctgcagaggctcttcaagaagtacagcttcatggccgtcatccactttgctggcctgaaggctgtgggggagagcgtgcagaagcccctggactactacagagtgaacctgaccggcaccatccagctgctggagatcatgaaggcccacggcgtgaagaacctggtgttcagcagcagcgccaccgtgtatggcaacccccagtacctgcccctggatgaggcccaccccaccggcggctgcaccaacccctacggcaagagcaagttcttcatcgaggagatgatccgggacctgtgccaggccgacaagacctggaatgctgtgctgctgcgctacttcaaccccactggagcccacgccagcggctag

SEQ ID NO: 175377 - DNA, 720 bp, synthetic construct
  misc_feature 1..720: note = Description of Artificial Sequence: Synthetic coding sequence
  source 1..720: mol_type = other DNA
atggacatcctggaccagggcgccctgcagaggctcttcaagaagtacagcttcatggccgtcatccactttgctggcctgaaggctgtgggggagagcgtgcagaagcccctggactactacagagtgaacctgaccggcaccatccagctgctggagatcatgaaggcccacggcgtgaagaacctggtgttcagcagcagcgccaccgtgtatggcaacccccagtacctgcccctggatgaggcccaccccaccggcggctgcaccaacccctacggcaagagcaagttcttcatcgaggagatgatccgggacctgtgccaggccgacaagacctggaatgctgtgctgctgcgctacttcaaccccactggagcccacgccagcggctgcattggagaggacccccagggcatccccaacaacctgatgccctacgtgtcccaggtggccatcggcagaagagaggccctgaatgtgtttggaaatgactatgacacagaagatggcaccggggtgcgggactacatccacgtggtggacctggccaagggccacatcgccgccctgaggaagctgaaggagcagtgtggctgccgcatcccctacaaggtggtggcccggcgggagggagatgtggccgcctgctacgccaaccccagcctggcccaggaggagctgggctggacagctgccctgggcctggacaggatgtag

SEQ ID NO: 175378 - DNA, 585 bp, synthetic construct
  misc_feature 1..585: note = Description of Artificial Sequence: Synthetic coding sequence
  source 1..585: mol_type = other DNA
atggccgagaaggtgctggtgactggaggagctggctacatcggcagccacacagtgctggagctgctggaggccggctacctgcctgtggtgattgacaacttccacaatgccttccggggcggcggcagcctgcctgagagcctgcggcgggtgcaggagctgaccggccgctctgtggagtttgaggagatggacatcctggaccagggcgccctgcagaggctcttcaagaagtacagcttcatggccgtcatccactttgctggcctgaaggctgtgggggagagcgtgcagaagcccctggactactacagagtgaacctgaccggcaccatccagctgctggagatcatgaaggcccacggcgtgaagaacctggtgttcagcagcagcgccaccgtgtatggcaacccccagtacctgcccctggatgaggcccaccccaccggcggctgcaccaacccctacggcaagagcaagttcttcatcgaggagatgatccgggacctgtgccaggccgacaagacctggaatgctgtgctgctgcgctacttcaaccccactggagcccacgccagctag

SEQ ID NO: 175379 - DNA, 327 bp, synthetic construct
  misc_feature 1..327: note = Description of Artificial Sequence: Synthetic coding sequence
  source 1..327: mol_type = other DNA
gtggccatcggcagaagagaggccctgaatgtgtttggaaatgactatgacacagaagatggcaccggggtgcgggactacatccacgtggtggacctggccaagggccacatcgccgccctgaggaagctgaaggagcagtgtggctgccgcatcccctacaaggtggtggcccggcgggagggagatgtggccgcctgctacgccaaccccagcctggcccaggaggagctgggctggacagctgccctgggcctggacaggatgtgtgaggacctgtggcgctggcagaagcagaaccccagcggcttcggcacccaggcctag

SEQ ID NO: 175380 - DNA, 1119 bp, synthetic construct
  misc_feature 1..1119: note = Description of Artificial Sequence: Synthetic coding sequence
  source 1..1119: mol_type = other DNA
atgaagtacctgcggcacagaagaccaaatgccaccctcatcctggccatcggggccttcaccctgctgctcttcagcctgctggtgtccccacccacctgcaaggtgcaggagcagcccccagccatccctgaggccctggcctggcccaccccacccaccaggcctgccccagccccctgccacgccaacacctccatggtgacccacccagactttgccacccagccccagcacgtgcagaacttcctgctgtaccgccactgccgccacttccccctgctgcaggatgtgccccccagcaaatgtgcccagcccgtcttcctgctgctggtgatcaagagcagccccagcaactacgtgcggcgggagctgctgcggaggacctggggccgggagaggaaggtgcggggcctgcagctgcggctgctcttcctggtgggcacagccagcaacccccatgaggccaggaaggtgaaccggctgctggagctggaggcccagacccacggggacatcctgcagtgggacttccatgacagcttcttcaacctgaccctgaagcaggtgctcttcctgcagtggcaggagacccgctgtgccaatgccagctttgtgctgaatggagatgatgatgtgtttgcccacacagacaacatggtgttctacctgcaggaccatgaccccggccgccacctgtttgtgggccagctgatccagaatgtgggccccatccgggccttctggagcaagtactacgtgcctgaggtggtgacccagaatgaaagatacccaccctactgcggcggcggcggcttcctgctgagccgcttcaccgctgctgccctgcggcgggccgcccacgtgctggacatcttccccattgatgatgtgttcctgggcatgtgcctggagctggagggcctgaagccagccagccacagcggcatccgcaccagcggcgtgcgggcccccagccagaggctgagcagctttgacccctgcttctacagagacctgctgctggtgcaccgcttcctgccctatgagatgctgctgatgtgggatgccctgaaccagcccaacctgacctgtggcaaccagacccagatctactag

SEQ ID NO: 175381 - DNA, 1137 bp, synthetic construct
  misc_feature 1..1137: note = Description of Artificial Sequence: Synthetic coding sequence
  source 1..1137: mol_type = other DNA
atgctgcccccccagcccagcgctgcccaccagggccggggcggccgcagcggcctgctgcccaagggccctgccatgctgtgccgcctgtgctggctggtgtcctacagcctggccgtgctgctgctgggctgcctgctcttcctgaggaaggccgccaagccagctggggaccccacagcccaccagcccttctgggccccacccacccccaggcacagccgctgcccccccaaccacacagtgagcagcgccagcctgagcctgcccagccgccacaggctcttcctgacctaccgccactgcaggaacttcagcatcctgctggagcccagcggctgcagcaaggacaccttcctgctgctggccatcaagagccagcccggccacgtggagaggagagctgccatccgcagcacctggggccgggtgggcggctgggcccggggccggcagctgaagctggtgttcctgctgggcgtggccggcagcgcccccccagcccagctgctggcctatgagagccgggagtttgatgacatcctgcagtgggacttcacagaggacttcttcaacctgaccctgaaggagctgcacctgcagcgctgggtggtggccgcctgcccccaggcccacttcatgctgaagggagatgatgatgtgtttgtgcacgtgcccaacgtgctggagttcctggatggctgggaccctgcccaggacctgctggtgggagatgtgatccggcaggccctgcccaacagaaacaccaaggtgaagtacttcatccccccatccatgtaccgggccacccactacccaccctatgctgggggcggcggctacgtgatgagccgggccaccgtgcggcggctgcaggccatcatggaggatgctgagctgttccccattgatgatgtgtttgtgggcatgtgcctgcggcggctgggcctgagccccatgcaccacgccggcttcaagaccttcggcatcagaagacccctggaccccctggacccctgcctgtaccggggcctgctgctggtgcaccggctgagccccctggagatgtggaccatgtgggccctggtgacagatgagggcctgaagtgtgccgccggccccatcccccagaggtag

SEQ ID NO: 175382 - DNA, 1062 bp, synthetic construct
  misc_feature 1..1062: note = Description of Artificial Sequence: Synthetic coding sequence
  source 1..1062: mol_type = other DNA
atgctgtgccgcctgtgctggctggtgtcctacagcctggccgtgctgctgctgggctgcctgctcttcctgaggaaggccgccaagccagctggggaccccacagcccaccagcccttctgggccccacccacccccaggcacagccgctgcccccccaaccacacagtgtcctctgccagcctgagcctgcccagccgccacaggctcttcctgacctaccgccactgcaggaacttcagcatcctgctggagcccagcggctgcagcaaggacaccttcctgctgctggccatcaagagccagcccggccacgtggagcggcgggccgccatccgcagcacctggggccgggtgggcggctgggcccggggccggcagctgaagctggtgttcctgctgggcgtggccggcagcgcccccccagcccagctgctggcctatgagagccgggagtttgatgacatcctgcagtgggacttcacagaggacttcttcaacctgaccctgaaggagctgcacctgcagcgctgggtggtggccgcctgcccccaggcccacttcatgctgaagggagatgatgatgtgtttgtgcacgtgcccaacgtgctggagttcctggatggctgggaccctgcccaggacctgctggtgggagatgtgatccggcaggccctgcccaacagaaacaccaaggtgaagtacttcatcccccccagcatgtaccgggccacccactacccaccctatgccggcggcggcggctacgtgatgagccgggccaccgtgcggcggctgcaggccatcatggaggatgctgagctgttccccattgatgatgtgtttgtgggcatgtgcctgcggcggctgggcctgagccccatgcaccacgccggcttcaagaccttcggcatccggcggcccctggaccccctggacccctgcctgtaccggggcctgctgctggtgcaccggctgagccccctggagatgtggaccatgtgggccctggtgacagatgagggcctgaagtgtgccgccggccccatcccccagaggtag

SEQ ID NO: 175383 - DNA, 1062 bp, synthetic construct; identical to SEQ ID NO: 175382
  misc_feature 1..1062: note = Description of Artificial Sequence: Synthetic coding sequence
  source 1..1062: mol_type = other DNA

SEQ ID NO: 175384 - DNA, 1485 bp, synthetic construct
  misc_feature 1..1485: note = Description of Artificial Sequence: Synthetic coding sequence
  source 1..1485: mol_type = other DNA
atgtttgagatcaagaagatctgctgcatcggggccggctacgtgggcggccccacctgcagcgtgattgcccacatgtgcccagagatccgggtgacagtggtggatgtgaatgaaagccgcatcaatgcctggaacagccccaccctgcccatctatgagcccggcctgaaggaggtggtggagagctgccggggcaagaacctcttcttcagcaccaacattgatgatgccatcaaggaggccgacctggtgttcatctctgtgaacacccccaccaagacctacggcatgggcaagggccgggctgctgacctgaagtacatcgaggcctgtgcccggcgcatcgtgcagaacagcaatggctacaagatcgtgacagagaagagcacagtgcctgtgcgggctgctgagagcatccgccgcatctttgatgccaacaccaagcccaacctgaacctgcaggtgctgagcaaccctgagttcctggccgagggcacagccatcaaggacctgaagaacccagacagagtgctgattggaggagatgagaccccagagggccagagagctgtgcaggccctgtgtgctgtgtatgagcactgggtgccccgggagaagatcctgaccaccaacacctggagcagcgagctgagcaagctggccgccaatgccttcctggcccagaggatcagcagcatcaacagcatcagcgccctgtgtgaggccaccggggctgatgtggaggaggtggccacagccatcggcatggaccagagaattggcaacaagttcctgaaggcctctgtgggctttggaggcagctgcttccagaaggatgtgctgaacctggtgtacctgtgtgaggccctgaacctgcctgaggtggcccgctactggcagcaggtgattgacatgaatgactaccagaggagaagatttgccagccgcatcatcgacagcctcttcaacacagtgacagacaagaagatcgccatcctgggctttgccttcaagaaggacaccggggacacccgggagagcagcagcatctacatcagcaagtacctgatggatgaaggagcccacctgcacatctatgaccccaaggtgccccgggagcagatcgtggtggacctgagccaccctggggtgtctgaagatgaccaggtgtcccggctggtgaccatcagcaaggacccctatgaggcctgtgatggagcccatgctgtggtgatctgcacagagtgggacatgttcaaggagctggactatgagcgcatccacaagaagatgctgaagccagccttcatctttgatggccggcgggtgctggatggcctgcacaatgagctgcagaccatcggcttccagatcgagaccatcggcaagaaggtgagcagcaagaggatcccctatgcccccagcggggagatccccaagttcagcctgcaggacccccccaacaagaagcccaaggtgtag

SEQ ID NO: 175385 - DNA, 1284 bp, synthetic construct
  misc_feature 1..1284: note = Description of Artificial Sequence: Synthetic coding sequence
  source 1..1284: mol_type = other DNA
atgtttgagatcaagaagatctgctgcatcggggccggctacgtgggcggccccacctgcagcgtgattgcccacatgtgcccagagatccgggtgacagtggtggatgtgaatgaaagccgcatcaatgcctggaacagccccaccctgcccatctatgagcccggcctgaaggaggtggtggagagctgccggggcaagaacctcttcttcagcaccaacattgatgatgccatcaaggaggccgacctggtgttcatctctgtgctgagcaaccctgagttcctggccgagggcacagccatcaaggacctgaagaacccagacagagtgctgattggaggagatgagaccccagagggccagagagctgtgcaggccctgtgtgctgtgtatgagcactgggtgccccgggagaagatcctgaccaccaacacctggagcagcgagctgagcaagctggccgccaatgccttcctggcccagaggatcagcagcatcaacagcatcagcgccctgtgtgaggccactggagcagatgtggaggaggtggccacagccatcggcatggaccagagaattggcaacaagttcctgaaggcctctgtgggctttggaggcagctgcttccagaaggatgtgctgaacctggtgtacctgtgtgaggccctgaacctgcctgaggtggcccgctactggcagcaggtgattgacatgaatgactaccagaggagaagatttgccagccgcatcatcgacagcctcttcaacacagtgacagacaagaagatcgccatcctgggctttgccttcaagaaggacacaggagacacccgggagagcagcagcatctacatcagcaagtacctgatggatgagggcgcccacctgcacatctatgaccccaaggtgccccgggagcagatcgtggtggacctgagccaccctggggtgtctgaagatgaccaggtgtcccggctggtgaccatcagcaaggacccctatgaggcctgtgatggagcccatgctgtggtgatctgcacagagtgggacatgttcaaggagctggactatgaaagaatccacaagaagatgctgaagccagccttcatctttgatggaagaagagtgctggatggcctgcacaatgagctgcagaccatcggcttccagatcgagaccatcggcaagaaggtgagcagcaagaggatcccctatgcccccagcggggagatccccaagttcagcctgcaggacccccccaacaagaagcccaaggtgtag

SEQ ID NO: 175386 - DNA, 168 bp, synthetic construct
  misc_feature 1..168: note = Description of Artificial Sequence: Synthetic coding sequence
  source 1..168: mol_type = other DNA
atgtttgagatcaagaagatctgctgcatcggggccggctacgtgggcggccccacctgcagcgtgattgcccacatgtgcccagagatccgggtgacagtggtggatgtgaatgaaagccgcatcaatgcctggaacagccccaccctgcccatctatgaggactag

SEQ ID NO: 175387 - DNA, 258 bp, synthetic construct
  misc_feature 1..258: note = Description of Artificial Sequence: Synthetic coding sequence
  source 1..258: mol_type = other DNA
atgtttgagatcaagaagatctgctgcatcggggccggctacgtgggcggccccacctgcagcgtgattgcccacatgtgcccagagatccgggtgacagtggtggatgtgaatgaaagccgcatcaatgcctggaacagccccaccctgcccatctatgagcccggcctgaaggaggtggtggagagctgccggggcaagaacctcttcttcagcaccaacattgatgatgccatcaaggaggccgacctggtgtag

SEQ ID NO: 175388 - DNA, 1485 bp, synthetic construct; identical to SEQ ID NO: 175384
  misc_feature 1..1485: note = Description of Artificial Sequence: Synthetic coding sequence
  source 1..1485: mol_type = other DNA

SEQ ID NO: 175389 - DNA, 1194 bp, synthetic construct
  misc_feature 1..1194: note = Description of Artificial Sequence: Synthetic coding sequence
  source 1..1194: mol_type = other DNA
atgggcaagggccgggctgctgacctgaagtacatcgaggcctgtgccaggagaattgtgcagaacagcaatggctacaagatcgtgacagagaagagcacagtgcctgtgcgggctgctgagagcatccgccgcatctttgatgccaacaccaagcccaacctgaacctgcaggtgctgagcaaccctgagttcctggccgagggcacagccatcaaggacctgaagaacccagacagagtgctgattggaggagatgagaccccagagggccagagagctgtgcaggccctgtgtgctgtgtatgagcactgggtgccccgggagaagatcctgaccaccaacacctggagcagcgagctgagcaagctggccgccaatgccttcctggcccagaggatcagcagcatcaacagcatcagcgccctgtgtgaggccactggagcagatgtggaggaggtggccacagccatcggcatggaccagagaattggcaacaagttcctgaaggcctctgtgggctttggaggcagctgcttccagaaggatgtgctgaacctggtgtacctgtgtgaggccctgaacctgcctgaggtggcccgctactggcagcaggtgattgacatgaatgactaccagaggagaagatttgccagccgcatcatcgacagcctcttcaacacagtgacagacaagaagatcgccatcctgggctttgccttcaagaaggacacaggagacacccgggagagcagcagcatctacatcagcaagtacctgatggatgagggcgcccacctgcacatctatgaccccaaggtgccccgggagcagatcgtggtggacctgagccaccctggggtgtctgaagatgaccaggtgtcccggctggtgaccatcagcaaggacccctatgaggcctgtgatggagcccatgctgtggtgatctgcacagagtgggacatgttcaaggagctggactatgaaagaatccacaagaagatgctgaagccagccttcatctttgatggaagaagagtgctggatggcctgcacaatgagctgcagaccatcggcttccagatcgagaccatcggcaagaaggtgagcagcaagaggatcccctatgcccccagcggggagatccccaagttcagcctgcaggacccccccaacaagaagcccaaggtgtag

SEQ ID NO: 175390 - DNA, 393 bp, synthetic construct
  misc_feature 1..393: note = Description of Artificial Sequence: Synthetic coding sequence
  source 1..393: mol_type = other DNA
atgtttgagatcaagaagatctgctgcatcggggccggctacgtgggcggccccacctgcagcgtgattgcccacatgtgcccagagatccgggtgacagtggtggatgtgaatgaaagccgcatcaatgcctggaacagccccaccctgcccatctatgagcccggcctgaaggaggtggtggagagctgccggggcaagaacctcttcttcagcaccaacattgatgatgccatcaaggaggccgacctggtgttcatctctgtgaacacccccaccaagacctacggcatgggcaagggccgggctgctgacctgaagtacatcgaggcctgtgcccggcgcatcgtgcagaacagcaatggctacaagatcgtgacagagaagagctag

SEQ ID NO: 175391 - DNA, 162 bp, synthetic construct
  misc_feature 1..162: note = Description of Artificial Sequence: Synthetic coding sequence
  source 1..162: mol_type = other DNA
atgtttgagatcaagaagatctgctgcatcggggccggctacgtgggcggccccacctgcagcgtgattgcccacatgtgcccagagatccgggtgacagtggtggatgtgaatgaaagccgcatcaatgcctggaacagccccaccctgcccatctactag

SEQ ID NO: 175392 - DNA, 168 bp, synthetic construct; identical to SEQ ID NO: 175386
  misc_feature 1..168: note = Description of Artificial Sequence: Synthetic coding sequence
  source 1..168: mol_type = other DNA

SEQ ID NO: 175393 - DNA, 462 bp, synthetic construct
  misc_feature 1..462: note = Description of Artificial Sequence: Synthetic coding sequence
  source 1..462: mol_type = other DNA
atgtttgagatcaagaagatctgctgcatcggggccggctacgtgggcggccccacctgcagcgtgattgcccacatgtgcccagagatccgggtgacagtggtggatgtgaatgaaagccgcatcaatgcctggaacagccccaccctgcccatctatgagcccggcctgaaggaggtggtggagagctgccggggcaagaacctcttcttcagcaccaacattgatgatgccatcaaggaggccgacctggtgttcatctctgtgaacacccccaccaagacctacggcatgggcaagggccgggctgctgacctgaagtacatcgaggcctgtgcccggcgcatcgtgcagaacagcaatggctacaagatcgtgacagagaagagcacagtgcctgtgcgggctgctgagagcatccgccgcatctttgatgccaacaccaagcccaacctgaactag

SEQ ID NO: 175394 - DNA, 546 bp, synthetic construct
  misc_feature 1..546: note = Description of Artificial Sequence: Synthetic coding sequence
  source 1..546: mol_type = other DNA
atgtggagcagcggcctgctgatccaggacagcaccatcatgtttgagatcaagaagatctgctgcattggagctggctacgtgggcggccccacctgcagcgtcatcgcccacatgtgcccagagatccgggtgacagtggtggatgtgaatgaaagccgcatcaatgcctggaacagccccaccctgcccatctatgagcccggcctgaaggaggtggtggagagctgccggggcaagaacctcttcttcagcaccaacattgatgatgccatcaaggaggccgacctggtgttcatctctgtgaacacccccaccaagacctacggcatgggcaagggccgggctgctgacctgaagtacatcgaggcctgtgccaggagaattgtgcagaacagcaatggctacaagatcgtgacagagaagagcacagtgcctgtgcgggctgctgagagcatccgccgcatctttgatgccaacaccaagcccaacctgaacctgcaggtgctgagcaaccctgagttcctggccgagggcacagcctag

SEQ ID NO: 175395 - DNA, 1185 bp, synthetic construct
  misc_feature 1..1185: note = Description of Artificial Sequence: Synthetic coding sequence
  source 1..1185: mol_type = other DNA
atggccctgctggacctggccctggagggcatggctgtgtttggatttgtgctcttcctggtgctgtggctgatgcacttcatggccatcatctacacccggctgcacctgaacaagaaggccacagacaagcagccctacagcaagctgcccggggtgtccctgctgaagcccctgaagggcgtggaccccaacctgatcaacaacctggagaccttctttgagctggactaccccaagtatgaggtgctgctgtgtgtgcaggaccatgatgatcctgccattgatgtgtgcaagaagctgctgggcaagtacccaaatgtggatgcccggctcttcatcggcggcaagaaggtgggcatcaaccccaagatcaacaacctgatgcctggctatgaggtggccaagtatgacctgatctggatctgtgacagcggcatccgggtcatcccagacaccctgacagacatggtgaaccagatgacagagaaggtgggcctggtgcacggcctgccctacgtggccgaccggcagggctttgctgccaccctggagcaggtgtacttcggcaccagccacccccgctactacatcagcgccaacgtgacaggcttcaagtgtgtgacaggcatgagctgcctgatgaggaaggatgtgctggaccaggccggcggcctgattgcctttgcccagtacatcgccgaggactacttcatggccaaggccatcgctgaccggggctggaggtttgccatgagcacccaggtggccatgcagaacagcggcagctacagcatcagccagttccagagcaggatgatccgctggaccaagctgcgcatcaacatgctgcctgccaccatcatctgtgagcccatcagtgaatgttttgtggccagcctcatcatcggctgggccgcccaccacgtgttccgctgggacatcatggtgttcttcatgtgccactgcctggcctggttcatctttgactacatccagctgcggggcgtgcagggcggcaccctgtgcttcagcaagctggactatgctgtggcctggttcatccgggagagcatgaccatctacatcttcctgagcgccctgtgggaccccaccatctcctggaggacaggccgctaccgcctgcgctgtggcggcacagctgaggagatcctggatgtgtag

SEQ ID NO: 175396 - DNA, 4668 bp, synthetic construct
  misc_feature 1..4668: note = Description of Artificial Sequence: Synthetic coding sequence
  source 1..4668: mol_type = other DNA
atgggctgcaagggagatgccagcggggcctgtgccgccggggccctgcctgtgactggagtgtgctacaagatgggcgtgctggtggtgctgactgtgctgtggctgttcagctctgtgaaggctgacagcaaggccatcaccaccagcctgaccaccaagtggttcagcacccccctgctgctggaggccagcgagttcctggccgaggacagccaggagaagttctggaactttgtggaggccagccagaacatcggcagcagtgaccatgatggaacagactacagctactaccacgccatcctggaggccgccttccagttcctgagccccctgcagcagaacctcttcaagttctgcctgagcctgcggagctacagcgccaccatccaggccttccagcagattgctgctgatgagcccccacctgagggctgcaacagcttcttctctgtgcacggcaagaagacctgtgagagtgacaccctggaggccctgctgctgacagccagcgagcggcccaagcccctgctcttcaagggggaccaccgctaccccagcagcaaccctgagagccctgtggtgatcttctacagcgagatcggcagcgaggagttcagcaacttccaccggcagctgatcagcaagagcaatgctgggaagatcaactacgtgttccgccactacatcttcaaccccaggaaggagcctgtgtacctgagcggctacggcgtggagctggccatcaagagcacagagtacaaggccaaggatgacacccaggtgaagggcacagaggtgaacaccaccgtgattggagaaaatgaccccattgatgaggtgcagggcttcctgtttgggaagctgcgggacctgcacccagacctggagggccagctgaaggagctgaggaagcacctggtggagagcaccaatgagatggcccccctgaaggtgtggcagctgcaggacctgtccttccagacagctgcccgcatcctggccagccctgtggagctggccctggtggtgatgaaggacctgagccagaacttccccaccaaggcccgggccatcaccaagacagctgtgtcctctgagctgaggacagaggtggaggagaaccagaagtacttcaagggcaccctgggcctgcagcccggggacagcgccctcttcatcaatggcctgcacatggacctggacacccaggacatcttcagcctgtttgatgtgctgagaaatgaggcccgggtgatggagggcctgcaccggctgggcatcgagggcctgagcctgcacaacgtgctgaagctgaacatccagcccagcgaggccgactatgctgtggacatccgcagccctgccatctcctgggtgaacaacctggaggtggacagccgctacaacagctggcccagcagcctgcaggagctgctgcggcccaccttccctggggtcatccggcagatcaggaagaacctgcacaacatggtgttcatcgtggaccctgcccacgagaccacagctgagctgatgaacacagctgagatgttcctgagcaaccacatccccctgagaattggcttcatctttgtggtgaatgacagtgaagatgtggatggcatgcaggatgctggggtggccgtgctgcgggcctacaactacgtggcccaggaggtggatgactaccacgccttccagaccctgacccacatctacaacaaggtgaggactggagagaaggtgaaggtggagcacgtggtgtctgtgctggagaagaagtacccctacgtggaggtgaacagcatcctgggcatcgacagcgcctatgacaggaacaggaaggaggcccggggctactatgagcagacaggagtgggccccctgcctgtggtgctcttcaacggcatgccctttgagcgggagcagctggaccctgatgagctggagaccatcaccatgcacaagatcctggagaccaccaccttcttccagagagctgtgtacctgggggagctgccccatgaccaggatgtggtggagtacatcatgaaccagcccaacgtggtgccccgcatcaacagccgcatcctgacagctgagcgggactacctggacctgacagccagcaacaacttctttgtggatgattatgcccgcttcaccatcctggacagccagggcaagacagctgctgtggccaacagcatgaactacctgaccaagaagggcatgagcagcaaggagatctatgatgacagcttcatccggcctgtgaccttctggatcgtgggggactttgacagccccagcggccggcagctgctgtatgatgccatcaagcaccagaagagcagcaacaacgtgcgcatctccatgatcaacaacccagccaaggagatctcctatgagaacacccagatcagccgggccatctgggccgccctgcagacccagaccagcaatgctgccaagaacttcatcaccaagatggccaaggagggcgctgctgaggccctggccgccggggctgacattgctgagttctctgtgggcggcatggacttcagcctcttcaaggaggtgtttgagagcagcaagatggacttcatcctgagccatgctgtgtactgcagagatgtgctgaagctgaagaagggccagagagctgtgatcagcaatggccgcatcatcggccccctggaggacagcgagctgttcaaccaggatgacttccacctgctggagaacatcatcctgaagaccagcggccagaagatcaagagccacatccagcagctgcgggtggaggaggatgtggccagtgacctggtgatgaaggtggatgccctgctgagcgcccagcccaagggggacccccgcatcgagtaccagttctttgaggacagacacagcgccatcaagctgcggcccaaggagggggagacctactttgatgtggtggccgtggtggaccctgtgacccgggaggcccagaggctggcccccctgctgctggtgctggcccagctgatcaacatgaacctgcgggtcttcatgaactgccagagcaagctgagtgacatgcccctgaagagcttctaccgctacgtgctggagcctgagatctccttcaccagtgacaacagctttgccaagggccccatcgccaagttcctggacatgccccagagccccctcttcaccctgaacctgaacaccccagagagctggatggtggagagcgtgaggaccccctatgacctggacaacatctacctggaggaggtggacagcgtggtggccgcagaatatgagctggagtacctgctgctggagggccactgctatgacatcaccaccggccagcccccccggggcctgcagttcaccctgggcaccagcgccaaccctgtgattgtggacaccatcgtgatggccaacctgggctacttccagctgaaggccaaccctggggcctggatcctgcggctgaggaagggccgctctgaggacatctaccgcatctacagccatgatggaacagacagccccccagatgctgatgaggtggtgattgtgctgaacaacttcaagagcaagatcatcaaggtgaaggtgcagaagaaggctgacatggtgaatgaagacctgctgagtgatggcaccagtgaaaatgaaagtggcttctgggacagcttcaagtggggcttcaccggccagaagacagaggaggtgaagcaggacaaggatgacatcatcaacatcttctctgtggccagcggccacctgtatgagcgcttcctgcgcatcatgatgctgtctgtgctgaagaacaccaagacccctgtgaagttctggttcctgaagaactacctgagccccaccttcaaggagttcatcccctacatggccaatgagtacaacttccagtatgagctggtgcagtacaagtggccccgctggctgcaccagcagacagagaagcagaggatcatctggggctacaagatcctcttcctggatgtgctcttccccctggtggtggacaagttcctgtttgtggatgctgaccagatcgtgaggacagacctgaaggagctgcgggacttcaacctggatggagccccctacggctacacccccttctgtgacagcagaagagagatggatggctaccgcttctggaagagcggctactgggccagccacctggccggcaggaagtaccacatcagcgccctgtatgtggtggacctgaagaagttcaggaagattgctgctggggaccggctgcggggccagtaccagggcctgagccaggaccccaacagcctgagcaacctggaccaggacctgcccaacaacatgatccaccaggtgcccatcaagagcctgccccaggagtggctgtggtgtgagacctggtgtgatgatgccagcaagaagagggccaagaccatcgacctgtgcaacaaccccatgaccaaggagcccaagctggaggccgctgtgagaattgtgcctgagtggcaggactatgaccaggagatcaagcagctgcagatccgcttccagaaggagaaggagactggagccctgtacaaggagaagaccaaggagcccagccgggagggcccccagaagcgggaggagctgtag

SEQ ID NO: 175397 - DNA, 4596 bp, synthetic construct
  misc_feature 1..4596: note = Description of Artificial Sequence: Synthetic coding sequence
  source 1..4596: mol_type = other DNA
atgggcgtgctggtggtgctgactgtgctgtggctgttcagctctgtgaaggctgacagcaaggccatcaccaccagcctgaccaccaagtggttcagcacccccctgctgctggaggccagcgagttcctggccgaggacagccaggagaagttctggaactttgtggaggccagccagaacatcggcagcagtgaccatgatggaacagactacagctactaccacgccatcctggaggccgccttccagttcctgagccccctgcagcagaacctcttcaagttctgcctgagcctgcggagctacagcgccaccatccaggccttccagcagattgctgctgatgagcccccacctgagggctgcaacagcttcttctctgtgcacggcaagaagacctgtgagagtgacaccctggaggccctgctgctgacagccagcgagcggcccaagcccctgctcttcaagggggaccaccgctaccccagcagcaaccctgagagccctgtggtgatcttctacagcgagatcggcagcgaggagttcagcaacttccaccggcagctgatcagcaagagcaatgctgggaagatcaactacgtgttccgccactacatcttcaaccccaggaaggagcctgtgtacctgagcggctacggcgtggagctggccatcaagagcacagagtacaaggccaaggatgacacccaggtgaagggcacagaggtgaacaccaccgtgattggagaaaatgaccccattgatgaggtgcagggcttcctgtttgggaagctgcgggacctgcacccagacctggagggccagctgaaggagctgaggaagcacctggtggagagcaccaatgagatggcccccctgaaggtgtggcagctgcaggacctgtccttccagacagctgcccgcatcctggccagccctgtggagctggccctggtggtgatgaaggacctgagccagaacttccccaccaaggcccgggccatcaccaagacagctgtgtcctctgagctgaggacagaggtggaggagaaccagaagtacttcaagggcaccctgggcctgcagcccggggacagcgccctcttcatcaatggcctgcacatggacctggacacccaggacatcttcagcctgtttgatgtgctgagaaatgaggcccgggtgatggagggcctgcaccggctgggcatcgagggcctgagcctgcacaacgtgctgaagctgaacatccagcccagcgaggccgactatgctgtggacatccgcagccctgccatctcctgggtgaacaacctggaggtggacagccgctacaacagctggcccagcagcctgcaggagctgctgcggcccaccttccctggggtcatccggcagatcaggaagaacctgcacaacatggtgttcatcgtggaccctgcccacgagaccacagctgagctgatgaacacagctgagatgttcctgagcaaccacatccccctgagaattggcttcatctttgtggtgaatgacagtgaagatgtggatggcatgcaggatgctggggtggccgtgctgcgggcctacaactacgtggcccaggaggtggatgactaccacgccttccagaccctgacccacatctacaacaaggtgaggactggagagaaggtgaaggtggagcacgtggtgtctgtgctggagaagaagtacccctacgtggaggtgaacagcatcctgggcatcgacagcgcctatgacaggaacaggaaggaggcccggggctactatgagcagacaggagtgggccccctgcctgtggtgctcttcaacggcatgccctttgagcgggagcagctggaccctgatgagctggagaccatcaccatgcacaagatcctggagaccaccaccttcttccagagagctgtgtacctgggggagctgccccatgaccaggatgtggtggagtacatcatgaaccagcccaacgtggtgccccgcatcaacagccgcatcctgacagctgagcgggactacctggacctgacagccagcaacaacttctttgtggatgattatgcccgcttcaccatcctggacagccagggcaagacagctgctgtggccaacagcatgaactacctgaccaagaagggcatgagcagcaaggagatctatgatgacagcttcatccggcctgtgaccttctggatcgtgggggactttgacagccccagcggccggcagctgctgtatgatgccatcaagcaccagaagagcagcaacaacgtgcgcatctccatgatcaacaacccagccaaggagatctcctatgagaacacccagatcagccgggccatctgggccgccctgcagacccagaccagcaatgctgccaagaacttcatcaccaagatggccaaggagggcgctgctgaggccctggccgccggggctgacattgctgagttctctgtgggcggcatggacttcagcctcttcaaggaggtgtttgagagcagcaagatggacttcatcctgagccatgctgtgtactgcagagatgtgctgaagctgaagaagggccagagagctgtgatcagcaatggccgcatcatcggccccctggaggacagcgagctgttcaaccaggatgacttccacctgctggagaacatcatcctgaagaccagcggccagaagatcaagagccacatccagcagctgcgggtggaggaggatgtggccagtgacctggtgatgaaggtggatgccctgctgagcgcccagcccaagggggacccccgcatcgagtaccagttctttgaggacagacacagcgccatcaagctgcggcccaaggagggggagacctactttgatgtggtggccgtggtggaccctgtgacccgggaggcccagaggctggcccccctgctgctggtgctggcccagctgatcaacatgaacctgcgggtcttcatgaactgccagagcaagctgagtgacatgcccctgaagagcttctaccgctacgtgctggagcctgagatctccttcaccagtgacaacagctttgccaagggccccatcgccaagttcctggacatgccccagagccccctcttcaccctgaacctgaacaccccagagagctggatggtggagagcgtgaggaccccctatgacctggacaacatctacctggaggaggtggacagcgtggtggccgcagaatatgagctggagtacctgctgctggagggccactgctatgacatcaccaccggccagcccccccggggcctgcagttcaccctgggcaccagcgccaaccctgtgattgtggacaccatcgtgatggccaacctgggctacttccagctgaaggccaaccctggggcctggatcctgcggctgaggaagggccgctctgaggacatctaccgcatctacagccatgatggaacagacagccccccagatgctgatgaggtggtgattgtgctgaacaacttcaagagcaagatcatcaaggtgaaggtgcagaagaaggctgacatggtgaatgaagacctgctgagtgatggcaccagtgaaaatgaaagtggcttctgggacagcttcaagtggggcttcaccggccagaagacagaggaggtgaagcaggacaaggatgacatcatcaacatcttctctgtggccagcggccacctgtatgagcgcttcctgcgcatcatgatgctgtctgtgctgaagaacaccaagacccctgtgaagttctggttcctgaagaactacctgagccccaccttcaaggagttcatcccctacatggccaatgagtacaacttccagtatgagctggtgcagtacaagtggccccgctggctgcaccagcagacagagaagcagaggatcatctggggctacaagatcctcttcctggatgtgctcttccccctggtggtggacaagttcctgtttgtggatgctgaccagatcgtgaggacagacctgaaggagctgcgggacttcaacctggatggagccccctacggctacacccccttctgtgacagcagaagagagatggatggctaccgcttctggaagagcggctactgggccagccacctggccggcaggaagtaccacatcagcgccctgtatgtggtggacctgaagaagttcaggaagattgctgctggggaccggctgcggggccagtaccagggcctgagccaggaccccaacagcctgagcaacctggaccaggacctgcccaacaacatgatccaccaggtgcccatcaagagcctgccccaggagtggctgtggtgtgagacctggtgtgatgatgccagcaagaagagggccaagaccatcgacctgtgcaacaaccccatgaccaaggagcccaagctggaggccgctgtgagaattgtgcctgagtggcaggactatgaccaggagatcaagcagctgcagatccgcttccagaaggagaaggagactggagccctgtacaaggagaagaccaaggagcccagccgggagggcccccagaagcgggaggagctgtag

SEQ ID NO: 175398 - DNA, 843 bp, synthetic construct
  misc_feature 1..843: note = Description of Artificial Sequence: Synthetic coding sequence
  source 1..843: mol_type = other DNA
atggccccagccaaggccaccaacgtggtgcggctgctgctgggcagcacagccctgtggctgagccagctgggcagcggcaccgtggccgccagcaagtctgtgacagcccacctggccgccaagtggccagagacccccctgctgctggaggccagcgagttcatggccgaggagagcaatgagaagttctggcagttcctggagaccgtgcaggagctggccatctacaagcagacagaaagtgactacagctactacaacctgatcctgaagaaggccggccagttcctggacaacctgcacatcaacctgctgaagtttgccttcagcatccgggcctacagccctgccatccagatgttccagcagattgctgctgatgagcccccaccagatggctgcaatgcctttgtggtgatccacaagaagcacacctgcaagatcaatgagatcaagaagctgctgaagaaggccgccagcaggacccggccctacctgttcaagggggaccacaagttccccaccaacaaggagaacctgcctgtggtgatcctgtatgcagagatgggcaccaggaccttcagcgccttccacaaggtgctgtctgagaaggcccagaatgaggagatcctgtatgtgctgcggcactacatccagaagcccagcagcaggaagatgtacctgagcggctacggcgtggagctggccatcaagagcacagagtacaaggccctggatgacacccaggtgaagacagtgaccaacaccaccgtggaggatgaaacagagaccaatgaggtgcagggcttcctgtttgggaagctgaagctggtgtactag

SEQ ID NO: 175399 - DNA, 837 bp, synthetic construct
  misc_feature 1..837: note = Description of Artificial Sequence: Synthetic coding sequence
  source 1..837: mol_type = other DNA
atggccccagccaaggccaccaacgtggtgcggctgctgctgggcagcacagccctgtggctgagccagctgggcagcggcaccgtggccgccagcaagtctgtgacagcccacctggccgccaagtggccagagacccccctgctgctggaggccagcgagttcatggccgaggagagcaatgagaagttctggcagttcctggagaccgtgcaggagctggccatctacaagcagacagaaagtgactacagctactacaacctgatcctgaagaaggccggccagttcctggacaacctgcacatcaacctgctgaagtttgccttcagcatccgggcctacagccctgccatccagatgttccagcagattgctgctgatgagcccccaccagatggctgcaatgcctttgtggtgatccacaagaagcacacctgcaagatcaatgagatcaagaagctgctgaagaaggccgccagcaggacccggccctacctgttcaagggggaccacaagttccccaccaacaaggagaacctgcctgtggtgatcctgtatgcagagatgggcaccaggaccttcagcgccttccacaaggtgctgtctgagaaggcccagaatgaggagatcctgtatgtgctgcggcactacatccagaagcccagcagcaggaagatgtacctgagcggctacggcgtggagctggccatcaagagcacagagtacaaggccctggatgacacccaggtgaagacagtgaccaacaccaccgtggaggatgaaacagagaccaatgaggtgcagggcttcctgtttgggaagctgaagagctag

SEQ ID NO: 175400 - DNA, 786 bp, synthetic construct
  misc_feature 1..786: note = Description of Artificial Sequence: Synthetic coding sequence
  source 1..786: mol_type = other DNA
atggccccagccaaggccaccaacgtggtgcggctgctgctgggcagcacagccctgtggctgagccagctgggcagcggcaccgtggccgccagcaagtctgtgacagcccacctggccgccaagtggccagagacccccctgctgctggaggccagcgagttcatggccgaggagagcaatgagaagttctggcagttcctggagaccgtgcaggagctggccatctacaagcagacagaaagtgactacagctactacaacctgatcctgaagaaggccggccagttcctggacaacctgcacatcaacctgctgaagtttgccttcagcatccgggcctacagccctgccatccagatgttccagcagattgctgctgatgagcccccaccagatggctgcaatgcctttgtggtgatccacaagaagcacacctgcaagatcaatgagatcaagaagctgctgaagaaggccgccagcaggacccggccctacctgttcaagggggaccacaagttccccaccaacaaggagaacctgcctgtggtgatcctgtatgcagagatgggcaccaggaccttcagcgccttccacaaggtgctgtctgagaaggcccagaatgaggagatcctgtatgtgctgcggcactacatccagaagcccagcagcaggaagatgtacctgagcggctacggcgtggagctggccatcaagagcacagagtacaaggccctggatgacacccaggtgaaggtgttccaggaccctgaggccttcttctag

SEQ ID NO: 175401 - DNA, 4551 bp, synthetic construct
  misc_feature 1..4551: note = Description of Artificial Sequence: Synthetic coding sequence
  source 1..4551: mol_type = other DNA
atggccccagccaaggccaccaacgtggtgcggctgctgctgggcagcacagccctgtggctgagccagctgggcagcggcaccgtggccgccagcaagtctgtgacagcccacctggccgccaagtggccagagacccccctgctgctggaggccagcgagttcatggccgaggagagcaatgagaagttctggcagttcctggagaccgtgcaggagctggccatctacaagcagacagaaagtgactacagctactacaacctgatcctgaagaaggccggccagttcctggacaacctgcacatcaacctgctgaagtttgccttcagcatccgggcctacagccctgccatccagatgttccagcagattgctgctgatgagcccccaccagatggctgcaatgcctttgtggtgatccacaagaagcacacctgcaagatcaatgagatcaagaagctgctgaagaaggccgccagcaggacccggccctacctgttcaagggggaccacaagttccccaccaacaaggagaacctgcctgtggtgatcctgtatgcagagatgggcaccaggaccttcagcgccttccacaaggtgctgtctgagaaggcccagaatgaggagatcctgtatgtgctgcggcactacatccagaagcccagcagcaggaagatgtacctgagcggctacggcgtggagctggccatcaagagcacagagtacaaggccctggatgacacccaggtgaagacagtgaccaacaccaccgtggaggatgaaacagagaccaatgaggtgcagggcttcctgtttgggaagctgaaggagatctacagcgacctgcgggacaacctgacagccttccagaagtacctgattgagagcaacaagcagatgatgcccctgaaggtgtgggagctgcaggacctgtccttccaggccgccagccagatcatgtctgcccctgtgtatgacagcatcaagctgatgaaggacatcagccagaacttccccatcaaggcccggagcctgaccagaattgctgtgaaccagcacatgagggaggagatcaaggagaaccagaaggacctgcaggtgcgcttcaagatccagcctggagatgcccggctcttcatcaatggcctgcgggtggacatggatgtgtatgatgccttcagcatcctggacatgctgaagctggagggcaagatgatgaatggcctgaggaacctgggcatcaacggggaggacatgagcaagttcctgaagctgaacagccacatctgggagtacacctacgtgctggacatccgccacagcagcatcatgtggatcaatgacctggagaatgatgacctgtacatcacctggcccaccagctgccagaagctgctgaagcctgtgtttcctggctctgtgcccagcatcagaagaaacttccacaacctggtgctcttcattgatcctgcccaggagtacaccctggacttcatcaagctggctgatgtgttctacagccatgaggtgcccctgagaattggatttgtgttcatcctgaacacagatgatgaggtggatggagccaatgatgctggggtggccctgtggagggccttcaactacatcgccgaggagtttgacatcagcgaggccttcatcagcatcgtgcacatgtaccagaaggtgaagaaggaccagaacatcctgactgtggacaacgtgaagtctgtgctgcagaacaccttcccccacgccaacatctgggacatcctgggcatccacagcaaatatgatgaggagaggaaggccggggccagcttctacaagatgacaggcctgggccccctgccccaggccctgtacaacggggagcccttcaagcatgaggagatgaacatcaaggagctgaagatggctgtgctgcagaggatgatggatgcctctgtgtacctgcagcgggaggtgttcctgggcaccctgaatgacaggaccaatgccatcgacttcctgatggacagaaataatgtggtgccccgcatcaacaccctcatcctgcggaccaaccagcagtacctgaacctgatcagcacctctgtgacagcagatgtggaggacttcagcaccttcttcttcctggacagccaggacaagtctgctgtgattgccaagaacatgtactacctgacccaggatgatgagagcatcatctctgctgtgaccctgtggatcatcgctgactttgacaagcccagcggcaggaagctgctcttcaatgccctgaagcacatgaagacctctgtgcacagccggctgggcatcatctacaaccccaccagcaagatcaatgaggagaacacagccatcagccggggcatcctggccgccttcctgacccagaagaacatgttcctgcggagcttcctgggccagctggccaaggaggagatcgccacagccatctacagcggggacaagatcaagaccttcctgattgagggcatggacaagaatgcctttgagaagaagtacaacacagtgggcgtgaacatcttccgcacccaccagctgttctgccaggatgtgctgaagctgcggcctggagagatgggcatcgtgtccaatggccgcttcctgggccccctggatgaggacttctatgcagaggacttctacctgctggagaagatcaccttcagcaacctgggggagaagatcaagggcatcgtggagaacatgggcatcaatgccaacaacatgtctgacttcatcatgaaggtggatgccctgatgagctctgtgcccaagagggccagccgctatgatgtgaccttcctgcgggagaaccacagcgtcatcaagaccaacccccaggagaatgacatgttcttcaacgtcatcgccatcgtggaccccctgacccgggaggcccagaagatggcccagctgctggtggtgctgggcaagatcatcaacatgaagatcaagctgttcatgaactgccggggccgcctgtctgaggcccccctggagagcttctacagatttgtgctggagcctgagctgatgtctggggccaatgatgtgagcagcctgggccctgtggccaagttcctggacatccctgagagccccctgctgatcctgaacatgatcaccccagagggctggctggtggagaccgtgcacagcaactgtgacctggacaacatccacctgaaggacacagagaagacagtgacagcagaatatgagctggagtacctgctgctggagggccagtgctttgacaaggtgacagagcagcccccccggggcctgcagttcaccctgggcaccaagaacaagccagctgtggtggacaccatcgtgatggcccaccacggctacttccagctgaaggccaaccctggggcctggatcctgcggctgcaccagggcaagtctgaggacatctaccagatcgtgggccacgagggcacagacagccaggccgacctggaggacatcatcgtggtgctgaacagcttcaagagcaagatcctgaaggtgaaggtgaagaaggagacagacaagatcaaggaggacatcctgacagatgaagatgagaagaccaagggcctgtgggacagcatcaagagcttcaccgtgtccctgcacaaggagaacaagaaggagaaggatgtgctgaacatcttctctgtggccagcggccacctgtatgagcgcttcctgcgcatcatgatgctgtctgtgctgaggaacaccaagacccctgtgaagttctggctgctgaagaactacctgagccccaccttcaaggaggtgatcccccacatggccaaggagtatggcttccgctatgagctggtgcagtaccgctggccccgctggctgcggcagcagacagagcggcagaggatcatctggggctacaagatcctcttcctggatgtgctcttccccctggccgtggacaagatcatctttgtggatgctgaccagatcgtgagacatgacctgaaggagctgcgggactttgacctggatggagccccctacggctacacccccttctgtgacagccggcgggagatggatggctaccgcttctggaagacaggctactgggccagccacctgctgcggaggaagtaccacatcagcgccctgtatgtggtggacctgaagaagttcagaagaattggagctggggaccggctgcggagccagtaccaggccctgagccaggaccccaacagcctgagcaacctggaccaggacctgcccaacaacatgatctaccaggtggccatcaagagcctgccccaggactggctgtggtgtgagacctggtgtgatgatgagagcaagcagagggccaagaccatcgacctgtgcaacaaccccaagaccaaggagagcaagctgaaggctgctgcccgcatcgtgcctgagtgggtggagtatgatgctgagatccggcagctgctggaccacctggagaacaagaagcaggacaccatcctgacccatgatgagctgtag

SEQ ID NO: 175402 - DNA, 1119 bp, synthetic construct
  misc_feature 1..1119: note = Description of Artificial Sequence: Synthetic coding sequence
  source 1..1119: mol_type = other DNA
atggccccagccaaggccaccaacgtggtgcggctgctgctgggcagcacagccctgtggctgagccagctgggcagcggcaccgtggccgccagcaagtctgtgacagcccacctggccgccaagtggccagagacccccctgctgctggaggccagcgagttcatggccgaggagagcaatgagaagttctggcagttcctggagaccgtgcaggagctggccatctacaagcagacagaaagtgactacagctactacaacctgatcctgaagaaggccggccagttcctggacaacctgcacatcaacctgctgaagtttgccttcagcatccgggcctacagccctgccatccagatgttccagcagattgctgctgatgagcccccaccagatggctgcaatgcctttgtggtgatccacaagaagcacacctgcaagatcaatgagatcaagaagctgctgaagaaggccgccagcaggacccggccctacctgttcaagggggaccacaagttccccaccaacaaggagaacctgcctgtggtgatcctgtatgcagagatgggcaccaggaccttcagcgccttccacaaggtgctgtctgagaaggcccagaatgaggagatcctgtatgtgctgcggcactacatccagaagcccagcagcaggaagatgtacctgagcggctacggcgtggagctggccatcaagagcacagagtacaaggccctggatgacacccaggtgaagacagtgaccaacaccaccgtggaggatgaaacagagaccaatgaggtgcagggcttcctgtttgggaagctgaaggagatctacagcgacctgcgggacaacctgacagccttccagaagtacctgattgagagcaacaagcagatgatgcccctgaaggtgtgggagctgcaggacctgtccttccaggccgccagccagatcatgtctgcccctgtgtatgacagcatcaagctgatgaaggacatcagccagaacttccccatcaaggcccggctgaggatgaacatcctgatctgcctcttccagagcaccctgaatgtgaagaacctgcggagccgccacctgtacaacaagacctag

SEQ ID NO: 175403 - DNA, 1527 bp, synthetic construct
  misc_feature 1..1527: note = Description of Artificial Sequence: Synthetic coding sequence
  source 1..1527: mol_type = other DNA
atgagcagatttgtgcaggacctgagcaaggccatgagccaggatggagccagccagttccaggaggtgatccggcaggagctggagctgtctgtgaagaaggagctggagaagatcctgaccacagccagcagccatgaatttgagcacaccaagaaggacctggatggcttcaggaagctgttccaccgcttcctgcaggagaagggccccagcgtggactggggcaagatccagaggcccccagaagattccatccagccctatgagaagatcaaggcccggggcctgcctgacaacatcagctctgtgctgaacaagctggtggtggtgaagctgaatggaggcctgggcacctccatgggctgcaagggccccaagagcctcatcggcgtgagaaatgaaaacaccttcctggacctgactgtgcagcagatcgagcacctgaacaagacctacaacacagatgtgcccctggtgctgatgaacagcttcaacacagatgaggacaccaagaagatcctgcagaagtacaaccactgccgggtgaagatctacaccttcaaccagagccgctacccccgcatcaacaaggagagcctgctgcctgtggccaaggatgtgtcctacagcggagaaaatacagaggcctggtacccacctggccatggagacatctatgccagcttctacaacagcggcctgctggacaccttcatcggggagggcaaggagtacatctttgtgagcaacatcgacaacctgggcgccaccgtggacctgtacatcctgaaccacctgatgaacccccccaacgggaagagatgtgaatttgtgatggaggtgaccaacaagaccagggcagatgtgaagggcggcaccctgacccagtatgagggcaagctgcggctggtggagatcgcccaggtgcccaaggcccacgtggatgagttcaagtctgtgtccaagttcaagatcttcaacaccaacaacctgtggatcagcctggccgctgtgaagaggctgcaggagcagaatgccatcgacatggagatcatcgtgaatgccaagaccctggatggcggcctgaatgtcatccagctggagacagctgtgggcgccgccatcaagagctttgagaacagcctgggcatcaacgtgcccaggagccgcttcctgcctgtgaagaccaccagtgacctgctgctggtgatgagcaacctgtacagcctgaatgccggcagcctgaccatgtctgagaagcgggagttccccaccgtgcccctggtgaagctgggcagcagcttcaccaaggtgcaggactacctgcggagatttgagagcatcccagacatgctggagctggaccacctgactgtgtctggagatgtgaccttcggcaagaatgtgtccctgaagggcaccgtcatcatcatcgccaaccacggggacagaattgacatccccccaggagctgtgctggagaacaagatcgtgtctggcaacctgcgcatcctggaccactag

SEQ ID NO: 175404 - DNA, 1494 bp, synthetic construct
  misc_feature 1..1494: note = Description of Artificial Sequence: Synthetic coding sequence
  source 1..1494: mol_type = other DNA
atgagccaggatggagccagccagttccaggaggtgatccggcaggagctggagctgtctgtgaagaaggagctggagaagatcctgaccacagccagcagccatgaatttgagcacaccaagaaggacctggatggcttcaggaagctgttccaccgcttcctgcaggagaagggccccagcgtggactggggcaagatccagaggcctcctgaggacagcatccagccctatgagaagatcaaggcccggggcctgcctgacaacatcagctctgtgctgaacaagctggtggtggtgaagctgaatggaggcctgggcacctccatgggctgcaagggccccaagagcctgattggagtgagaaatgaaaacaccttcctggacctgactgtgcagcagatcgagcacctgaacaagacctacaacacagatgtgcccctggtgctgatgaacagcttcaacacagatgaggacaccaagaagatcctgcagaagtacaaccactgccgggtgaagatctacaccttcaaccagagccgctacccccgcatcaacaaggagagcctgctgcctgtggccaaggatgtgtcctacagcggggagaacacagaggcctggtacccacctggccacggggacatctatgccagcttctacaacagcggcctgctggacaccttcatcggggagggcaaggagtacatctttgtgagcaacatcgacaacctgggcgccaccgtggacctgtacatcctgaaccacctgatgaaccccccaaatggcaagagatgtgaatttgtgatggaggtgaccaacaagaccagggcagatgtgaagggcggcaccctgacccagtatgagggcaagctgcggctggtggagatcgcccaggtgcccaaggcccacgtggatgagttcaagtctgtgtccaagttcaagatcttcaacaccaacaacctgtggatcagcctggccgctgtgaagaggctgcaggagcagaatgccatcgacatggagatcatcgtgaatgccaagaccctggatggcggcctgaatgtcatccagctggagacagctgtgggcgccgccatcaagagctttgagaacagcctgggcatcaacgtgcccaggagccgcttcctgcctgtgaagaccaccagtgacctgctgctggtgatgagcaacctgtacagcctgaatgccggcagcctgaccatgtctgagaagcgggagttccccaccgtgcccctggtgaagctgggcagcagcttcaccaaggtgcaggactacctgcggagatttgagagcatcccagacatgctggagctggaccacctgactgtgtctggagatgtgaccttcggcaagaatgtgtccctgaagggcaccgtcatcatcatcgccaaccacggggacagaattgacatccccccaggagctgtgctggagaacaagatcgtgtctggcaacctgcgcatcctggaccactag

SEQ ID NO: 175405 - DNA, 1554 bp, synthetic construct
  misc_feature 1..1554: note = Description of Artificial Sequence: Synthetic coding sequence
  source 1..1554: mol_type = other DNA
atgctgctgtacccagctggcttctcctttgccagcctgaagagtgacctgagcaaggccatgagccaggatggagccagccagttccaggaggtgatccggcaggagctggagctgtctgtgaagaaggagctggagaagatcctgaccacagccagcagccatgaatttgagcacaccaagaaggacctggatggcttcaggaagctgttccaccgcttcctgcaggagaagggccccagcgtggactggggcaagatccagaggcctcctgaggacagcatccagccctatgagaagatcaaggcccggggcctgcctgacaacatcagctctgtgctgaacaagctggtggtggtgaagctgaatggaggcctgggcacctccatgggctgcaagggccccaagagcctgattggagtgagaaatgaaaacaccttcctggacctgactgtgcagcagatcgagcacctgaacaagacctacaacacagatgtgcccctggtgctgatgaacagcttcaacacagatgaggacaccaagaagatcctgcagaagtacaaccactgccgggtgaagatctacaccttcaaccagagccgctacccccgcatcaacaaggagagcctgctgcctgtggccaaggatgtgtcctacagcggggagaacacagaggcctggtacccacctggccacggggacatctatgccagcttctacaacagcggcctgctggacaccttcatcggggagggcaaggagtacatctttgtgagcaacatcgacaacctgggcgccaccgtggacctgtacatcctgaaccacctgatgaaccccccaaatggcaagagatgtgaatttgtgatggaggtgaccaacaagaccagggcagatgtgaagggcggcaccctgacccagtatgagggcaagctgcggctggtggagatcgcccaggtgcccaaggcccacgtggatgagttcaagtctgtgtccaagttcaagatcttcaacaccaacaacctgtggatcagcctggccgctgtgaagaggctgcaggagcagaatgccatcgacatggagatcatcgtgaatgccaagaccctggatggcggcctgaatgtcatccagctggagacagctgtgggcgccgccatcaagagctttgagaacagcctgggcatcaacgtgcccaggagccgcttcctgcctgtgaagaccaccagtgacctgctgctggtgatgagcaacctgtacagcctgaatgccggcagcctgaccatgtctgagaagcgggagttccccaccgtgcccctggtgaagctgggcagcagcttcaccaaggtgcaggactacctgcggagatttgagagcatcccagacatgctggagctggaccacctgactgtgtctggagatgtgaccttcggcaagaatgtgtccctgaagggcaccgtcatcatcatcgccaaccacggggacagaattgacatccccccaggagctgtgctggagaacaagatcgtgtctggcaacctgcgcatcctggaccactag

SEQ ID NO: 175406 - DNA, 1494 bp, synthetic construct; identical to SEQ ID NO: 175404
  misc_feature 1..1494: note = Description of Artificial Sequence: Synthetic coding sequence
  source 1..1494: mol_type = other DNA

SEQ ID NO: 175407 - DNA, 453 bp, synthetic construct
  misc_feature 1..453: note = Description of Artificial Sequence: Synthetic coding sequence
  source 1..453: mol_type = other DNA
atgagccaggatggagccagccagttccaggaggtgatccggcaggagctggagctgtctgtgaagaaggagctggagaagatcctgaccacagccagcagccatgaatttgagcacaccaagaaggacctggatggcttcaggaagctgttccaccgcttcctgcaggagaagggccccagcgtggactggggcaagatccagaggcctcctgaggacagcatccagccctatgagaagatcaaggcccggggcctgcctgacaacatcagctctgtgctgaacaagctggtggtggtgaagctgaatggaggcctgggcacctccatgggctgcaagggccccaagagcctgattggagtgagaaatgaaaacaccttcctggacctgactgtgcagcagatcgagcacctgaacaagacctacaacacagatgtgcccctggtgctgtag

SEQ ID NO: 175408 - DNA, 516 bp, synthetic construct
  misc_feature 1..516: note = Description of Artificial Sequence: Synthetic coding sequence
  source 1..516: mol_type = other DNA
atgagccaggatggagccagccagttccaggaggtgatccggcaggagctggagctgtctgtgaagaaggagctggagaagatcctgaccacagccagcagccatgaatttgagcacaccaagaaggacctggatggcttcaggaagctgttccaccgcttcctgcaggagaagggccccagcgtggactggggcaagatccagaggcctcctgaggacagcatccagccctatgagaagatcaaggcccggggcctgcctgacaacatcagctctgtgctgaacaagctggtggtggtgaagctgaatggaggcctgggcacctccatgggctgcaagggccccaagagcctgattggagtgagaaatgaaaacaccttcctggacctgactgtgcagcagatcgagcacctgaacaagacctacaacacagatgtgcccctggtgctgatgaacagcttcaacacagatgaggacaccaagaagatcctgcagaagtacaaccactgcaggtag

SEQ ID NO: 175409 - DNA, 117 bp, synthetic construct
  misc_feature 1..117: note = Description of Artificial Sequence: Synthetic coding sequence
  source 1..117: mol_type = other DNA
atgagccaggatggagccagccagttccaggaggtgatccggcaggagctggagctgtctgtgaagaaggagctggagaagatcctgaccacagccagcagccatgaatttgaatag

SEQ ID NO: 175410 - DNA, 318 bp, synthetic construct
  misc_feature 1..318: note = Description of Artificial Sequence: Synthetic coding sequence
  source 1..318: mol_type = other DNA
atgagccaggatggagccagccagttccaggaggtgatccggcaggagctggagctgtctgtgaagaaggagctggagaagatcctgaccacagccagcagccatgaatttgagcacaccaagaaggacctggatggcttcaggaagctgttccaccgcttcctgcaggagaagggccccagcgtggactggggcaagatccagaggcctcctgaggacagcatccagccctatgagaagatcaaggcccggggcctgcctgacaacatcagctctgtgctgaacaagctggtggtggtgaagctgaatggaggatag

SEQ ID NO: 175411 - DNA, 150 bp, synthetic construct
  misc_feature 1..150: note = Description of Artificial Sequence: Synthetic coding sequence
  source 1..150: mol_type = other DNA
atgagcagatttgtgcaggacctgagcaaggccatgagccaggatggagccagccagttccaggaggtgatccggcaggagctggagctgtctgtgaagaaggagctggagaagatcctgaccacagccagcagccatgaatttgaatag

SEQ ID NO: 175412 - DNA, 408 bp, synthetic construct
  misc_feature 1..408: note = Description of Artificial Sequence: Synthetic coding sequence
  source 1..408: mol_type = other DNA
atgagccaggatggagccagccagttccaggaggtgatccggcaggagctggagctgtctgtgaagaaggagctggagaagatcctgaccacagccagcagccatgaatttgagcacaccaagaaggacctggatggcttcaggaagctgttccaccgcttcctgcaggagaagggccccagcgtggactggggcaagatccagaggcctcctgaggacagcatccagccctatgagaagatcaaggcccggggcctgcctgacaacatcagctctgtgctgaacaagctggtggtggtgaagctgaatggaggcctgggcacctccatgggctgcaagggccccaagagcctgattggagtgagaaatgaaaacaccttcctggacctgactgtgcagcagatctag

SEQ ID NO: 175413 - DNA, 642 bp, synthetic construct
  misc_feature 1..642: note = Description of Artificial Sequence: Synthetic coding sequence
  source 1..642: mol_type = other DNA
atgagccaggatggagccagccagttccaggaggtgatccggcaggagctggagctgtctgtgaagaaggagctggagaagatcctgaccacagccagcagccatgaatttgagcacaccaagaaggacctggatggcttcaggaagctgttccaccgcttcctgcaggagaagggccccagcgtggactggggcaagatccagaggcctcctgaggacagcatccagccctatgagaagatcaaggcccggggcctgcctgacaacatcagctctgtgctgaacaagctggtggtggtgaagctgaatggaggcctgggcacctccatgggctgcaagggccccaagagcctgattggagtgagaaatgaaaacaccttcctggacctgactgtgcagcagatcgagcacctgaacaagacctacaacacagatgtgcccctggtgctgatgaacagcttcaacacagatgaggacaccaagaagatcctgcagaagtacaaccactgccgggtgaagatctacaccttcaaccagagccgctacccccgcatcaacaaggagagcctgctgcctgtggccaaggatgtgtcctacagcggggagaacacagaggcctggtacccacctggccacggctag

SEQ ID NO: 175414 - DNA, 1278 bp, synthetic construct
  misc_feature 1..1278: note = Description of Artificial Sequence: Synthetic coding sequence
  source 1..1278: mol_type = other DNA
atggtgtccaaggccctgctgcggctggtgtctgctgtgaacagaagaaggatgaagctgctgctgggcatcgccctgctggcctacgtggcctctgtgtggggcaactttgtgaacatgtccttcctgctgaacagaagcatccaggagaatggagagctgaagattgagagcaagattgaggagatggtggagcccctgcgggagaagatccgggacctggagaagagcttcacccagaagtacccacctgtgaagttcctgtctgagaaggacaggaagaggatcctgatcactggaggagctggctttgtgggcagccacctgacagacaagctgatgatggatggccacgaggtgacagtggtggacaacttcttcaccggcaggaagagaaatgtggagcactggattggacatgaaaattttgagctgatcaaccatgatgtggtggagcccctgtacatcgaggtggaccagatctaccacctggccagccctgccagcccccccaactacatgtacaaccccatcaagaccctgaagaccaacaccatcggcaccctgaacatgctgggcctggccaagagggtgggcgcccggctgctgctggccagcaccagcgaggtgtatggagaccctgaggtgcacccccagagcgaggactactggggccacgtgaaccccatcggcccccgggcctgctatgatgagggcaagagggtggccgagaccatgtgctacgcctacatgaagcaggagggcgtggaggtgcgggtggcccgcatcttcaacaccttcggccccaggatgcacatgaatgatggccgggtggtgagcaacttcatcctgcaggccctgcagggcgagcccctgactgtgtatggcagcggcagccagacccgggccttccagtatgtgtctgacctggtgaatggcctggtggccctgatgaacagcaatgtgagcagccctgtgaacctgggcaaccctgaggagcacaccatcctggagtttgcccagctgatcaagaacctggtgggcagcggcagcgagatccagttcctgtctgaggcccaggatgacccccagaagaggaagccagacatcaagaaggccaagctgatgctgggctgggagcctgtggtgcccctggaggagggcctgaacaaggccatccactacttcaggaaggagctggagtaccaggccaacaaccagtacatccccaagcccaagccagcccgcatcaagaagggccgcaccaggcacagctag

SEQ ID NO: 175415 - DNA, 759 bp, synthetic construct
  misc_feature 1..759: note = Description of Artificial Sequence: Synthetic coding sequence
  source 1..759: mol_type = other DNA
atgtacaaccccatcaagaccctgaagaccaacaccatcggcaccctgaacatgctgggcctggccaagagggtgggcgcccggctgctgctggccagcaccagcgaggtgtatggagaccctgaggtgcacccccagagcgaggactactggggccacgtgaaccccatcggcccccgggcctgctatgatgagggcaagagggtggccgagaccatgtgctacgcctacatgaagcaggagggcgtggaggtgcgggtggcccgcatcttcaacaccttcggccccaggatgcacatgaatgatggccgggtggtgagcaacttcatcctgcaggccctgcagggcgagcccctgactgtgtatggcagcggcagccagacccgggccttccagtatgtgtctgacctggtgaatggcctggtggccctgatgaacagcaatgtgagcagccctgtgaacctgggcaaccctgaggagcacaccatcctggagtttgcccagctgatcaagaacctggtgggcagcggcagcgagatccagttcctgtctgaggcccaggatgacccccagaagaggaagccagacatcaagaaggccaagctgatgctgggctgggagcctgtggtgcccctggaggagggcctgaacaaggccatccactacttcaggaaggagctggagtaccaggccaacaaccagtacatccccaagcccaagccagcccgcatcaagaagggccgcaccaggcacagctag

SEQ ID NO: 175416 - DNA, 1263 bp, synthetic construct
  misc_feature 1..1263: note = Description of Artificial Sequence: Synthetic coding sequence
  source 1..1263: mol_type = other DNA
atggtgtccaaggccctgctgcggctggtgtctgctgtgaacagaagaaggatgaagctgctgctgggcatcgccctgctggcctacgtggcctctgtgtggggcaactttgtgaacatgaggagcatccaggagaatggagagctgaagattgagagcaagattgaggagatggtggagcccctgcgggagaagatccgggacctggagaagagcttcacccagaagtacccacctgtgaagttcctgtctgagaaggacaggaagaggatcctgatcaccggcggggccggctttgtgggcagccacctgacagacaagctgatgatggatggccacgaggtgacagtggtggacaacttcttcaccggcaggaagagaaatgtggagcactggattggacatgagaactttgagctgatcaaccatgatgtggtggagcccctgtacatcgaggtggaccagatctaccacctggccagccctgccagcccccccaactacatgtacaaccccatcaagaccctgaagaccaacaccatcggcaccctgaacatgctgggcctggccaagagggtgggcgcccggctgctgctggccagcaccagcgaggtgtatggagaccctgaggtgcacccccagagcgaggactactggggccacgtgaaccccatcggcccccgggcctgctatgatgagggcaagagggtggccgagaccatgtgctacgcctacatgaagcaggagggcgtggaggtgcgggtggcccgcatcttcaacaccttcggccccaggatgcacatgaatgatggccgggtggtgagcaacttcatcctgcaggccctgcagggcgagcccctgactgtgtatggcagcggcagccagacccgggccttccagtatgtgtctgacctggtgaatggcctggtggccctgatgaacagcaatgtgagcagccctgtgaacctgggcaaccctgaggagcacaccatcctggagtttgcccagctgatcaagaacctggtgggcagcggcagcgagatccagttcctgtctgaggcccaggatgacccccagaagaggaagccagacatcaagaaggccaagctgatgctgggctgggagcctgtggtgcccctggaggagggcctgaacaaggccatccactacttcaggaaggagctggagtaccaggccaacaaccagtacatccccaagcccaagccagcccgcatcaagaagggccgcaccaggcacagctag

SEQ ID NO: 175417 - DNA, 405 bp, synthetic construct
  misc_feature 1..405: note = Description of Artificial Sequence: Synthetic coding sequence
  source 1..405: mol_type = other DNA
atgtacaaccccatcaagaccctgaagaccaacaccatcggcaccctgaacatgctgggcctggccaagagggtgggcgcccggctgctgctggccagcaccagcgaggtgtatggagaccctgaggtgcacccccagagcgaggactactggggccacgtgaaccccatcggcccccgggcctgctatgatgagggcaagagggtggccgagaccatgtgctacgcctacatgaagcaggagggcgtggaggtgcgggtggcccgcatcttcaacaccttcggccccaggatgcacatgaatgatggccgggtggtgagcaacttcatcctgcaggccctgcagggcgagcccctgactgtgtatggcagcggcagccagacccgggccttccagtatgtgtag

SEQ ID NO: 175418 - DNA, 558 bp, synthetic construct
  misc_feature 1..558: note = Description of Artificial Sequence: Synthetic coding sequence
  source 1..558: mol_type = other DNA
atggtgtccaaggccctgctgcggctggtgtctgctgtgaacagaagaaggatgaagctgctgctgggcatcgccctgctggcctacgtggcctggctggccaagagggtgggcgcccggctgctgctggccagcaccagcgaggtgtatggagaccctgaggtgcacccccagagcgaggactactggggccacgtgaaccccatcggcccccgggcctgctatgatgagggcaagagggtggccgagaccatgtgctacgcctacatgaagcaggagggcgtggaggtgcgggtggcccgcatcttcaacaccttcggccccaggatgcacatgaatgatggccgggtggtgagcaacttcatcctgcaggccctgcagggcgagcccctgactgtgtatggcagcggcagccagacccgggccttccagtatgtgtctgacctggtgaatggcctggtggccctgatgaacagcaatgtgagcagccctgtgaacctggtgtctgcccccctgccccccctgtgcaggacagcccagacctttgtgcacctgtag

SEQ ID NO: 175419 - DNA, 159 bp, synthetic construct
  misc_feature 1..159: note = Description of Artificial Sequence: Synthetic coding sequence
  source 1..159: mol_type = other DNA
atgtacaaccccatcaagaccctgaagaccaacaccatcggcaccctgaacatgctgggcctggccaagagggtgggcgcccggctgctgctggccagcaccagcgaggtgtatggagaccctgaggtgcacccccagagcgaggactactggggctag

SEQ ID NO: 175420 - DNA, 366 bp, synthetic construct
  misc_feature 1..366: note = Description of Artificial Sequence: Synthetic coding sequence
  source 1..366: mol_type = other DNA
atgtacaaccccatcaagaccctgaagaccaacaccatcggcaccctgaacatgctgggcctggccaagagggtgggcgcccggctgctgctggccagcaccagcgaggtgtatggagaccctgaggtgcacccccagagcgaggactactggggccacgtgaaccccatcggcccccgggcctgctatgatgagggcaagagggtggccgagaccatgtgctacgcctacatgaagcaggagggcgtggaggtgcgggtggcccgcatcttcaacaccttcggccccaggatgcacatgaatgatggccgggtggtgagcaacttcatcctgcaggccctgcagggcgagcccctgactgtgtag

SEQ ID NO: 175421 - DNA, 1092 bp, synthetic construct
  misc_feature 1..1092: note = Description of Artificial Sequence: Synthetic coding sequence
  source 1..1092: mol_type = other DNA
atggtggagcccctgcgggagaagatccgggacctggagaagagcttcacccagaagtacccacctgtgaagttcctgtctgagaaggacaggaagaggatcctgatcactggaggagctggctttgtgggcagccacctgacagacaagctgatgatggatggccacgaggtgacagtggtggacaacttcttcaccggcaggaagagaaatgtggagcactggattggacatgaaaattttgagctgatcaaccatgatgtggtggagcccctgtacatcgaggtggaccagatctaccacctggccagccctgccagcccccccaactacatgtacaaccccatcaagaccctgaagaccaacaccatcggcaccctgaacatgctgggcctggccaagagggtgggcgcccggctgctgctggccagcaccagcgaggtgtatggagaccctgaggtgcacccccagagcgaggactactggggccacgtgaaccccatcggcccccgggcctgctatgatgagggcaagagggtggccgagaccatgtgctacgcctacatgaagcaggagggcgtggaggtgcgggtggcccgcatcttcaacaccttcggccccaggatgcacatgaatgatggccgggtggtgagcaacttcatcctgcaggccctgcagggcgagcccctgactgtgtatggcagcggcagccagacccgggccttccagtatgtgtctgacctggtgaatggcctggtggccctgatgaacagcaatgtgagcagccctgtgaacctgggcaaccctgaggagcacaccatcctggagtttgcccagctgatcaagaacctggtgggcagcggcagcgagatccagttcctgtctgaggcccaggatgacccccagaagaggaagccagacatcaagaaggccaagctgatgctgggctgggagcctgtggtgcccctggaggagggcctgaacaaggccatccactacttcaggaaggagctggagtaccaggccaacaaccagtacatccccaagcccaagccagcccgcatcaagaagggccgcaccaggcacagctag

SEQ ID NO: 175422 - DNA, 1680 bp, synthetic construct
  misc_feature 1..1680: note = Description of Artificial Sequence: Synthetic coding sequence
  source 1..1680: mol_type = other DNA
atgaggaagtttgcctactgcaaggtggtgctggccaccagcctcatctgggtgctgctggacatgttcctgctgctgtacttcagcgagtgcaacaagtgtgatgagaagaaggagcggggcctgcctgctggagatgtgctggagcctgtgcagaagccccatgagggccctggagagatgggcaagcctgtggtgatccccaaggaggaccaggagaagatgaaggagatgttcaagatcaaccagttcaacctgatggccagcgagatgattgccctgaacagaagcctgcctgatgtgcggctggagggctgcaagaccaaggtgtacccagacaacctgcccaccacctctgtggtgattgtgttccacaatgaggcctggagcaccctgctgaggacagtgcacagcgtcatcaacagaagccccaggcacatgattgaggagatcgtgctggtggatgatgccagcgagcgggacttcctgaagaggcccctggagagctatgtgaagaagctgaaggtgcctgtgcacgtgatccgcatggagcagaggagcggcctcatccgggcccggctgaagggagctgctgtgtccaagggccaggtgatcaccttcctggatgcccactgtgaatgtactgtgggctggctggagcccctgctggcccgcatcaagcatgacagaagaacagtggtgtgccccatcattgatgtgatcagtgatgacacctttgagtacatggccggcagtgacatgacctacggcggcttcaactggaagctgaacttccgctggtaccctgtgccccagcgggagatggacagaagaaaaggagacaggaccctgcctgtgaggacccccaccatggccggcggcctcttcagcattgaccgggactacttccaggagatcggcacctatgatgctggcatggacatctggggcggggagaacctggagatctccttccgcatctggcagtgtggcggcaccctggagatcgtgacctgcagccacgtgggccacgtgttcaggaaggccaccccctacaccttccctgggggcaccggccagatcatcaacaagaacaacagaaggctggccgaggtgtggatggatgagttcaagaacttcttctacatcatcagccctggggtgaccaaggtggactatggagacatcagcagccgggtgggcctgcggcacaagctgcagtgcaagcccttctcctggtacctggagaacatctacccagacagccagatccccaggcactacttcagcctgggggagatcagaaatgtggagaccaaccagtgcctggacaacatggccaggaaagaaaatgagaaggtgggcatcttcaactgccacggcatgggcggcaaccaggtgttctcctacacagccaacaaggagatcagaacagatgacctgtgcctggatgtgtccaagctgaatggacctgtgaccatgctgaagtgccaccacctgaagggcaaccagctgtgggagtatgaccctgtgaagctgaccctgcagcacgtgaacagcaaccagtgcctggacaaggccacagaggaggacagccaggtgcccagcatccgggactgcaatggcagccgcagccagcagtggctgctgagaaatgtgaccctgcctgagatcttctag

SEQ ID NO: 175423 - DNA, 1500 bp, synthetic construct
  misc_feature 1..1500: note = Description of Artificial Sequence: Synthetic coding sequence
  source 1..1500: mol_type = other DNA
atgggcaagcctgtggtgatccccaaggaggaccaggagaagatgaaggagatgttcaagatcaaccagttcaacctgatggccagcgagatgattgccctgaacagaagcctgcctgatgtgcggctggagggctgcaagaccaaggtgtacccagacaacctgcccaccacctctgtggtgattgtgttccacaatgaggcctggagcaccctgctgaggacagtgcacagcgtcatcaacagaagccccaggcacatgattgaggagatcgtgctggtggatgatgccagcgagcgggacttcctgaagaggcccctggagagctatgtgaagaagctgaaggtgcctgtgcacgtgatccgcatggagcagaggagcggcctcatccgggcccggctgaagggagctgctgtgtccaagggccaggtgatcaccttcctggatgcccactgtgaatgtactgtgggctggctggagcccctgctggcccgcatcaagcatgacagaagaacagtggtgtgccccatcattgatgtgatcagtgatgacacctttgagtacatggccggcagtgacatgacctacggcggcttcaactggaagctgaacttccgctggtaccctgtgccccagcgggagatggacagaagaaaaggagacaggaccctgcctgtgaggacccccaccatggccggcggcctcttcagcattgaccgggactacttccaggagatcggcacctatgatgctggcatggacatctggggcggggagaacctggagatctccttccgcatctggcagtgtggcggcaccctggagatcgtgacctgcagccacgtgggccacgtgttcaggaaggccaccccctacaccttccctgggggcaccggccagatcatcaacaagaacaacagaaggctggccgaggtgtggatggatgagttcaagaacttcttctacatcatcagccctggggtgaccaaggtggactatggagacatcagcagccgggtgggcctgcggcacaagctgcagtgcaagcccttctcctggtacctggagaacatctacccagacagccagatccccaggcactacttcagcctgggggagatcagaaatgtggagaccaaccagtgcctggacaacatggccaggaaagaaaatgagaaggtgggcatcttcaactgccacggcatgggcggcaaccaggtgttctcctacacagccaacaaggagatcagaacagatgacctgtgcctggatgtgtccaagctgaatggacctgtgaccatgctgaagtgccaccacctgaagggcaaccagctgtgggagtatgaccctgtgaagctgaccctgcagcacgtgaacagcaaccagtgcctggacaaggccacagaggaggacagccaggtgcccagcatccgggactgcaatggcagccgcagccagcagtggctgctgagaaatgtgaccctgcctgagatcttctag

SEQ ID NO: 175424 - DNA, 1680 bp, synthetic construct; identical to SEQ ID NO: 175422
  misc_feature 1..1680: note = Description of Artificial Sequence: Synthetic coding sequence
  source 1..1680: mol_type = other DNA

SEQ ID NO: 175425 - DNA, 1812 bp, synthetic construct
  misc_feature 1..1812: note = Description of Artificial Sequence: Synthetic coding sequence
  source 1..1812: mol_type = other DNA
atgaggaggaaggagaagaggctgctgcaggccgtggccctggtgctggccgccctggtgctgctgcccaacgtgggcctgtgggccctgtaccgggagcggcagccagatggcacccctgggggcagcggggctgctgtggccccagctgctggccagggcagccacagccggcagaagaagaccttcttcctgggagatggccagaagctgaaggactggcatgacaaggaggccatcagaagagatgcccagagggtgggcaatggagagcagggccggccctaccccatgacagatgctgagcgggtggaccaggcctaccgggagaatggcttcaacatctacgtgtctgacaagatcagcctgaacagaagcctgcctgacatccgccaccccaactgcaacagcaagcgctacctggagaccctgcccaacaccagcatcatcatccccttccacaatgaaggctggagcagcctgctgaggacagtgcacagcgtgctgaacagaagccccccagagctggtggccgagatcgtgctggtggatgacttcagtgaccgggagcacctgaagaagcccctggaggactacatggccctcttccccagcgtgcgcatcctgcggaccaagaagcgggagggcctcatccgcaccaggatgctgggcgcctctgtggccactggagatgtgatcaccttcctggacagccactgtgaggccaacgtgaactggctgccccccctgctggaccgcatcgccaggaacaggaagaccatcgtgtgccccatgattgatgtgattgaccatgatgacttccgctatgagacccaggccggagatgccatgagaggagcctttgactgggagatgtactacaagaggatccccatccccccagagctgcagaaggctgaccccagcgacccctttgagagccctgtgatggccggcggcctgtttgctgtggacaggaagtggttctgggagctgggcggctatgaccccggcctggagatctggggcggggagcagtatgagatctccttcaaggtgtggatgtgtggcggccgcatggaggacatcccctgcagccgggtgggccacatctacagaaaatatgtgccctacaaggtgcctgctggggtgtccctggccaggaacctgaagagggtggccgaggtgtggatggatgaatatgcagagtacatctaccagaggaggcctgagtaccgccacctgtctgctggagatgtggccgtgcagaagaagctgcggagcagcctgaactgcaagagcttcaagtggttcatgaccaagatcgcctgggacctgcccaagttctacccacctgtggagcccccagctgctgcctggggcgagatcagaaatgtgggcaccggcctgtgtgccgacaccaagcacggggccctgggcagccccctgcggctggagggctgtgtgcggggccgcggggaggccgcctggaacaacatgcaggtgttcaccttcacctggagggaggacatccggcctggggacccccagcacaccaagaagttctgctttgatgccatcagccacaccagccctgtgaccctgtatgactgccacagcatgaagggcaaccagctgtggaagtacaggaaggacaagaccctgtaccaccctgtgtctggcagctgcatggactgcagcgagagtgaccaccgcatcttcatgaacacctgcaaccccagcagcctgacccagcagtggctgtttgagcacaccaacagcacagtgctggagaagttcaacagaaattag

SEQ ID NO: 175426 - DNA, 831 bp, synthetic construct
  misc_feature 1..831: note = Description of Artificial Sequence: Synthetic coding sequence
  source 1..831: mol_type = other DNA
atgctggcctggagagatggagagctggaggccgagaccagcagcagcctcttcctgctggccatgcaggtgtggatgtgtggcggccgcatggaggacatcccctgcagccgggtgggccacatctacagaaaatatgtgccctacaaggtgcctgctggggtgtccctggcccgggtgaggaacctgaagagggtggccgaggtgtggatggatgaatatgcagagtacatctaccagaggaggcctgagtaccgccacctgtctgctggagatgtggccgtgcagaagaagctgcggagcagcctgaactgcaagagcttcaagtggttcatgaccaagatcgcctgggacctgcccaagttctacccacctgtggagcccccagctgctgcctggggcgagatcagaaatgtgggcaccggcctgtgtgccgacaccaagcatggagccctgggcagccccctgcggctggagggctgtgtgcggggccgcggggaggccgcctggaacaacatgcaggtgttcaccttcacctggagggaggacatccggcctggggacccccagcacaccaagaagttctgctttgatgccatcagccacaccagccctgtgaccctgtatgactgccacagcatgaagggcaaccagctgtggaagtacaggaaggacaagaccctgtaccaccctgtgtctggcagctgcatggactgcagcgagagtgaccaccgcatcttcatgaacacctgcaaccccagcagcctgacccagcagtggctgtttgagcacaccaacagcacagtgctggagaagttcaacagaaattag

SEQ ID NO: 175427 - DNA, 1626 bp, synthetic construct
  misc_feature 1..1626: note = Description of Artificial Sequence: Synthetic coding sequence
  source 1..1626: mol_type = other DNA
atgaggaggaaggagaagaggctgctgcaggccgtggccctggtgctggccgccctggtgctgctgcccaacgtgggcctgtgggccctgtaccgggagcggcagccagatggcacccctgggggcagcggggctgctgtggccccagctgctggccagggcagccacagccggcagaagaagaccttcttcctgggagatggccagaagctgaaggactggcatgacaaggaggccatcagaagagatgcccagagggtgggcaatggagagcagggccggccctaccccatgacagatgctgagcgggtggaccaggcctaccgggagaatggcttcaacatctacgtgtctgacaagatcagcctgaacagaagcctgcctgacatccgccaccccaactgcaacagcaagcgctacctggagaccctgcccaacaccagcatcatcatccccttccacaatgaaggctggagcagcctgctgaggacagtgcacagcgtgctgaacagaagccccccagagctggtggccgagatcgtgctggtggatgacttcagtgaccgggaccgcatcgccaggaacaggaagaccatcgtgtgccccatgattgatgtgattgaccatgatgacttccgctatgagacccaggccggagatgccatgagaggagcctttgactgggagatgtactacaagaggatccccatccccccagagctgcagaaggctgaccccagcgacccctttgagagccctgtgatggccggcggcctgtttgctgtggacaggaagtggttctgggagctgggcggctatgaccccggcctggagatctggggcggggagcagtatgagatctccttcaaggtgtggatgtgtggcggccgcatggaggacatcccctgcagccgggtgggccacatctacagaaaatatgtgccctacaaggtgcctgctggggtgtccctggccaggaacctgaagagggtggccgaggtgtggatggatgaatatgcagagtacatctaccagaggaggcctgagtaccgccacctgtctgctggagatgtggccgtgcagaagaagctgcggagcagcctgaactgcaagagcttcaagtggttcatgaccaagatcgcctgggacctgcccaagttctacccacctgtggagcccccagctgctgcctggggcgagatcagaaatgtgggcaccggcctgtgtgccgacaccaagcacggggccctgggcagccccctgcggctggagggctgtgtgcggggccgcggggaggccgcctggaacaacatgcaggtgttcaccttcacctggagggaggacatccggcctggggacccccagcacaccaagaagttctgctttgatgccatcagccacaccagccctgtgaccctgtatgactgccacagcatgaagggcaaccagctgtggaagtacaggaaggacaagaccctgtaccaccctgtgtctggcagctgcatggactgcagcgagagtgaccaccgcatcttcatgaacacctgcaaccccagcagcctgacccagcagtggctgtttgagcacaccaacagcacagtgctggagaagttcaacagaaattag

SEQ ID NO: 175428 - DNA, 1101 bp, synthetic construct
  misc_feature 1..1101: note = Description of Artificial Sequence: Synthetic coding sequence
  source 1..1101: mol_type = other DNA
atgaggaggaaggagaagaggctgctgcaggccgtggccctggtgctggccgccctggtgctgctgcccaacgtgggcctgtgggccctgtaccgggagcggcagccagatggcacccctgggggcagcggggctgctgtggccccagctgctggccagggcagccacagccggcagaagaagaccttcttcctgggagatggccagaagctgaaggactggcatgacaaggaggccatcagaagagatgcccagagggtgggcaatggagagcagggccggccctaccccatgacagatgctgagcgggtggaccaggcctaccgggagaatggcttcaacatctacgtgtctgacaagatcagcctgaacagaagcctgcctgacatccgccaccccaactgcaacagcaagcgctacctggagaccctgcccaacaccagcatcatcatccccttccacaatgaaggctggagcagcctgctgaggacagtgcacagcgtgctgaacagaagccccccagagctggtggccgagatcgtgctggtggatgacttcagtgaccgggagcacctgaagaagcccctggaggactacatggccctcttccccagcgtgcgcatcctgcggaccaagaagcgggagggcctcatccgcaccaggatgctgggcgcctctgtggccactggagatgtgatcaccttcctggacagccactgtgaggccaacgtgaactggctgccccccctgctggaccgcatcgccaggaacaggaagaccatcgtgtgccccatgattgatgtgattgaccatgatgacttccgctatgagacccaggccggagatgccatgagaggagcctttgactgggagatgtactacaagaggatccccatccccccagagctgcagaaggctgaccccagcgacccctttgagagccctgtgatggccggcggcctgtttgctgtggacaggaagtggttctgggagctgggcggctatgaccccggcctggagatctggggcggggagcagtatgagatctccttcaaggtgtcccagctgagccggcggcctgtgctgggcacagccagctag

SEQ ID NO: 175429 - DNA, 1746 bp, synthetic construct
  misc_feature 1..1746: note = Description of Artificial Sequence: Synthetic coding sequence
  source 1..1746: mol_type = other DNA
atgtggggccgcacagcccggcggcgctgcccccgggagctgcggcggggccgggaggccctgctggtgctgctggccctgctggccctggccggcctgggctctgtgctgcgggcccagagaggagctggagctggagctgctgagcccggcccccccaggaccccccggcccggccggcgggagcctgtgatgccccggccccctgtgcctgccaatgccctgggcgcccggggggaggccgtgcggctgcagctgcagggcgaggagctgcggctgcaggaggagagcgtgcggctgcaccagatcaacatctacctgagtgaccgcatcagcctgcaccggcggctgcctgagcgctggaaccccctgtgcaaggagaagaagtatgactatgacaacctgcccaggaccagcgtcatcatcgccttctacaatgaggcctggagcaccctgctgaggacagtgtacagcgtgctggagaccagcccagacatcctgctggaggaggtgatcctggtggatgactacagcgaccgggagcacctgaaggagcggctggccaatgagctgagcggcctgcccaaggtgcggctcatccgggccaacaagcgggagggcctggtgcgggcccggctgctgggcgccagcgctgcccggggagatgtgctgaccttcctggactgccactgtgagtgccacgagggctggctggagcccctgctgcagaggatccacgaggaggagagcgctgtggtgtgccctgtgattgatgtgattgactggaacacctttgagtacctgggcaacagcggggagccccagatcggcggctttgactggaggctggtgttcacctggcacacagtgcctgagcgggagcgcatccgcatgcagagccctgtggatgtgatccgcagccccaccatggccggcggcctgtttgctgtgtccaagaagtactttgagtacctgggcagctatgacaccggcatggaggtgtggggcggggagaacctggagttctccttccgcatctggcagtgtggcggcgtgctggagacccacccctgcagccacgtgggccacgtgttccccaagcaggccccctacagcaggaacaaggccctggccaacagcgtgcgggctgctgaggtgtggatggatgagttcaaggagctgtactaccacaggaacccccgggcccggctggagccctttggagatgtgacagagaggaagcagctgcgggacaagctgcagtgcaaggacttcaagtggttcctggagaccgtgtacccagagctgcacgtgcctgaggacaggcctggcttcttcggcatgctgcagaacaagggcctgacagactactgctttgactacaaccccccagatgagaaccagatcgtgggccaccaggtgatcctgtacctgtgccacggcatgggccagaaccagttctttgagtacaccagccagaaggagatccgctacaacacccaccagcctgagggctgcatcgctgtggaggccggcatggacaccctcatcatgcacctgtgtgaggagacagcccctgagaaccagaagttcatcctgcaggaggatggcagcctcttccacgagcagagcaagaagtgtgtgcaggccgccaggaaggagagcagtgacagctttgtgcccctgctgcgggactgcaccaacagcgaccaccagaagtggttcttcaaggagaggatgctgtag

SEQ ID NO: 175430 - DNA, 1671 bp, synthetic construct
  misc_feature 1..1671: note = Description of Artificial Sequence: Synthetic coding sequence
  source 1..1671: mol_type = other DNA
atgagaagatttgtgtactgcaaggtggtgctggccaccagcctgatgtgggtgctggtggatgtgttcctgctgctgtacttcagcgagtgcaacaagtgtgatgacaagaaggagaggagcctgctgcctgccctgcgggccgtcatcagcaggaaccaggagggccctggagagatgggcaaggctgtgctgatccccaaggatgaccaggagaagatgaaggagctgttcaagatcaaccagttcaacctgatggccagtgacctgattgccctgaacagaagcctgcctgatgtgcggctggagggctgcaagaccaaggtgtacccagatgagctgcccaacacctctgtggtgattgtgttccacaatgaggcctggagcaccctgctgaggacagtgtacagcgtcatcaacagaagcccccactacctgctgtctgaggtgatcctggtggatgatgccagcgagcgggacttcctgaagctgaccctggagaactacgtgaagaacctggaggtgcctgtgaagatcatccgcatggaggagaggagcggcctcatccgggcccggctgcggggagctgctgccagcaagggccaggtgatcaccttcctggatgcccactgtgagtgcaccctgggctggctggagcccctgctggcccgcatcaaggaggacaggaagacagtggtgtgccccatcattgatgtgatcagtgatgacacctttgagtacatggccggcagtgacatgacctatggaggcttcaactggaagctgaacttccgctggtaccctgtgccccagcgggagatggacaggaggaagggggacaggaccctgcctgtgaggacccccaccatggccggcggcctcttcagcattgacaggaactactttgaggagatcggcacctatgatgctggcatggacatctggggcggggagaacctggagatgtccttccgcatctggcagtgtggcggcagcctggagatcgtgacctgcagccacgtgggccacgtgttcaggaaggccaccccctacaccttccctgggggcactggacatgtgatcaacaagaacaacagaaggctggccgaggtgtggatggatgagttcaaggacttcttctacatcatcagccctggggtggtgaaggtggactatggagatgtgtctgtgaggaagaccctgcgggagaacctgaagtgcaagcccttctcctggtacctggagaacatctacccagacagccagatcccccggcgctactacagcctgggggagatcagaaatgtggagaccaaccagtgcctggacaacatgggcaggaaagaaaatgagaaggtgggcatcttcaactgccacggcatgggcggcaaccaggtgttctcctacacagctgacaaggagatcagaacagatgacctgtgcctggatgtgtcccggctgaatggacctgtgatcatgctgaagtgccaccacatgaggggcaaccagctgtgggagtatgatgctgagcggctgaccctgcggcacgtgaacagcaaccagtgcctggatgagcccagcgaggaggacaagatggtgcccaccatgcaggactgcagcggcagccgcagccagcagtggctgctgaggaacatgaccctgggcacctag

SEQ ID NO: 175431 - DNA, 1686 bp, synthetic construct
  misc_feature 1..1686: note = Description of Artificial Sequence: Synthetic coding sequence
  source 1..1686: mol_type = other DNA
atgagaagatttgtgtactgcaaggtggtgctggccaccagcctgatgtgggtgctggtggatgtgttcctgctgctgtacttcagcgagtgcaacaagtgtgatgacaagaaggagaggagcctgctgcctgccctgcgggccgtcatcagcaggaaccaggagggccctggagagatgggcaaggctgtgctgatccccaaggatgaccaggagaagatgaaggagctgttcaagatcaaccagttcaacctgatggccagtgacctgattgccctgaacagaagcctgcctgatgtgcggctggagggctgcaagaccaaggtgtacccagatgagctgcccaacacctctgtggtgattgtgttccacaatgaggcctggagcaccctgctgaggacagtgtacagcgtcatcaacagaagcccccactacctgctgtctgaggtgatcctggtggatgatgccagcgagcgggacttcctgaagctgaccctggagaactacgtgaagaacctggaggtgcctgtgaagatcatccgcatggaggagaggagcggcctcatccgggcccggctgcggggagctgctgccagcaagggccaggtgatcaccttcctggatgcccactgtgagtgcaccctgggctggctggagcccctgctggcccgcatcaaggaggacaggaagacagtggtgtgccccatcattgatgtgatcagtgatgacacctttgagtacatggccggcagtgacatgacctatggaggcttcaactggaagctgaacttccgctggtaccctgtgccccagcgggagatggacaggaggaagggggacaggaccctgcctgtgaggacccccaccatggccggcggcctcttcagcattgacaggaactactttgaggagatcggcacctatgatgctggcatggacatctggggcggggagaacctggagatgtccttccgcatctggcagtgtggcggcagcctggagatcgtgacctgcagccacgtgggccacgtgttcaggaaggccaccccctacaccttccctgggggcactggacatgtgatcaacaagaacaacagaaggctggccgaggtgtggatggatgagttcaaggacttcttctacatcatcagccctggggtggtgaaggtggactatggagatgtgtctgtgaggaagaccctgcgggagaacctgaagtgcaagcccttctcctggtacctggagaacatctacccagacagccagatcccccggcgctactacagcctgggggagatcagaaatgtggagaccaaccagtgcctggacaacatgggcaggaaagaaaatgagaaggtgggcatcttcaactgccacggcatgggcggcaaccaggtgttctcctacacagctgacaaggagatcagaacagatgacctgtgcctggatgtgtcccggctgaatggacctgtgatcatgctgaagtgccaccacatgaggggcaaccagctgtgggagtatgatgctgagagctgcctgtctgtgaacaaggtggctgatggcagccagcaccccaccgtggagacctgcaatgacagcaccctgcagaagtggctgctgaggaactacaccaggatggagatcttcaggaacatctttggaaacagcacagactacatcctgtag

SEQ ID NO: 175432 - DNA, 60 bp, synthetic construct
  misc_feature 1..60: note = Description of Artificial Sequence: Synthetic coding sequence
  source 1..60: mol_type = other DNA
atgagaagatttgtgtactgcaaggtggtgctggccaccagcctgatgtgggtgctgtag

SEQ ID NO: 175433 - DNA, 1659 bp, synthetic construct
  misc_feature 1..1659: note = Description of Artificial Sequence: Synthetic coding sequence
  source 1..1659: mol_type = other DNA
atgaggcggctgacccggcggctggtgctgcctgtgtttggagtgctgtggatcaccgtgctgctcttcttctgggtgaccaagaggaagctggaggtgcccactggacctgaggtgcagacccccaagcccagtgatgctgactgggatgacctgtgggaccagtttgatgaaagacgctacctgaatgccaagaagtggagggtgggagatgacccctacaagctgtatgccttcaaccagcgggagagcgagcgcatcagcagcaacagagccatcccagacaccaggcacctgcgctgcaccctgctggtgtactgcacagacctgccccccaccagcatcatcatcaccttccacaatgaggcccggagcaccctgctgcggaccatccgctctgtgctgaacagaacacccacccacctgatccgggagatcatcctggtggatgacttcagcaatgaccctgatgactgcaagcagctgatcaagctgcccaaggtgaagtgcctgaggaacaatgaaaggcagggcctggtgcgcagccgcatcagaggagctgacatcgcccagggcaccaccctgaccttcctggacagccactgtgaggtgaacagagactggctgcagcccctgctgcaccgggtgaaggaggactacaccagggtggtgtgccctgtgattgacatcatcaacctggacaccttcacctacattgaaagtgccagcgagctgcggggcggctttgactggagcctgcacttccagtgggagcagctgagccctgagcagaaggcccggcggctggaccccacagagcccatccgcacccccatcatcgccggcggcctgtttgtgattgacaaggcctggtttgactacctgggcaagtatgacatggacatggacatctggggcggggagaactttgagatctccttccgggtgtggatgtgtggcggcagcctggagatcgtgccctgcagccgggtgggccacgtgttcaggaagaagcacccctacgtgtttcctgatggaaatgccaacacctacatcaagaacaccaagaggacagctgaggtgtggatggatgagtacaagcagtactactatgctgcccggccctttgccctggagcggccctttggaaatgtggagagccggctggacctgaggaagaacctgcgctgccagagcttcaagtggtacctggagaacatctacccagagctgagcatccccaaggagagcagcatccagaagggcaacatccggcagaggcagaagtgcctggagagccagaggcagaacaaccaggagacccccaacctgaagctgagcccctgtgccaaggtgaagggagaagatgccaagagccaggtgtgggccttcacctacacccagcagatcctgcaggaggagctgtgcctgagcgtcatcaccctcttccctggggcccctgtggtgctggtgctgtgcaagaatggagatgaccggcagcagtggaccaagacaggcagccacatcgagcacatcgccagccacctgtgcctggacacagacatgtttggagatggaacagaaaatggcaaggagatcgtggtgaacccctgtgagagcagcctgatgagccagcactgggacatggtgagcagctag

SEQ ID NO: 175434 - DNA, 1560 bp, synthetic construct
  misc_feature 1..1560: note = Description of Artificial Sequence: Synthetic coding sequence
  source 1..1560: mol_type = other DNA
atgaggcggctgacccggcggctggtgctgcctgtgtttggagtgctgtggatcaccgtgctgctcttcttctgggtgaccaagaggaagctggaggtgcccactggacctgaggtgcagacccccaagcccagtgatgctgactgggatgacctgtgggaccagtttgatgaaagacgctacctgaatgccaagaagtggagggtgggagatgacccctacaagctgtatgccttcaaccagcgggagagcgagcgcatcagcagcaacagagccatcccagacaccaggcacctgtctgtgctgaacagaacacccacccacctgatccgggagatcatcctggtggatgacttcagcaatgaccctgatgactgcaagcagctgatcaagctgcccaaggtgaagtgcctgagaaataatgaaaggcagggcctggtgcgcagccgcatcagaggagctgacatcgcccagggcaccaccctgaccttcctggacagccactgtgaggtgaacagagactggctgcagcccctgctgcaccgggtgaaggaggactacaccagggtggtgtgccctgtgattgacatcatcaacctggacaccttcacctacatcgagagcgccagcgagctgcggggcggctttgactggagcctgcacttccagtgggagcagctgagccctgagcagaaggcccggcggctggaccccacagagcccatccgcacccccatcatcgccggcggcctcttcgtcatcgacaaggcctggtttgactacctgggcaagtatgacatggacatggacatctggggcggagaaaattttgagatctccttccgggtgtggatgtgtggcggcagcctggagatcgtgccctgcagccgggtgggccacgtgttcaggaagaagcacccctacgtgtttcctgatggaaatgccaacacctacatcaagaacaccaagaggacagctgaggtgtggatggatgagtacaagcagtactactatgctgcccggccctttgccctggagcggccctttggaaatgtggagagccggctggacctgaggaagaacctgcgctgccagagcttcaagtggtacctggagaacatctacccagagctgagcatccccaaggagagcagcatccagaagggcaacatccggcagaggcagaagtgcctggagagccagaggcagaacaaccaggagacccccaacctgaagctgagcccctgtgccaaggtgaagggggaggatgccaagagccaggtgtgggccttcacctacacccagcagatcctgcaggaggagctgtgcctgagcgtcatcaccctcttccctggggcccctgtggtgctggtgctgtgcaagaatggagatgaccggcagcagtggaccaagacaggcagccacatcgagcacatcgccagccacctgtgcctggacacagacatgtttggagatggaacagaaaatggcaaggagatcgtggtgaacccctgtgagagcagcctgatgagccagcactgggacatggtgagcagctag

SEQ ID NO: 175435 - DNA, 1599 bp, synthetic construct
  misc_feature 1..1599: note = Description of Artificial Sequence: Synthetic coding sequence
  source 1..1599: mol_type = other DNA
atgtccttccccatgagcctggcccggagctctgtgccctttgctgacagcggcctgagcagcagccagcccagtgatgctgactgggatgacctgtgggaccagtttgatgaaagacgctacctgaatgccaagaagtggagggtgggagatgacccctacaagctgtatgccttcaaccagcgggagagcgagcgcatcagcagcaacagagccatcccagacaccaggcacctgcgctgcaccctgctggtgtactgcacagacctgccccccaccagcatcatcatcaccttccacaatgaggcccggagcaccctgctgcggaccatccgctctgtgctgaacagaacacccacccacctgatccgggagatcatcctggtggatgacttcagcaatgaccctgatgactgcaagcagctgatcaagctgcccaaggtgaagtgcctgaggaacaatgaaaggcagggcctggtgcgcagccgcatcagaggagctgacatcgcccagggcaccaccctgaccttcctggacagccactgtgaggtgaacagagactggctgcagcccctgctgcaccgggtgaaggaggactacaccagggtggtgtgccctgtgattgacatcatcaacctggacaccttcacctacattgaaagtgccagcgagctgcggggcggctttgactggagcctgcacttccagtgggagcagctgagccctgagcagaaggcccggcggctggaccccacagagcccatccgcacccccatcatcgccggcggcctgtttgtgattgacaaggcctggtttgactacctgggcaagtatgacatggacatggacatctggggcggggagaactttgagatctccttccgggtgtggatgtgtggcggcagcctggagatcgtgccctgcagccgggtgggccacgtgttcaggaagaagcacccctacgtgtttcctgatggaaatgccaacacctacatcaagaacaccaagaggacagctgaggtgtggatggatgagtacaagcagtactactatgctgcccggccctttgccctggagcggccctttggaaatgtggagagccggctggacctgaggaagaacctgcgctgccagagcttcaagtggtacctggagaacatctacccagagctgagcatccccaaggagagcagcatccagaagggcaacatccggcagaggcagaagtgcctggagagccagaggcagaacaaccaggagacccccaacctgaagctgagcccctgtgccaaggtgaagggagaagatgccaagagccaggtgtgggccttcacctacacccagcagatcctgcaggaggagctgtgcctgagcgtcatcaccctcttccctggggcccctgtggtgctggtgctgtgcaagaatggagatgaccggcagcagtggaccaagacaggcagccacatcgagcacatcgccagccacctgtgcctggacacagacatgtttggagatggaacagaaaatggcaaggagatcgtggtgaacccctgtgagagcagcctgatgagccagcactgggacatggtgagcagctag

SEQ ID NO: 175436 - DNA, 1554 bp, synthetic construct
  misc_feature 1..1554: note = Description of Artificial Sequence: Synthetic coding sequence
  source 1..1554: mol_type = other DNA
atggcccaggatgagagctgccccccatctgatgctgactgggatgacctgtgggaccagtttgatgagcggcgctacctgaatgccaagaagtggagggtgggagatgacccctacaagctgtatgccttcaaccagcgggagagcgagcgcatcagcagcaacagagccatcccagacaccaggcacctgcgctgcaccctgctggtgtactgcacagacctgccccccaccagcatcatcatcaccttccacaatgaggcccggagcaccctgctgcggaccatccgctctgtgctgaacagaacacccacccacctgatccgggagatcatcctggtggatgacttcagcaatgaccctgatgactgcaagcagctgatcaagctgcccaaggtgaagtgcctgagaaataatgaaaggcagggcctggtgcgcagccgcatcagaggagctgacatcgcccagggcaccaccctgaccttcctggacagccactgtgaggtgaacagagactggctgcagcccctgctgcaccgggtgaaggaggactacaccagggtggtgtgccctgtgattgacatcatcaacctggacaccttcacctacatcgagagcgccagcgagctgcggggcggctttgactggagcctgcacttccagtgggagcagctgagccctgagcagaaggcccggcggctggaccccacagagcccatccgcacccccatcatcgccggcggcctcttcgtcatcgacaaggcctggtttgactacctgggcaagtatgacatggacatggacatctggggcggagaaaattttgagatctccttccgggtgtggatgtgtggcggcagcctggagatcgtgccctgcagccgggtgggccacgtgttcaggaagaagcacccctacgtgtttcctgatggaaatgccaacacctacatcaagaacaccaagaggacagctgaggtgtggatggatgagtacaagcagtactactatgctgcccggccctttgccctggagcggccctttggaaatgtggagagccggctggacctgaggaagaacctgcgctgccagagcttcaagtggtacctggagaacatctacccagagctgagcatccccaaggagagcagcatccagaagggcaacatccggcagaggcagaagtgcctggagagccagaggcagaacaaccaggagacccccaacctgaagctgagcccctgtgccaaggtgaagggggaggatgccaagagccaggtgtgggccttcacctacacccagcagatcctgcaggaggagctgtgcctgagcgtcatcaccctcttccctggggcccctgtggtgctggtgctgtgcaagaatggagatgaccggcagcagtggaccaagacaggcagccacatcgagcacatcgccagccacctgtgcctggacacagacatgtttggagatggaacagaaaatggcaaggagatcgtggtgaacccctgtgagagcagcctgatgagccagcactgggacatggtgagcagctag

SEQ ID NO: 175437 - DNA, 1674 bp, synthetic construct
  misc_feature 1..1674: note = Description of Artificial Sequence: Synthetic coding sequence
  source 1..1674: mol_type = other DNA
atgaggcggctgacccggcggctggtgctgcctgtgtttggagtgctgtggatcaccgtgctgctcttcttctgggtgaccaagaggaagctggaggtgcccactggacctgaggtgcagacccccaaggtgtggagcctcttcttcaaggtggccggcatgagcccctgggccccccaggtgcctgtgagccccaccccaccctaccagaggggccacctgcccaccggcggccacctggccgtgtgccacttcccctgcctgctgcaggaggcccagttccacctgcagacccaggtgttcctgcaggtgcgctgcaccctgctggtgtactgcacagacctgccccccaccagcatcatcatcaccttccacaatgaggcccggagcaccctgctgcggaccatccgctctgtgctgaacagaacacccacccacctgatccgggagatcatcctggtggatgacttcagcaatgaccctgatgactgcaagcagctgatcaagctgcccaaggtgaagtgcctgagaaataatgaaaggcagggcctggtgcgcagccgcatcagaggagctgacatcgcccagggcaccaccctgaccttcctggacagccactgtgaggtgaacagagactggctgcagcccctgctgcaccgggtgaaggaggactacaccagggtggtgtgccctgtgattgacatcatcaacctggacaccttcacctacatcgagagcgccagcgagctgcggggcggctttgactggagcctgcacttccagtgggagcagctgagccctgagcagaaggcccggcggctggaccccacagagcccatccgcacccccatcatcgccggcggcctcttcgtcatcgacaaggcctggtttgactacctgggcaagtatgacatggacatggacatctggggcggagaaaattttgagatctccttccgggtgtggatgtgtggcggcagcctggagatcgtgccctgcagccgggtgggccacgtgttcaggaagaagcacccctacgtgtttcctgatggaaatgccaacacctacatcaagaacaccaagaggacagctgaggtgtggatggatgagtacaagcagtactactatgctgcccggccctttgccctggagcggccctttggaaatgtggagagccggctggacctgaggaagaacctgcgctgccagagcttcaagtggtacctggagaacatctacccagagctgagcatccccaaggagagcagcatccagaagggcaacatccggcagaggcagaagtgcctggagagccagaggcagaacaaccaggagacccccaacctgaagctgagcccctgtgccaaggtgaagggggaggatgccaagagccaggtgtgggccttcacctacacccagcagatcctgcaggaggagctgtgcctgagcgtcatcaccctcttccctggggcccctgtggtgctggtgctgtgcaagaatggagatgaccggcagcagtggaccaagacaggcagccacatcgagcacatcgccagccacctgtgcctggacacagacatgtttggagatggaacagaaaatggcaaggagatcgtggtgaacccctgtgagagcagcctgatgagccagcactgggacatggtgagcagctag

SEQ ID NO: 175438 - DNA, 1716 bp, synthetic construct
  misc_feature 1..1716: note = Description of Artificial Sequence: Synthetic coding sequence
  source 1..1716: mol_type = other DNA
atgagaagaagaagcaggatgctgctgtgctttgccttcctgtgggtgctgggcatcgcctactacatgtacagcggcggcggcagcgccctggccggcggggccggcggcggggccggcaggaaagaagactggaatgaaattgaccccatcaagaagaaggacctgcaccacagcaatggagaggagaaggcccagagcatggagaccctgcccccaggcaaggtgcgctggccagacttcaaccaggaggcctacgtgggcggcaccatggtgcgcagcggccaggacccctatgccaggaacaagttcaaccaggtggagagtgacaagctgaggatggaccgggccatcccagacaccaggcatgaccagtgccagaggaagcagtggagggtggacctgcctgccacctctgtggtgatcaccttccacaatgaggcccggagcgccctgctgaggacagtggtgtctgtgctgaagaagagccccccccacctgatcaaggagatcatcctggtggatgactacagcaatgaccctgaagatggagccctgctgggcaagattgagaaggtgcgggtgctgagaaatgaccggcgggagggcctgatgaggagccgggtgagaggagcagatgctgcccaggccaaggtgctgaccttcctggacagccactgtgagtgcaatgagcactggctggagcccctgctggagcgggtggccgaggacaggaccagggtggtgagccccatcattgatgtgatcaacatggacaacttccagtatgtgggcgccagcgctgacctgaagggcggctttgactggaacctggtgttcaagtgggactacatgaccccagagcagaggaggagccggcagggcaaccctgtggcccccatcaagacccccatgattgctgggggcctgtttgtgatggacaagttctactttgaggagctgggcaagtatgacatgatgatggatgtgtggggcggggagaacctggagatctccttccgggtgtggcagtgtggcggcagcctggagatcatcccctgcagccgggtgggccacgtgttcaggaagcagcacccctacaccttccctgggggcagcggcaccgtgtttgccaggaacacccggcgggctgctgaggtgtggatggatgagtacaagaacttctactatgctgctgtgcccagcgccagaaatgtgccctacggcaacatccagagccggctggagctgaggaagaagctgagctgcaagcccttcaagtggtacctggagaatgtgtacccagagctgcgggtgcctgaccaccaggacatcgcctttggagccctgcagcagggcaccaactgcctggacaccctgggccactttgctgatggagtggtgggcgtgtatgagtgccacaatgctgggggcaaccaggagtgggccctgaccaaggagaagtctgtgaagcacatggacctgtgcctgactgtggtggaccgggcccctggcagcctcatcaagctgcagggctgcagagaaaatgacagccggcagaagtgggagcagatcgagggcaacagcaagctgcggcacgtgggcagcaacctgtgcctggacagcaggacagccaagagcggcggcctgtctgtggaggtgtgtggccctgccctgagccagcagtggaagttcaccctgaacctgcagcagtag

SEQ ID NO: 175439 - DNA, 798 bp, synthetic construct
  misc_feature 1..798: note = Description of Artificial Sequence: Synthetic coding sequence
  source 1..798: mol_type = other DNA
atggtgcgcagcggccaggacccctatgccaggaacaagttcaaccaggtggagagtgacaagctgaggatggaccgggccatcccagacaccaggcatgaccagtgccagaggaagcagtggagggtggacctgcctgccacctctgtggtgatcaccttccacaatgaggcccggagcgccctgctgaggacagtggtgtctgtgctgaagaagagccccccccacctgatcaaggagatcatcctggtggatgactacagcaatgaccctgaagatggagccctgctgggcaagattgagaaggtgcgggtgctgagaaatgaccggcgggagggcctgatgaggagccgggtgagaggagcagatgctgcccaggccaaggtgctgaccttcctggacagccactgtgagtgcaatgagcactggctggagcccctgctggagcgggtggccgaggacaggaccagggtggtgagccccatcattgatgtgatcaacatggacaacttccagtatgtgggcgccagcgctgacctgaagggcggctttgactggaacctggtgttcaagtgggactacatgaccccagagcagaggaggagccggcagggcaaccctgtggcccccatcaaggacctggtgccccgggtggccgtgtggtggcagcccggggaccaccctgtgcagccctgtggcaccagggtgcctgaggccgcccccctgcacgtgcccggctggcagtggcactgcctgtgccccaagcaccccccaggcagccggggcctggatggatag

SEQ ID NO: 175440 - DNA, 1086 bp, synthetic construct
  misc_feature 1..1086: note = Description of Artificial Sequence: Synthetic coding sequence
  source 1..1086: mol_type = other DNA
atgagaagaagaagcaggatgctgctgtgctttgccttcctgtgggtgctgggcatcgcctactacatgtacagcggcggcggcagcgccctggccggcggggccggcggcggggccggcaggaaagaagactggaatgaaattgaccccatcaagaagaaggacctgcaccacagcaatggagcagaagatggagccctgctgggcaagattgagaaggtgcgggtgctgagaaatgacagaagagagggcctgatgaggagccgggtgagaggagcagatgctgcccaggccaaggtgctgaccttcctggacagccactgtgaatgtaatgagcactggctggagcccctgctggagcgggtggccgaggacaggaccagggtggtgagccccatcattgatgtgatcaacatggacaacttccagtatgtgggcgccagcgctgacctgaagggcggctttgactggaacctggtgttcaagtgggactacatgaccccagagcagaggaggagccggcagggcaaccctgtggcccccatcaagacccccatgattgctgggggcctgtttgtgatggacaagttctactttgaggagctgggcaagtatgacatgatgatggatgtgtggggcggggagaacctggagatctccttccgggtgtggcagtgtggcggcagcctggagatcatcccctgcagccgggtgggccacgtgttcaggaagcagcacccctacaccttccctgggggcagcggcaccgtgtttgccaggaacaccaggagagctgctgaggtgtggatggatgagtacaagaacttctactatgctgctgtgcccagcgccagaaatgtgccctacggcaacatccagagccggctggagctgaggaagaagctgagctgcaagcccttcaagtggtacctggagaatgtgtacccagagctgcgggtgcctgaccaccaggacatcgccttcggggccctgcagcagggcaccaactgcctggacaccctgggccactttgctgatggagtggtgggcgtgtatgaatgtcatgtggccggcctgcggcagtag

SEQ ID NO: 175441 - DNA, 1602 bp, synthetic construct
  misc_feature 1..1602: note = Description of Artificial Sequence: Synthetic coding sequence
  source 1..1602: mol_type = other DNA
atggctgaccgggaggactggaatgaaattgaccccatcaagaagaaggacctgcaccacagcaatggagaggagaaggcccagagcatggagaccctgcccccaggcaaggtgcgctggccagacttcaaccaggaggcctacgtgggcggcaccatggtgcgcagcggccaggacccctatgccaggaacaagttcaaccaggtggagagtgacaagctgaggatggaccgggccatcccagacaccaggcatgaccagtgccagaggaagcagtggagggtggacctgcctgccacctctgtggtgatcaccttccacaatgaggcccggagcgccctgctgaggacagtggtgtctgtgctgaagaagagccccccccacctgatcaaggagatcatcctggtggatgactacagcaatgaccctgaagatggagccctgctgggcaagattgagaaggtgcgggtgctgagaaatgaccggcgggagggcctgatgaggagccgggtgagaggagcagatgctgcccaggccaaggtgctgaccttcctggacagccactgtgagtgcaatgagcactggctggagcccctgctggagcgggtggccgaggacaggaccagggtggtgagccccatcattgatgtgatcaacatggacaacttccagtatgtgggcgccagcgctgacctgaagggcggctttgactggaacctggtgttcaagtgggactacatgaccccagagcagaggaggagccggcagggcaaccctgtggcccccatcaagacccccatgattgctgggggcctgtttgtgatggacaagttctactttgaggagctgggcaagtatgacatgatgatggatgtgtggggcggggagaacctggagatctccttccgggtgtggcagtgtggcggcagcctggagatcatcccctgcagccgggtgggccacgtgttcaggaagcagcacccctacaccttccctgggggcagcggcaccgtgtttgccaggaacacccggcgggctgctgaggtgtggatggatgagtacaagaacttctactatgctgctgtgcccagcgccagaaatgtgccctacggcaacatccagagccggctggagctgaggaagaagctgagctgcaagcccttcaagtggtacctggagaatgtgtacccagagctgcgggtgcctgaccaccaggacatcgcctttggagccctgcagcagggcaccaactgcctggacaccctgggccactttgctgatggagtggtgggcgtgtatgagtgccacaatgctgggggcaaccaggagtgggccctgaccaaggagaagtctgtgaagcacatggacctgtgcctgactgtggtggaccgggcccctggcagcctcatcaagctgcagggctgcagagaaaatgacagccggcagaagtgggagcagatcgagggcaacagcaagctgcggcacgtgggcagcaacctgtgcctggacagcaggacagccaagagcggcggcctgtctgtggaggtgtgtggccctgccctgagccagcagtggaagttcaccctgaacctgcagcagtag

SEQ ID NO: 175442 - DNA, 1902 bp, synthetic construct
  misc_feature 1..1902: note = Description of Artificial Sequence: Synthetic coding sequence
  source 1..1902: mol_type = other DNA
atggcccacctgaagaggctggtgaagctgcacatcaagaggcactaccacaagaagttctggaagctgggcgctgtgatcttcttcttcatcatcgtgctggtgctgatgcagcgggaggtgtctgtgcagtacagcaaggaggagagcaggatggagaggaacatgaagaacaagaacaagatgctggacctgatgctggaggccgtgaacaacatcaaggatgccatgcccaagatgcagatcggggcccctgtgcggcagaacattgatgctggggagcggccctgcctgcagggctactacacagctgctgagctgaagcctgtgctggaccggcccccccaggacagcaatgcccctggggccagcggcaaggccttcaagaccaccaacctgtctgtggaggagcagaaggagaaggagcggggggaggccaagcactgcttcaatgcctttgccagtgaccgcatcagcctgcaccgggacctgggccctgacacccggcccccagagtgcatcgagcagaagttcaagcgctgcccccccctgcccaccaccagcgtcatcatcgtgttccacaatgaggcctggagcaccctgctgaggacagtgcacagcgtgctgtacagcagccctgccatcctgctgaaggagatcatcctggtggatgatgcctctgtggatgagtacctgcatgacaagctggatgaatatgtgaagcagttcagcatcgtgaagatcgtgcggcagcgggagaggaagggcctcatcacagcccggctgctgggcgccaccgtggccacagctgagaccctgaccttcctggatgcccactgtgagtgcttctacggctggctggagcccctgctggccagaattgctgagaactacacagctgtggtgtccccagacatcgccagcattgacctgaacacctttgagttcaacaagcccagcccctacggcagcaaccacaacagaggcaactttgactggagcctgagctttggctgggagagcctgcctgaccacgagaagcagaggaggaaggatgagacctaccccatcaagacccccacctttgctgggggcctcttcagcatcagcaaggagtactttgagtacatcggcagctatgatgaggagatggagatctggggcggggagaacatcgagatgtccttccgggtgtggcagtgtggcggccagctggagatcatgccctgcagcgtggtgggccacgtgttccgcagcaagagcccccacagcttccccaagggcacccaggtgattgccaggaaccaggtgcggctggccgaggtgtggatggatgagtacaaggagatcttctacagaagaaacacagatgctgccaagatcgtgaagcagaaggcctttggagacctgagcaagagatttgagatcaagcaccggctgcagtgcaagaacttcacctggtacctgaacaacatctacccagaggtgtatgtgcctgacctgaaccctgtgatcagcggctacatcaagtctgtgggccagcccctgtgcctggatgtgggggagaacaaccagggcggcaagcccctcatcatgtacacctgccacggcctgggcggcaaccagtactttgagtacagcgcccagcacgagatccgccacaacatccagaaggagctgtgcctgcacgccgcccagggcctggtgcagctgaaggcctgcacctacaagggccacaagacagtggtgactggagagcagatctgggagatccagaaggaccagctgctgtacaaccccttcctgaagatgtgcctgagcgccaatggagagcaccccagcctggtgtcctgcaaccccagcgaccccctgcagaagtggatcctgagccagaatgactag

SEQ ID NO: 175443 - DNA, 1395 bp, synthetic construct
  misc_feature 1..1395: note = Description of Artificial Sequence: Synthetic coding sequence
  source 1..1395: mol_type = other DNA
atggcccacctgaagaggctggtgaagctgcacatcaagaggcactaccacaagaagttctggaagctgggcgctgtgatcttcttcttcatcatcgtgctggtgctgatgcagcgggaggtgtctgtgcagtacagcaaggaggagagcaggatggagaggaacatgaagaacaagaacaagatgctggacctgatgctggaggccgtgaacaacatcaaggatgccatgcccaagatgcagatcggggcccctgtgcggcagaacattgatgctggggagcggccctgcctgcagggctactacacagctgctgagctgaagcctgtgctggaccggcccccccaggacagcaatgcccctggggccagcggcaaggccttcaagaccaccaacctgtctgtggaggagcagaaggagaaggagcggggggaggccaagcactgcttcaatgcctttgccagtgaccgcatcagcctgcaccgggacctgggccctgacacccggcccccagagtgcatcgagcagaagttcaagcgctgcccccccctgcccaccaccagcgtcatcatcgtgttccacaatgaggcctggagcaccctgctgaggacagtgcacagcgtgctgtacagcagccctgccatcctgctgaaggagatcatcctggtggatgatgcctctgtggatgagtacctgcatgacaagctggatgaatatgtgaagcagttcagcatcgtgaagatcgtgcggcagcgggagaggaagggcctcatcacagcccggctgctgggcgccaccgtggccacagctgagaccctgaccttcctggatgcccactgtgagtgcttctacggctggctggagcccctgctggccagaattgctgagaactacacagctgtggtgtccccagacatcgccagcattgacctgaacacctttgagttcaacaagcccagcccctacggcagcaaccacaacagaggcaactttgactggagcctgagctttggctgggagagcctgcctgaccacgagaagcagaggaggaaggatgagacctaccccatcaagacccccacctttgctgggggcctcttcagcatcagcaaggagtactttgagtacatcggcagctatgatgaggagatggagatctggggcggggagaacatcgagatgtccttccgggtgtggcagtgtggcggccagctggagatcatgccctgcagcgtggtgggccacgtgttccgcagcaagagcccccacagcttccccaagggcacccaggtgattgccaggaaccaggtgcggctggccgaggtgtggatggatgagtacaaggagatcttctacagaagaaacacagatgctgccaagatcgtgaagcagtag

SEQ ID NO: 175444 - DNA, 174 bp, synthetic construct
  misc_feature 1..174: note = Description of Artificial Sequence: Synthetic coding sequence
  source 1..174: mol_type = other DNA
atggcccacctgaagaggctggtgaagctgcacatcaagaggcactaccacaagaagttctggaagctgggcgctgtgatcttcttcttcatcatcgtgctggtgctgatgcagcgggaggtgtctgtgcagtacagcaaggaggagagcaggatggagaggaacatgaagtag

SEQ ID NO: 175445 - DNA, 78 bp, synthetic construct
  misc_feature 1..78: note = Description of Artificial Sequence: Synthetic coding sequence
  source 1..78: mol_type = other DNA
atggcccacctgaagaggctggtgaagctgcacatcaagaggcactaccacaagaagttctggaagctgggcgcctag

SEQ ID NO: 175446 - DNA, 273 bp, synthetic construct
  misc_feature 1..273: note = Description of Artificial Sequence: Synthetic coding sequence
  source 1..273: mol_type = other DNA
atggcccacctgaagaggctggtgaagctgcacatcaagaggcactaccacaagaagttctggaagctgggcgctgtgatcttcttcttcatcatcgtgctggtgctgatgcagcgggaggtgtctgtgcagtacagcaaggaggagagcaggatggagaggaacatgaagaacaagaacaagatgctggacctgatgctggaggccgtgaacaacatcaaggatgccatgcccaagatgcagatcggggcccctgtgcggcagaacatctag

SEQ ID NO: 175447 - DNA, 36 bp, synthetic construct
  misc_feature 1..36: note = Description of Artificial Sequence: Synthetic coding sequence
  source 1..36: mol_type = other DNA
atggcccacctgaagaggctggtgaagctgcactag

SEQ ID NO: 175448 - DNA, 1737 bp, synthetic construct
  misc_feature 1..1737: note = Description of Artificial Sequence: Synthetic coding sequence
  source 1..1737: mol_type = other DNA
atggctgtgcgctggacctgggccggcaagagctgcctgctgctggccttcctgactgtggcctacatctttgtggagctgctggtgtccaccttccacgccagcgctggggccggccgggcccgggagctgggcagccggcggctgagtgacctgcagaagaacacagaggacctgagccggcccctgtacaagaagcccccagctgacagccgggccctgggggagtggggcaaggccagcaagctgcagctgaatgaagatgagctgaagcagcaggaggagctgattgaaagatatgccatcaacatctacctgagtgaccgcatcagcctgcaccgccacatcgaggacaagaggatgtatgagtgcaagagccagaagttcaactaccgcaccctgcccaccaccagcgtcatcatcgccttctacaatgaggcctggagcaccctgctgcggaccatccacagcgtgctggagaccagccctgctgtgctgctgaaggagatcatcctggtggatgacctgagtgacagagtgtacctgaagacccagctggagacctacatcagcaacctggacagagtgcggctcatccgcaccaacaagcgggagggcctggtgcgggcccggctgattggagccacctttgccactggagatgtgctgaccttcctggactgccactgtgagtgcaacagcggctggctggagcccctgctggagcgcatcggcagagatgaaacagctgtggtgtgccctgtgattgacaccatcgactggaacacctttgagttctacatgcagatcggggagcccatgattggaggctttgactggaggctgaccttccagtggcacagcgtgcccaagcaggagcgggaccggcgcatcagcagaattgaccccatccgcagccccaccatggccggcggcctgtttgctgtgtccaagaagtacttccagtacctgggcacctatgacaccggcatggaggtgtggggcggggagaacctggagctgtccttccgggtgtggcagtgtggcggcaagctggagatccacccctgcagccacgtgggccacgtgttccccaagagggccccctatgcccggcccaacttcctgcagaacacagcccgggctgctgaggtgtggatggatgagtacaaggagcacttctacaacagaaatcctccagccaggaaggaggcctacggggacatcagcgagaggaagctgctgcgggagcggctgcgctgcaagagctttgactggtacctgaagaatgtgttccccaacctgcacgtgcctgaagatcggcccggctggcatggagccatccgcagccggggcatcagcagcgagtgcctggactacaacagcccagacaacaaccccaccggggccaacctgagcctgtttggctgccacggccagggcggcaaccagttctttgagtacaccagcaacaaggagatccgcttcaacagcgtgacagagctgtgtgccgaggtgcctgagcagaagaactacgtgggcatgcagaactgccccaaggatggcttccctgtgcctgccaacatcatctggcacttcaaggaggatggcaccatcttccacccccacagcggcctgtgcctgagcgcctaccgcaccccagagggccgcccagatgtgcagatgaggacctgtgatgccctggacaagaaccagatctggagctttgagaagtag

SEQ ID NO: 175449 - DNA, 1869 bp, synthetic construct
  misc_feature 1..1869: note = Description of Artificial Sequence: Synthetic coding sequence
  source 1..1869: mol_type = other DNA
atgaggctgctgcggcggcggcacatgcccctgcggctggccatggtgggctgtgcctttgtgctcttcctgttcctgctgcacagagatgtgagcagccgggaggaggccacagagaagccctggctgaagagcctggtgtccaggaaggaccacgtgctggacctgatgctggaggccatgaacaacctgcgggacagcatgcccaagctgcagatccgggcccctgaggcccagcagaccctcttcagcatcaaccagagctgcctgcccggcttctacaccccagctgagctgaagcccttctgggagcggcccccccaggaccccaatgcccctggagcagatggcaaggccttccagaagagcaagtggacccccctggagacccaggagaaggaggagggctacaagaagcactgcttcaatgcctttgccagtgaccgcatcagcctgcagaggagcctgggccctgacacccggcccccagaatgtgtggaccagaagttccgccgctgcccccccctggccaccaccagcgtcatcatcgtgttccacaatgaggcctggagcaccctgctgaggacagtgtacagcgtgctgcacaccaccccagccatcctgctgaaggagatcatcctggtggatgatgccagcacagaggagcacctgaaggagaagctggagcagtatgtgaagcagctgcaggtggtgcgggtggtgcggcaggaggagaggaagggcctcatcacagcccggctgctgggcgcctctgtggcccaggccgaggtgctgaccttcctggatgcccactgtgagtgcttccacggctggctggagcccctgctggccagaattgctgaggacaagacagtggtggtgtccccagacatcgtgaccatcgacctgaacacctttgaatttgccaagcctgtgcagaggggccgggtgcacagccggggcaactttgactggagcctgaccttcggctgggagaccctgccccctcatgagaagcagaggaggaaggatgagacctaccccatcaagagccccacctttgctgggggcctcttcagcatcagcaagagctactttgagcacatcggcacctatgacaaccagatggagatctggggcggggagaatgtggagatgtccttccgggtgtggcagtgtggcggccagctggagatcatcccctgcagcgtggtgggccacgtgttccgcaccaagagcccccacaccttccccaagggcaccagcgtcatcgccaggaaccaggtgcggctggccgaggtgtggatggacagctacaagaagatcttctacagaagaaacctgcaggccgccaagatggcccaggagaagagctttggagacatcagcgagcggctgcagctgcgggagcagctgcactgccacaacttctcctggtacctgcacaacgtgtacccagagatgtttgtgcctgacctgacccccaccttctacggggccatcaagaacctgggcaccaaccagtgcctggatgtgggggagaacaacagaggaggcaagcccctcatcatgtacagctgccacggcctgggcggcaaccagtactttgagtacaccacccagagggacctgcggcacaacatcgccaagcagctgtgcctgcacgtgtccaagggggccctgggcctgggcagctgccacttcaccgggaagaacagccaggtgcccaaggatgaggagtgggagctggcccaggaccagctgatccggaacagcggcagcggcacctgcctgaccagccaggacaagaagccagccatggccccctgcaaccccagcgacccccaccagctgtggctgtttgtgtag

SEQ ID NO: 175450 - DNA, 1869 bp, synthetic construct; identical to SEQ ID NO: 175449
  misc_feature 1..1869: note = Description of Artificial Sequence: Synthetic coding sequence
  source 1..1869: mol_type = other DNA

SEQ ID NO: 175451 - DNA, 1812 bp, synthetic construct
  misc_feature 1..1812: note = Description of Artificial Sequence: Synthetic coding sequence
  source 1..1812: mol_type = other DNA
atgaggctgctgcggcggcggcacatgcccctgcggctggccatggtgggctgtgcctttgtgctcttcctgttcctgctggtgtccaggaaggaccacgtgctggacctgatgctggaggccatgaacaacctgcgggacagcatgcccaagctgcagatccgggcccctgaggcccagcagaccctcttcagcatcaaccagagctgcctgcccggcttctacaccccagctgagctgaagcccttctgggagaggcctccccaggaccccaatgcccctggagcagatggcaaggccttccagaagagcaagtggacccccctggagacccaggagaaggaggagggctacaagaagcactgcttcaatgcctttgccagtgaccgcatcagcctgcagaggagcctgggccctgacacccggcccccagaatgtgtggaccagaagttccgccgctgcccccccctggccaccaccagcgtcatcatcgtgttccacaatgaggcctggagcaccctgctgaggacagtgtacagcgtgctgcacaccaccccagccatcctgctgaaggagatcatcctggtggatgatgccagcacagaggagcacctgaaggagaagctggagcagtatgtgaagcagctgcaggtggtgcgggtggtgcggcaggaggagaggaagggcctcatcacagcccggctgctgggcgcctctgtggcccaggccgaggtgctgaccttcctggatgcccactgtgagtgcttccacggctggctggagcccctgctggccagaattgctgaggacaagacagtggtggtgtccccagacatcgtgaccatcgacctgaacacctttgaatttgccaagcctgtgcagaggggccgggtgcacagccggggcaactttgactggagcctgaccttcggctgggagaccctgccccctcatgagaagcagaggaggaaggatgagacctaccccatcaagagccccacctttgctgggggcctcttcagcatcagcaagagctactttgagcacatcggcacctatgacaaccagatggagatctggggcggagaaaatgtggagatgtccttccgggtgtggcagtgtggcggccagctggagatcatcccctgcagcgtggtgggccacgtgttccgcaccaagagcccccacaccttccccaagggcacctctgtgattgccaggaaccaggtgcggctggccgaggtgtggatggacagctacaagaagatcttctacagaagaaacctgcaggccgccaagatggcccaggagaagagctttggagacatcagcgagcggctgcagctgcgggagcagctgcactgccacaacttctcctggtacctgcacaacgtgtacccagagatgtttgtgcctgacctgacccccaccttctatggagccatcaagaacctgggcaccaaccagtgcctggatgtgggggagaacaacagaggaggcaagcccctcatcatgtacagctgccacggcctgggcggcaaccagtactttgagtacaccacccagagggacctgcggcacaacatcgccaagcagctgtgcctgcacgtgtccaaaggagccctgggcctgggcagctgccacttcaccgggaagaacagccaggtgcccaaggatgaggagtgggagctggcccaggaccagctgatcagaaattctggcagcggcacctgcctgaccagccaggacaagaagccagccatggccccctgcaaccccagcgacccccaccagctgtggctgtttgtgtag

SEQ ID NO: 175452 - DNA, 1974 bp, synthetic construct
  misc_feature 1..1974: note = Description of Artificial Sequence: Synthetic coding sequence
  source 1..1974: mol_type = other DNA
atgaggctgaagattggcttcatcctgcggagcctgctggtggtgggcagcttcctgggcctggtggtgctgtggagcagcctgacccccaggccagatgaccccagccccctgagcaggatgagagaagatagagatgtgaatgaccccatgcccaacagaggaggaaatggcctggcccctggagaagatcgcttcaagcctgtggtgccctggccccacgtggagggcgtggaggtggacctggagagcatccgccgcatcaacaaggccaagaatgagcaggagcaccacgccggcggggacagccagaaggacatcatgcagaggcagtacctgaccttcaagccccagaccttcacctaccatgaccctgtgctgcggcccggcatcctgggcaactttgagcccaaggagcctgagcccccaggagtggtgggcggccctggagagaaggccaagcccctggtgctgggccctgagttcaagcaggccatccaggccagcatcaaggagtttggcttcaacatggtggccagtgacatgatcagcctggacagatctgtgaatgacctgcggcaggaggagtgcaagtactggcactatgatgagaacctgctgaccagctctgtggtgattgtgttccacaatgaaggctggagcaccctgatgaggacagtgcacagcgtcatcaagaggacccccaggaagtacctggccgagatcgtgctgattgatgacttcagcaacaaggagcacctgaaggagaagctggatgagtacatcaagctgtggaatggcctggtgaaggtgttcagaaatgaaagaagagagggcctcatccaggcccggagcatcggggcccagaaggccaagctgggccaggtgctgatctacctggatgcccactgtgaggtggccgtgaactggtacgcccccctggtggcccccatcagcaaggacaggaccatctgcaccgtgcccctgattgatgtgatcaatggaaacacctatgagatcatcccccagggcggcggagatgaagatggctacgcccggggggcctgggactggagcatgctgtggaagagggtgcccctgaccccccaggagaagaggctgaggaagaccaagacagagccctaccgcagccctgccatggccggcggcctgtttgccatcgagcgggagttcttctttgagctgggcctgtatgaccccggcctgcagatctggggcggagaaaattttgagatctcctacaagatctggcagtgtggcggcaagctgctgtttgtgccctgcagccgggtgggccacatctaccgcctggagggctggcagggcaaccccccacccatctacgtgggcagcagccccaccctgaagaactacgtgcgggtggtggaggtgtggtgggatgagtacaaggactacttctacgccagcaggcctgagagccaggccctgccctacggggacatcagcgagctgaagaagttccgggaggaccacaactgcaagagcttcaagtggttcatggaggagatcgcctatgacatcaccagccactaccccctgccccccaagaatgtggactggggcgagatccggggctttgaaacagcctactgcatcgacagcatgggcaagaccaatggaggctttgtggagctgggcccctgccacaggatgggcggcaaccagctgttccgcatcaatgaggccaaccagctgatgcagtatgaccagtgcctgaccaagggagcagatggcagcaaggtgatgatcacccactgcaacctgaatgagttcaaggagtggcagtacttcaagaacctgcaccgcttcacccacatccccagcggcaagtgcctggacagaagtgaggtgctgcaccaggtgttcatcagcaactgtgacagcagcaagaccacccagaagtgggagatgaacaacatccacagcgtgtag

SEQ ID NO: 175453 - DNA, 717 bp, synthetic construct
  misc_feature 1..717: note = Description of Artificial Sequence: Synthetic coding sequence
  source 1..717: mol_type = other DNA
atgaggacagtgcacagcgtcatcaagaggacccccaggaagtacctggccgagatcgtgctgattgatgacttcagcaacaaggagcacctgaaggagaagctggatgagtacatcaagctgtggaatggcctggtgaaggtgttcagaaatgaaagaagagagggcctcatccaggcccggagcattggagcccagaaggccaagctgggccaggtgctgatctacctggatgcccactgtgaggtggccgtgaactggtacgcccccctggtggcccccatcagcaaggacaggaccacctgcaccgtgcccctgattgactacattgatggaaatgactacagcattgagccccagcagggcggagatgaagatggctttgcccggggggcctgggactggagcctgctgtggaagaggatccccctgagccacaaggagaaggccaagaggaagcacaagacagagccctaccgcagccctgccatggccggcggcctgtttgccatcgagcgggagttcttctttgagctgggcctgtatgaccccggcctgcagatctggggcggcaagaccctgcggagccacaccaggtatggctctgtggtggccaactactacctgttcctggtgctggtgctggacatcagcacagtgctgcgggccggcaaggagatcctgcggcccttcatgctgggcctgctgcagctgtag

SEQ ID NO: 175454 - DNA, 1914 bp, synthetic construct
  misc_feature 1..1914: note = Description of Artificial Sequence: Synthetic coding sequence
  source 1..1914: mol_type = other DNA
atgatgttctggaggaagctgcccaaggccctcttcatcggcctgaccctggccatcgctgtgaacctgctgctggtgttcagcagcaagggcaccctgcagaacctcttcaccggcggcctgcaccgggagctgcccctgcacctgaacaagagatatggagctgtgatcaagaggctgagccacctggaggtggagctgcaggacctgaaggagagcatgaagctggccctgcggcagcaggagaatgtgaacagcaccctgaagagggccaaggatgaggtgcggcccctgctgaaggccatggagaccaaggtgaatgagaccaagaagcacaagacccagatgaagctgttcccccacagccagctgttccggcagtggggcgaggacctgtctgaggcccagcagaaggccgcccaggacctcttcaggaagtttggctacaatgcctacctgagcaaccagctgcccctgaacagaaccatcccagacacccgggactaccgctgcctgaggaagacctaccccagccagctgcccagcctgagcgtcatcctgatctttgtgaatgaggccctgagcatcatccagagggccatcaccagcatcatcaacagaacacccagccggctgctgaaggagatcatcctggtggatgacttcagcagcaatggagagctgaaggtgcacctggatgagaagatcaagctgtacaaccagaagtacccaggcctgctgaagatcatccgccaccctgagaggaagggcctggcccaggccaggaacacaggctgggaggccgccacagcagatgtggtggccatcctggatgcccacatcgaggtgaatgtgggctgggccgagcccatcctggcccgcatccaggaggacagaactgtcatcgtgtcccctgtgtttgacaacatccgctttgacaccttcaagctggacaagtatgagctggccgtggatggcttcaactgggagctgtggtgccgctatgatgccctgccccaggcctggattgacctgcatgatgtgacagcccctgtgaagagccccagcatcatgggcatcctggccgccaacagacacttcctgggggagatcggcagcctggatggcggcatgctgatctatggaggagaaaatgtggagctgagcctgcgggtgtggcagtgtggcggcaaggtggagatcctgccctgcagcagaattgcccacctggagcggcaccacaagccctatgccctggacctgacagctgccctgaagagaaatgccctgcgggtggccgagatctggatggatgagcacaagcacatggtgtacctggcctggaacatccccctgcagaacagcggcatcgactttggagatgtgagcagcaggatggccctgcgggagaagctgaagtgcaagacctttgactggtacctgaagaatgtgtaccccctgctgaagcccctgcacaccatcgtgggctacggccgcatgaagaacctgctggatgaaaatgtgtgcctggaccagggccctgtgcccggcaacacccccatcatgtactactgccacgagttcagcagccagaatgtgtactaccacctgaccggggagctgtatgtgggccagctgattgctgaggccagcgccagtgaccgctgcctgacagaccccgggaaggccgagaagcccaccctggagccctgcagcaaggccgccaagaaccggctgcacatctactgggacttcaagccaggaggagctgtgatcaacagagacaccaagcgctgcctggagatgaagaaggacctgctgggcagccacgtgctggtgctgcagacctgcagcacccaggtgtgggagatccagcacacagtgcgggactggggccagaccaacagccagtag

SEQ ID NO: 175455 - DNA, 648 bp, synthetic construct
  misc_feature 1..648: note = Description of Artificial Sequence: Synthetic coding sequence
  source 1..648: mol_type = other DNA
atggagtttgactgtgagggcctgcggcggctgctgggcaagtacaagttccgggacctgactgtggaggagctgagaaatgtgaatgtgttcttcccccacttcaagtacagcatggacacctacgtgttcaaggacagcagccagaaggacctgctgaacttcaccggcaccatccctgtgatgtaccagggcaacacctacaacatccccatccgcttctggatcctggacagccacccctttgccccacccatctgcttcctgaagcccacagccaacatgggcatcctggtgggcaagcacgtggatgcccagggccgcatctacctgccctacctgcagaactggagccaccccaagagcgtcatcgtgggcctcatcaaggagatgattgccaagttccaggaggagctgcccatgtacagcctgagcagcagtgatgaggcccggcaggtggacctgctggcctacatcgccaagatcacagaaggagtgtctgacaccaacagcaagtcctgggccaaccacgagaacaagacagtgaacaagatcaccgtggtgggcggcggggagctgggcatcgcctgcaccctggccatcagcgccaaggtggagagccgctctgtgacccaggccggcgtgtag

SEQ ID NO: 175456 - DNA, 1416 bp, synthetic construct
  misc_feature 1..1416: note = Description of Artificial Sequence: Synthetic coding sequence
  source 1..1416: mol_type = other DNA
atggagtttgactgtgagggcctgcggcggctgctgggcaagtacaagttccgggacctgactgtggaggagctgagaaatgtgaatgtgttcttcccccacttcaagtacagcatggacacctacgtgttcaaggacagcagccagaaggacctgctgaacttcaccggcaccatccctgtgatgtaccagggcaacacctacaacatccccatccgcttctggatcctggacagccacccctttgccccacccatctgcttcctgaagcccacagccaacatgggcatcctggtgggcaagcacgtggatgcccagggccgcatctacctgccctacctgcagaactggagccaccccaagagcgtcatcgtgggcctcatcaaggagatgattgccaagttccaggaggagctgcccatgtacagcctgagcagcagtgatgaggcccggcaggtggacctgctggcctacatcgccaagatcacagaaggagtgtctgacaccaacagcaagtcctgggccaaccacgagaacaagacagtgaacaagatcaccgtggtgggcggcggggagctgggcatcgcctgcaccctggccatcagcgccaagggcattgctgaccggctggtgctgctggacctgtctgagggcaccaagggggccaccatggacctggagatcttcaacctgcccaacgtggagatcagcaaggacctgagcgccagcgcccacagcaaggtggtgatcttcaccgtgaacagcctgggcagcagccagagctacctggatgtggtgcagagcaatgtggacatgttccgggccctggtgcctgccctgggccactacagccagcacagcgtgctgctggtggccagccagcctgtggagatcatgacctacgtgacctggaagctgagcaccttccctgccaacagagtgattggaattggctgcaacctggacagccagaggctgcagtacatcatcaccaacgtgctgaaggcccagaccagcggcaaggaggtgtgggtgattggagagcagggcgaggacaaggtgctgacctggagcggccaggaggaggtggtgagccacaccagccaggtgcagctgagcaacagagccatggagctgctgcgggtgaagggccagaggtcctggagcgtgggcctgtctgtggccgacatggtggacagcatcgtgaacaacaagaagaaggtgcacagcgtgtctgccctggccaagggctactatgacatcaacagcgaggtgttcctgagcctgccctgcatcctgggcaccaacggggtgtctgaggtgatcaagaccaccctgaaggaggacacagtgacagagaagctgcagagcagcgccagcagcatccacagcctgcagcagcagctgaagctgtag

SEQ ID NO: 175457 - DNA, 747 bp, synthetic construct
  misc_feature 1..747: note = Description of Artificial Sequence: Synthetic coding sequence
  source 1..747: mol_type = other DNA
atggacctggagatcttcaacctgcccaacgtggagatcagcaaggacctgagcgccagcgcccacagcaaggtggtgatcttcaccgtgaacagcctgggcagcagccagagctacctggatgtggtgcagagcaatgtggacatgttccgggccctggtgcctgccctgggccactacagccagcacagcgtgctgctggtggccagccagcctgtggagatcatgacctacgtgacctggaagctgagcaccttccctgccaacagagtcatcggcatcggctgcaacctggacagccagaggctgcagtacatcatcaccaacgtgctgaaggcccagaccagcggcaaggaggtgtgggtgattggagagcagggcgaggacaaggtgctgacctggagcggccaggaggaggtggtgagccacaccagccaggtgcagctgagcaacagagccatggagctgctgcgggtgaagggccagaggtcctggagcgtgggcctgtctgtggccgacatggtggacagcatcgtgaacaacaagaagaaggtgcacagcgtgtctgccctggccaagggctactatgacatcaacagcgaggtgttcctgagcctgccctgcatcctgggcaccaatggagtgtctgaggtgatcaagaccaccctgaaggaggacacagtgacagagaagctgcagagcagcgccagcagcatccacagcctgcagcagcagctgaagctgtag

SEQ ID NO: 175458 - DNA, 1140 bp, synthetic construct
  misc_feature 1..1140: note = Description of Artificial Sequence: Synthetic coding sequence
  source 1..1140: mol_type = other DNA
atggagtttgactgtgagggcctgcggcggctgctgggcaagtacaagttccgggacctgactgtggaggagctgagaaatgtgaatgtgttcttcccccacttcaagtacagcatggacacctacgtgttcaaggacagcagccagaaggacctgctgaacttcaccggcaccatccctgtgatgtaccagggcaacacctacaacatccccatccgcttctggatcctggacagccacccctttgccccacccatctgcttcctgaagcccacagccaacatgggcatcctggtgggcaagcacgtggatgcccagggccgcatctacctgccctacctgcagaactggagccaccccaagagcgtcatcgtgggcctcatcaaggagatgattgccaagttccaggaggagctgcccatgtacagcctgagcagcagtgatgaggcccggcaggtggacctgctggcctacatcgccaagatcacagaaggagtgtctgacaccaacagcaagtcctgggccaaccacgagaacaagacagtgaacaagatcaccgtggtgggcggcggggagctgggcatcgcctgcaccctggccatcagcgccaagggcattgctgaccggctggtgctgctggacctgtctgagggcaccaagggggccaccatggacctggagatcttcaacctgcccaacgtggagatcagcaaggacctgagcgccagcgcccacagcaaggtggtgatcttcaccgtgaacagcctgggcagcagccagagctacctggatgtggtgcagagcaatgtggacatgttccgggccctggtgcctgccctgggccactacagccagcacagcgtgctgctggtggccagccagcctgtggagatcatgacctacgtgacctggaagctgagcaccttccctgccaacagagtgattggaattggctgcaacctggacagccagaggctgcagtacatcatcaccaacgtgctgaaggcccagaccagcggcaaggaggtgtgggtgattggagagcagggcgaggacaaggtgctgacctggagcggccaggaggaggtggtgagccacaccagccaggtgcagctgagcaacagagacatcatgatctag

SEQ ID NO: 175459 - DNA, 1350 bp, synthetic construct
  misc_feature 1..1350: note = Description of Artificial Sequence: Synthetic coding sequence
  source 1..1350: mol_type = other DNA
atggagtttgactgtgagggcctgcggcggctgctgggcaagtacaagttccgggacctgactgtggaggagctgagaaatgtgaatgtgttcttcccccacttcaagtacagcatggacacctacggcaacacctacaacatccccatccgcttctggatcctggacagccacccctttgccccacccatctgcttcctgaagcccacagccaacatgggcatcctggtgggcaagcacgtggatgcccagggccgcatctacctgccctacctgcagaactggagccaccccaagagcgtcatcgtgggcctcatcaaggagatgattgccaagttccaggaggagctgcccatgtacagcctgagcagcagtgatgaggcccggcaggtggacctgctggcctacatcgccaagatcacagaaggagtgtctgacaccaacagcaagtcctgggccaaccacgagaacaagacagtgaacaagatcaccgtggtgggcggcggggagctgggcatcgcctgcaccctggccatcagcgccaagggcattgctgaccggctggtgctgctggacctgtctgagggcaccaagggggccaccatggacctggagatcttcaacctgcccaacgtggagatcagcaaggacctgagcgccagcgcccacagcaaggtggtgatcttcaccgtgaacagcctgggcagcagccagagctacctggatgtggtgcagagcaatgtggacatgttccgggccctggtgcctgccctgggccactacagccagcacagcgtgctgctggtggccagccagcctgtggagatcatgacctacgtgacctggaagctgagcaccttccctgccaacagagtgattggaattggctgcaacctggacagccagaggctgcagtacatcatcaccaacgtgctgaaggcccagaccagcggcaaggaggtgtgggtgattggagagcagggcgaggacaaggtgctgacctggagcggccaggaggaggtggtgagccacaccagccaggtgcagctgagcaacagagccatggagctgctgcgggtgaagggccagaggtcctggagcgtgggcctgtctgtggccgacatggtggacagcatcgtgaacaacaagaagaaggtgcacagcgtgtctgccctggccaagggctactatgacatcaacagcgaggtgttcctgagcctgccctgcatcctgggcaccaacggggtgtctgaggtgatcaagaccaccctgaaggaggacacagtgacagagaagctgcagagcagcgccagcagcatccacagcctgcagcagcagctgaagctgtag

SEQ ID NO: 175460 - DNA, 429 bp, synthetic construct
  misc_feature 1..429: note = Description of Artificial Sequence: Synthetic coding sequence
  source 1..429: mol_type = other DNA
atgggagacaagcccccaggcttccggggcagccgggactggattggctgtgtggaggccagcctgtgcctggcccactttggaggcccccagggccgcctgtgccacgtgccccggggcgtgggcctgcacggggagctggagcggctgtacagccactttgctgggggcggcggccctgtgatggtgggcggagatgctgatgcccggagcaaggccctgctgggcgtgtgtgtgggcagcggcacagaggcctacgtgctggtgctggacccccactactggggcacccccaagagccccagcgagctgcaggccgccggctgggtgggctggcaggaggtgtctgctgcctttgaccccaacagcttctacaacctgtgcctgaccagcctgagcagccagcagcagcagaggaccctggactag

SEQ ID NO: 175461 - DNA, 1410 bp, synthetic construct
  misc_feature 1..1410: note = Description of Artificial Sequence: Synthetic coding sequence
  source 1..1410: mol_type = other DNA
atggtgatcagcgagagcatggacatcctcttccgcatccggggcggcctggacctggccttccagctggccaccccaaatgagatcttcctgaagaaggccctgaagcacgtgctgagtgacctgagcaccaagctgagcagcaatgccctggtgttccgcatctgccacagctctgtgtacatctggcccagcagtgacatcaacaccatccctggagagctgacagatgccagcgcctgcaagaacatcctgcgcttcatccagtttgagcctgaggaggacatcaagaggaagttcatgaggaagaaggacaagaagctgagtgacatgcaccagatcgtgaacatcgacctgatgctggagatgagcaccagcctggccgctgtgacccccatcatcgagcgggagagcggcggccaccactacgtgaacatgaccctgcctgtggatgctgtgatctctgtggcccctgaggagacctggggcaaggtgaggaagctgctggtggatgccatccacaaccagctgacagacatggagaagtgcatcctgaagtacatgaagggcaccagcatcgtggtgcctgagcccctgcacttcctgctgcccgggaagaagaacctggtgaccatctcctaccccagcggcatcccagatggccagctgcaggcctacaggaaggagctgcatgacctcttcaacctgccccatgaccggccctacttcaagaggagcaatgcctaccacttcccagatgagccctacaaggatggctacatccggaacccccacacctacctgaacccccccaacatggagaccggcatgatctacgtggtgcagggcatctacggctaccaccactacatgcaggacagaattgatgacaatggctggggctgtgcctaccgcagcctgcagaccatctgctcctggttcaagcaccagggctacacagagaggagcatccccacccaccgggagatccagcaggccctggtggatgctggggacaagccagccacctttgtgggcagccggcagtggattggcagcattgaggtgcagctggtgctgaaccagctgattggcatcaccagcaagatcctgtttgtgtcccagggcagcgagatcgccagccagggccgggagctggccaaccacttccagagcgagggcacccctgtgatgattggaggcggcgtgctggcccacaccatcctgggcgtggcctggaatgagatcaccggccagatcaagttcctgatcctggacccccactacaccggggctgaggacctgcaggtgatcctggagaagggctggtgtggctggaagggccctgacttctggaacaaggatgcctactacaacctgtgcctgccccagaggcccaacatgatctag

SEQ ID NO: 175462 - DNA, 2484 bp, synthetic construct
  misc_feature 1..2484: note = Description of Artificial Sequence: Synthetic coding sequence
  source 1..2484: mol_type = other DNA
atggtggtgcagaagccccacggcaccatggagtacacagctggcaaccaggacaccctgaacagcatcgccctgaagttcaacatcacccccaacaagctggtggagctgaacaagctgttcacccacaccatcgtgcccggccaggtgctgtttgtgcctgatgccaacagccccagcagcaccctgcggctgagcagcagcagccctggggccaccgtgagccccagcagcagtgatgctgaatatgacaagctgcctgatgctgacctggccaggaaggccctgaagcccatcgagcgggtgctgagcagcaccagtgaagaagatgagcccggggtggtgaagttcctgaagatgaactgccgctacttcacagatggaaaaggagtggtgggcggcgtgatgattgtgacccccaacaacatcatgtttgacccccacaagagtgaccccctggtgattgaaaatggctgtgaggagtatggcctcatctgccccatggaggaggtggtgtccatcgccctgtacaatgacatcagccacatgaagatcaaggatgccctgcccagccctggagagtgggaggacctggccagcgagaaggacatcaaccccttcagcaagttcaagagcatcaacaaggagaagaggcagcagaatggagagaagatcatgaccagtgacagccggcccatcgtgcccctggagaagagcacaggccacacccccaccaagcccagcggcagctctgtgtctgagaagctgaagaagctggacagcagccgggagaccagccacggcagccccaccgtgaccaagctgagcaaggagcccagcgacaccagcagcgcctttgagagcacagccaaggagaacttcctgggagaagatgatgactttgtggacctggaggagctgagcagccagacaggaggcggcatgcacaagaaggacaccctgaaggaatgtctgagcctggaccctgaggagaggaagaaggccgagagccagatcaacaacagcgctgtggagatgcaggtgcagagcgccctggccttcctgggcacagaaaatgatgtggagctgaagggggccctggacctggagacctgtgagaagcaggacatcatgcctgaggtggacaagcagagcggcagccctgagagccgggtggagaacaccctgaacatccacgaggacctggacaaggtgaagctgattgagtactacctgaccaagaacaaggagggcccccaggtgtctgagaacctgcagaagacagagctgagtgatggcaagagcattgagcccggcggcatcgacatcaccctgagcagcagcctgagccaggccggggaccccatcacagagggcaacaaggagccagacaagacctgggtgaagaagggggagcccctgcctgtgaagctgaacagcagcacagaggccaacgtcatcaaggaggccctggacagcagcctggagagcaccctggacaacagctgccagggcgcccagatggacaacaagtctgaggtgcagctgtggctgctgaagaggatccaggtgcccatcgaggacatcctgcccagcaaggaggagaagagcaagaccccacccatgttcctgtgcatcaaggtgggcaagcccatgaggaagagctttgccacccacacagctgccatggtgcagcagtatggcaagaggaggaagcagcctgagtactggtttgctgtgccccgggagcgggtggaccacctgtacaccttctttgtgcagtggagcccagatgtgtatggcaaggatgccaaggagcagggctttgtggtggtggagaaggaggagctgaacatgattgacaacttcttcagcgagcccaccaccaagtcctgggagatcatcaccgtggaggaggccaagaggaggaagagcacctgcagctactatgaagatgaagatgaggaggtgctgcctgtgctgcggccccacagcgccctgctggagaacatgcacatcgagcagctggcccggcggctgcctgcccgggtgcagggctacccctggaggctggcctacagcaccctggagcacggcaccagcctgaagaccctgtacaggaagagcgccagcctggacagccctgtgctgctggtgatcaaggacatggacaaccagatctttggagcctatgccacccaccccttcaagttcagtgaccactactatggaactggagagaccttcctgtacaccttcagcccccacttcaaggtgttcaagtggagcggagaaaattcctacttcatcaatggagacatcagcagcctggagctgggcggcggcggcggccgcttcggcctgtggctggatgctgacctgtaccacggccgcagcaacagctgcagcaccttcaacaatgacatcctgagcaagaaggaggacttcatcgtgcaggacctggaggtgtgggcctttgattag

SEQ ID NO: 175463 - DNA, 735 bp, synthetic construct; identical to SEQ ID NO: 169712
  misc_feature 1..735: note = Description of Artificial Sequence: Synthetic coding sequence
  source 1..735: mol_type = other DNA

SEQ ID NO: 175464 - DNA, 741 bp, synthetic construct
  misc_feature 1..741: note = Description of Artificial Sequence: Synthetic coding sequence
  source 1..741: mol_type = other DNA
atggctgctgctgctgccaccaagatcctgctgtgcctgcccctgctgctgctgctgagcggctggagcagagctggccgggctgacccccacagcctgtgctatgacatcaccgtcatccccaagttccggcccggcccccgctggtgtgctgtgcagggccaggtggatgagaagaccttcctgcactatgactgtggcaacaagacagtgacccctgtgagccccctgggcaagaagctgaatgtgaccacagcctggaaggcccagaaccctgtgctgcgggaggtggtggacatcctgacagagcagctgcgggacatccagctggagaactacacccccaaggagcccctgaccctgcaggccaggatgagctgtgagcagaaggccgagggccacagcagcggctcctggcagttctcctttgatggccagatcttcctgctgtttgattctgagaagaggatgtggaccaccgtgcaccctggggccaggaagatgaaggagaagtgggagaatgacaaggtggtggccatgtccttccactacttctccatgggagactgcatcggctggctggaggacttcctgatgggcatggacagcaccctggagcccagcgctggggcccccctggccatgagcagcggcaccacccagctgcgggccacagccaccaccctcatcctgtgctgcctgctgatcatcctgccctgcttcatcctgcccggcatctag

SEQ ID NO: 175465 - DNA, 510 bp, synthetic construct
  misc_feature 1..510: note = Description of Artificial Sequence: Synthetic coding sequence
  source 1..510: mol_type = other DNA
atggctgctgctgccagccctgccatcctgccccggctggccatcctgccctacctgctgtttgactggagcggcaccggccgggcagatgcccacagcctgtggtacaacttcaccatcatccacctgcccaggcatggccagcagtggtgtgaggtgcagagccaggtggaccagaagaacttcctgtcctatgactgtggcagtgacaaggtgctgtccatgggccacctggaggagcagctgtatgccacagatgcctggggcaagcagctggagatgctgcgggaggtgggccagaggctgcggctggagctggccgacacagagctggaggacttcaccccatctggccccctgaccctgcaggtgaggatgagctgtgaatgtgaggctgatggctacatccggggctcctggcagttctcctttgatggcaggaagttcctgctgtttgacagcaacaacaggaagtggacagtggtgcacgccggcctgggcaccagctag

SEQ ID NO: 175466 - DNA, 735 bp, synthetic construct
  misc_feature 1..735: note = Description of Artificial Sequence: Synthetic coding sequence
  source 1..735: mol_type = other DNA
atggctgctgctgccagccctgccatcctgccccggctggccatcctgccctacctgctgtttgactggagcggcaccggccgggcagatgcccacagcctgtggtacaacttcaccatcatccacctgcccaggcatggccagcagtggtgtgaggtgcagagccaggtggaccagaagaacttcctgtcctatgactgtggcagtgacaaggtgctgtccatgggccacctggaggagcagctgtatgccacagatgcctggggcaagcagctggagatgctgcgggaggtgggccagaggctgcggctggagctggccgacacagagctggaggacttcaccccatctggccccctgaccctgcaggtgaggatgagctgtgaatgtgaggctgatggctacatccggggctcctggcagttctcctttgatggcaggaagttcctgctgtttgacagcaacaacaggaagtggacagtggtgcacgccggggcccggaggatgaaggagaagtgggagaaggacagcggcctgaccaccttcttcaagatggtgtccatgagggactgcaagtcctggctgcgggacttcctgatgcacaggaagaagaggctggagcccacagccccacccaccatggcccctggcctggcccagcccaaggccatcgccaccaccctgagcccctggagcttcctgatcatcctgtgcttcatcctgcccggcatctag

SEQ ID NO: 175467 - DNA, 393 bp, synthetic construct
  misc_feature 1..393: note = Description of Artificial Sequence: Synthetic coding sequence
  source 1..393: mol_type = other DNA
atggctgctgctgccagccctgccatcctgccccggctggccatcctgccctacctgctgtttgactggagcggcaccggccgggcagaggagcagctgtatgccacagatgcctggggcaagcagctggagatgctgcgggaggtgggccagaggctgcggctggagctggccgacacagagctggaggacttcacccccagcggccccctgaccctgcaggtgaggatgagctgtgaatgtgaggctgatggctacatccggggctcctggcagttctcctttgatggcaggaagttcctgctgtttgacagcaacaacaggaagtggacagtggtgcatgctggggcccggaggatgaaggagaagtgggagaagagccacctggagtag

SEQ ID NO: 175468 - DNA, 735 bp, synthetic construct; identical to SEQ ID NO: 175466
  misc_feature 1..735: note = Description of Artificial Sequence: Synthetic coding sequence
  source 1..735: mol_type = other DNA

SEQ ID NO: 175469 - DNA, 663 bp, synthetic construct
  misc_feature 1..663: note = Description of Artificial Sequence: Synthetic coding sequence
  source 1..663: mol_type = other DNA
atgaaggtgaagaagggcggcggcggggccggcacagccacagagagcgcccctggccccagcggccagagcgtggcccccatcccccagcccccagctgagagcgagagcggcagcgagagcgagccagatgctggccctggccccaggcctggccccctgcagaggaagcagcccatcggcccagaagatgtgctgggcctgcagaggatcaccggggactacctgtgcagccctgaggagaacatctacaagattgactttgtgcgcttcaagatccgggacatggacagcggcaccgtgctgtttgagatcaagaagccccctgtgtctgagcggctgcccatcaacagaagagacctggaccccaatgccggccgctttgtgcgctaccagttcaccccagccttcctgcggctgcggcaggtgggcgccaccgtggagttcaccgtgggggacaagcctgtgaacaacttcaggatgattgaaagacactacttcaggaaccagctgctgaagagctttgacttccacttcggcttctgcatccccagcagcaagaacacctgtgagcacatctatgacttcccccccctgtctgaggagctgagcgcccgggccggcagcagcggcagcggggaggtgggcgccagccgggactag

SEQ ID NO: 175470 - DNA, 723 bp, synthetic construct
  misc_feature 1..723: note = Description of Artificial Sequence: Synthetic coding sequence
  source 1..723: mol_type = other DNA
atgaaggtgaagaagggcggcggcggggccggcacagccacagagagcgcccctggccccagcggccagagcgtggcccccatcccccagcccccagctgagagcgagagcggcagcgagagcgagccagatgctggccctggccccaggcctggccccctgcagaggaagcagcccatcggcccagaagatgtgctgggcctgcagaggatcaccggggactacctgtgcagccctgaggagaacatctacaagattgactttgtgcgcttcaagatccgggacatggacagcggcaccgtgctgtttgagatcaagaagccccctgtgtctgagcggctgcccatcaacagaagagacctggaccccaatgccggccgctttgtgcgctaccagttcaccccagccttcctgcggctgcggcaggtgggcgccaccgtggagttcaccgtgggggacaagcctgtgaacaacttcaggatgattgaaagacactacttcaggaaccagctgctgaagagctttgacttccacttcggcttctgcatccccagcagcaagaacacctgtgagcacatctatgacttcccccccctgtctgaggagctgatcagcgagatgatccgccacccctatgagacccagagcgacagcttctactttgtggatgaccggctggtgatgcacaacaaggctgactacagctacagcggcaccccctag

SEQ ID NO: 175471 - DNA, 627 bp, synthetic construct
  misc_feature 1..627: note = Description of Artificial Sequence: Synthetic coding sequence
  source 1..627: mol_type = other DNA
atgaaggtgaagaagggcggcggcggggccggcacagccacagagagcgcccctggccccagcggccagagcgtggcccccatcccccagcccccagctgagagcgagagcggcagcgagagcgagccagatgctggccctggccccaggcctggccccctgcagaggaagcagcccatcggcccagaagatgtgctgggcctgcagaggatcaccggcggggcccggcccctcttccctgcctggaggttcaagatccgggacatggattctggaacagtgctgtttgagatcaagaagccccctgtgtctgagcggctgcccatcaacagaagagacctggaccccaatgccggccgctttgtgcgctaccagttcaccccagccttcctgcggctgcggcaggtgggcgccaccgtggagttcaccgtgggggacaagcctgtgaacaacttcaggatgattgagcggcactacttcaggaaccagctgctgaagagctttgacttccacttcggcttctgcatccccagcagcaagaacacctgtgagcacatctatgacttcccccccctgtctgaggagctgagcgcccgggccggcagcagcggcagcggggaggtgtag

SEQ ID NO: 175472 - DNA, 5112 bp, synthetic construct
  misc_feature 1..5112: note = Description of Artificial Sequence: Synthetic coding sequence
  source 1..5112: mol_type = other DNA
ctgagcctgctgtgtgtgtccctgaagaaggccaagtttgatggagcccaggagaagttcaacacctacgtgaccctgaaggtgcagaatgtgaagagcaccaccatcgctgtgcggggcagccagcccagctgggagcaggacttcatgtttgagatcaaccggctggacctgggcctgactgtggaggtgtggaacaagggcctcatctgggacaccatggtgggcaccgtgtggatccccctgcggaccatccggcagagcaatgaggagggccctggagagtggctgaccctggacagccaggtgatcatggctgacagcgagatctgtggcaccaaggaccccaccttccaccgcatcctgctggacaccaggtttgagctgcccctggacatccctgaggaggaggcccgctactgggccaagaagctggagcagctgaatgccatgagggaccaggatgagtacagcttccaggatgagcaggacaagcccctgcctgtgcccagcaaccagtgctgcaactggaactacttcggctggggcgagcagcacaatgatgatcctgacagcgctgtggatgaccgggacagcgactacagaagtgagaccagcaacagcatccccccaccctactacaccaccagccagcccaatgcctctgtgcaccagtacagcgtgcggcccccacccctgggcagccgggagagctacagcgacagcatgcacagctatgaggagttcagcgagccccaggccctgagccccaccggcagcagccgctatgccagcagcggggagctgagccagggcagcagccagctgtctgaggactttgatcctgatgagcacagcctgcagggcagtgacatggaggatgagcgggaccgggacagctaccacagctgccacagctctgtgtcctaccacaaggacagcccccgctgggaccaggatgaggaggagctggaggaggacctggaggacttcctggaggaggaggagctgcctgaagatgaggaggagctggaggaggaggaggaggaggtgcctgatgacctgggcagctatgcccagcgggaggatgtggccgtggccgagcccaaggacttcaagaggatcagcctgcccccagctgcccctgggaaggaggacaaggcccctgtggcccccacagaggccccagacatggccaaggtggcccccaagccagccaccccagacaaggtgcctgctgctgagcagatccctgaggccgagccccccaaggatgaggagagcttccggcccagagaagatgaggagggccaggagggccaggacagcatgagccgggccaaggccaactggctgcgggccttcaacaaggtgaggatgcagctgcaggaggcccggggggagggggagatgagcaagagcctgtggttcaagggcggccctgggggcggcctcatcatcatcgacagcatgccagacatcaggaagaggaagcccatccccctggtgtctgacctggccatgagcctggtgcagagcaggaaggccggcatcaccagcgccctggccagcagcaccctgaacaatgaggagctgaagaaccacgtgtacaagaagaccctgcaggccctgatctaccccatcagctgcaccaccccccacaactttgaggtgtggacagccaccacccccacctactgctatgaatgtgagggcctgctgtggggcatcgcccggcagggcatgcgctgcacagaatgtggggtgaagtgccacgagaagtgccaggacctgctgaatgctgactgcctgcagagagctgctgagaagagcagcaagcacggggctgaggacaggacccagaacatcatcatggtgctgaaggacaggatgaagatccgggagaggaacaagccagagatctttgagctgatccaggagatctttgctgtgaccaagacagcccacacccagcagatgaaggctgtgaagcagagcgtgctggatggcaccagcaagtggagcgccaagatcagcatcaccgtggtgtgtgcccagggcctgcaggccaaggacaagacaggcagcagtgacccctacgtgacagtgcaggtgggcaagaccaagaagaggaccaagaccatctacggcaacctgaaccctgtgtgggaggagaacttccactttgagtgccacaacagcagtgaccgcatcaaggtgcgggtgtgggatgaagatgatgacatcaagagccgggtgaagcagcgcttcaagcgggagagtgatgacttcctgggccagaccatcatcgaggtgaggaccctgagcggggagatggatgtgtggtacaacctggacaagaggacagacaagtctgctgtgtctggggccatccggctgcacatctctgtggagatcaagggggaggagaaggtggccccctaccacgtgcagtacacctgcctgcacgagaacctcttccactttgtgacagatgtgcagaacaacggggtggtgaagatcccagatgccaagggagatgatgcctggaaggtgtactatgatgaaacagcccaggagatcgtggatgaatttgccatgagatatggagtggagagcatctaccaggccatgacccactttgcctgcctgagcagcaagtacatgtgccctggggtgcctgctgtgatgagcaccctgctggccaacatcaatgcctactatgcccacaccacagccagcaccaacgtgtctgccagtgacagatttgctgccagcaactttgggaaggagagatttgtgaagctgctggaccagctgcacaacagcctgagaattgacctgtccatgtacagaaacaacttccctgccagcagccctgagcggctgcaggacctgaagagcacagtggacctgctgaccagcatcaccttcttcaggatgaaggtgcaggagctgcagagccccccccgggccagccaggtggtgaaggactgtgtgaaggcctgcctgaacagcacctatgagtacatcttcaacaactgccacgagctgtacagccgggagtaccagacagatcctgccaagaagggggaggtgctgcctgaggagcagggccccagcatcaagaacctggacttctggagcaagctgatcaccctgattgtgtccatcatcgaggaggacaagaacagctacaccccctgcctgaaccagttcccccaggagctgaatgtgggcaagatctctgctgaggtgatgtggaacctgtttgcccaggacatgaagtatgccatggaggagcatgacaagcaccggctgtgcaagtctgctgactacatgaacctgcacttcaaggtgaagtggctgtacaatgaatatgtgacagagctgcctgccttcaaggacagagtgcctgagtacccagcctggtttgagcccttcgtcatccagtggctggatgaaaatgaggaggtgtcccgggacttcctgcatggagccctggagcgggacaagaaggatggcttccagcagaccagcgagcacgccctcttcagctgcagcgtggtggatgtgttcagccagctgaaccagagctttgagatcatcaagaagctggagtgcccagacccccagatcgtgggccactacatgagaagatttgccaagaccatcagcaatgtgctgctgcagtatgctgacatcatcagcaaggactttgccagctactgcagcaaggagaaggagaaggtgccctgcatcctgatgaacaacacccagcagctgcgggtgcagctggagaagatgtttgaggccatgggcggcaaggagctggatgctgaggccagtgacatcctgaaggagctgcaggtgaagctgaacaacgtgctggatgagctgagccgggtgtttgccaccagcttccagccccacatcgaggagtgtgtgaagcagatgggagacatcctgagccaggtgaagggcactggaaatgtgcctgccagcgcctgcagctctgtggcccaggatgctgacaacgtgctgcagcccatcatggacctgctggacagcaacctgaccctgtttgccaagatctgtgagaagacagtgctgaagagggtgctgaaggagctgtggaagctggtgatgaacaccatggagaagaccatcgtgctgccccccctgacagaccagaccctgcagggcaacctgctgaggaagcacggcaagggcctggagaagggccgggtgaagctgcccagccacagtgatggcacccagatgatcttcaatgctgccaaggagctgggccagctgagcaagctgaaggaccacatggtgcgggaggaggccaagagcctgacccccaagcagtgtgctgtggtggagctggccctggacaccatcaagcagtacttccacgccggcggcgtgggcctgaagaagaccttcctggagaagagcccagacctgcagagcctgcgctatgccctgagcctgtacacccaggccacagacctgctgatcaagacctttgtgcagacccagagcgcccagggcctgggcgtggaggaccctgtgggggaggtgtctgtgcacgtggagctgttcacccaccctggcaccggggagcacaaggtgacagtgaaggtggtggccgccaatgacctgaagtggcagaccagcggcatcttccggcccttcatcgaggtgaacatcatcggcccccagctgagtgacaagaagaggaagtttgccaccaagagcaagaacaacagctgggcccccaagtacaatgaaagcttccagttcaccctgtctgcagatgctggcccagaatgttatgagctgcaggtgtgtgtgaaggactactgctttgcccgggaggacagaacagtgggcctggccgtgctgcagctgcgggagctggcccagaggggcagcgctgcctgctggctgcccctgggccgccgcatccacatggatgacaccggcctgactgtgctgcgcatcctgagccagaggagcaatgatgaggtggccaaggagtttgtgaagctgaagagtgacaccaggtctgctgaggagggcggggccgccccagccccctag

SEQ ID NO: 175473 - DNA, 5376 bp, synthetic construct
  misc_feature 1..5376: note = Description of Artificial Sequence: Synthetic coding sequence
  source 1..5376: mol_type = other DNA
atgggcggcggcggcacctgcaccatctctgtgcaggtgcgggtgtgcacaggaggcaacctgctgggcggcagaagaagacccctgagcccctgcaatgaggaggtgtggggcgaggcccccctgcccggggcccggcccttcaatgcccccccagcccggagcgccccagcccccagcggcgtgcccggcctgcggctgcctgccccccaccagaggcacagcaggcctggccgcctgcggcccacctgtgagctgggggacatgagcctgctgtgtgtgggcgtgaagaaggccaagtttgatggagcccaggagaagttcaacacctacgtgaccctgaaggtgcagaatgtgaagagcaccaccatcgctgtgcggggcagccagcccagctgggagcaggacttcatgtttgagatcaaccggctggacctgggcctgactgtggaggtgtggaacaagggcctcatctgggacaccatggtgggcaccgtgtggatccccctgcggaccatccggcagagcaatgaggagggccctggagagtggctgaccctggacagccaggtgatcatggctgacagcgagatctgtggcaccaaggaccccaccttccaccgcatcctgctggacaccaggtttgagctgcccctggacatccctgaggaggaggcccgctactgggccaagaagctggagcagctgaatgccatgagggaccaggatgagtacagcttccaggatgagcaggacaagcccctgcctgtgcccagcaaccagtgctgcaactggaactacttcggctggggcgagcagcacaatgatgatcctgacagcgctgtggatgaccgggacagcgactacagaagtgagaccagcaacagcatccccccaccctactacaccaccagccagcccaatgcctctgtgcaccagtacagcgtgcggcccccacccctgggcagccgggagagctacagcgacagcatgcacagctatgaggagttcagcgagccccaggccctgagccccaccggcagcagccgctatgccagcagcggggagctgagccagggcagcagccagctgtctgaggactttgatcctgatgagcacagcctgcagggcagtgacatggaggatgagcgggaccgggacagctaccacagctgccacagctctgtgtcctaccacaaggacagcccccgctgggaccaggatgaggaggagctggaggaggacctggaggacttcctggaggaggaggagctgcctgaagatgaggaggagctggaggaggaggaggaggaggtgcctgatgacctgggcagctatgcccagcgggaggatgtggccgtggccgagcccaaggacttcaagaggatcagcctgcccccagctgcccctgggaaggaggacaaggcccctgtggcccccacagaggccccagacatggccaaggtggcccccaagccagccaccccagacaaggtgcctgctgctgagcagatccctgaggccgagccccccaaggatgaggagagcttccggcccagagaagatgaggagggccaggagggccaggacagcatgagccgggccaaggccaactggctgcgggccttcaacaaggtgaggatgcagctgcaggaggcccggggggagggggagatgagcaagagcctgtggttcaagggcggccctgggggcggcctcatcatcatcgacagcatgccagacatcaggaagaggaagcccatccccctggtgtctgacctggccatgagcctggtgcagagcaggaaggccggcatcaccagcgccctggccagcagcaccctgaacaatgaggagctgaagaaccacgtgtacaagaagaccctgcaggccctgatctaccccatcagctgcaccaccccccacaactttgaggtgtggacagccaccacccccacctactgctatgaatgtgagggcctgctgtggggcatcgcccggcagggcatgcgctgcacagaatgtggggtgaagtgccacgagaagtgccaggacctgctgaatgctgactgcctgcagagagctgctgagaagagcagcaagcacggggctgaggacaggacccagaacatcatcatggtgctgaaggacaggatgaagatccgggagaggaacaagccagagatctttgagctgatccaggagatctttgctgtgaccaagacagcccacacccagcagatgaaggctgtgaagcagagcgtgctggatggcaccagcaagtggagcgccaagatcagcatcaccgtggtgtgtgcccagggcctgcaggccaaggacaagacaggcagcagtgacccctacgtgacagtgcaggtgggcaagaccaagaagaggaccaagaccatctacggcaacctgaaccctgtgtgggaggagaacttccactttgagtgccacaacagcagtgaccgcatcaaggtgcgggtgtgggatgaagatgatgacatcaagagccgggtgaagcagcgcttcaagcgggagagtgatgacttcctgggccagaccatcatcgaggtgaggaccctgagcggggagatggatgtgtggtacaacctggacaagaggacagacaagtctgctgtgtctggggccatccggctgcacatctctgtggagatcaagggggaggagaaggtggccccctaccacgtgcagtacacctgcctgcacgagaacctcttccactttgtgacagatgtgcagaacaacggggtggtgaagatcccagatgccaagggagatgatgcctggaaggtgtactatgatgaaacagcccaggagatcgtggatgaatttgccatgagatatggagtggagagcatctaccaggccatgacccactttgcctgcctgagcagcaagtacatgtgccctggggtgcctgctgtgatgagcaccctgctggccaacatcaatgcctactatgcccacaccacagccagcaccaacgtgtctgccagtgacagatttgctgccagcaactttgggaaggagagatttgtgaagctgctggaccagctgcacaacagcctgagaattgacctgtccatgtacagaaacaacttccctgccagcagccctgagcggctgcaggacctgaagagcacagtggacctgctgaccagcatcaccttcttcaggatgaaggtgcaggagctgcagagccccccccgggccagccaggtggtgaaggactgtgtgaaggcctgcctgaacagcacctatgagtacatcttcaacaactgccacgagctgtacagccgggagtaccagacagatcctgccaagaagggggaggtgctgcctgaggagcagggccccagcatcaagaacctggacttctggagcaagctgatcaccctgattgtgtccatcatcgaggaggacaagaacagctacaccccctgcctgaaccagttcccccaggagctgaatgtgggcaagatctctgctgaggtgatgtggaacctgtttgcccaggacatgaagtatgccatggaggagcatgacaagcaccggctgtgcaagtctgctgactacatgaacctgcacttcaaggtgaagtggctgtacaatgaatatgtgacagagctgcctgccttcaaggacagagtgcctgagtacccagcctggtttgagcccttcgtcatccagtggctggatgaaaatgaggaggtgtcccgggacttcctgcatggagccctggagcgggacaagaaggatggcttccagcagaccagcgagcacgccctcttcagctgcagcgtggtggatgtgttcagccagctgaaccagagctttgagatcatcaagaagctggagtgcccagacccccagatcgtgggccactacatgagaagatttgccaagaccatcagcaatgtgctgctgcagtatgctgacatcatcagcaaggactttgccagctactgcagcaaggagaaggagaaggtgccctgcatcctgatgaacaacacccagcagctgcgggtgcagctggagaagatgtttgaggccatgggcggcaaggagctggatgctgaggccagtgacatcctgaaggagctgcaggtgaagctgaacaacgtgctggatgagctgagccgggtgtttgccaccagcttccagccccacatcgaggagtgtgtgaagcagatgggagacatcctgagccaggtgaagggcactggaaatgtgcctgccagcgcctgcagctctgtggcccaggatgctgacaacgtgctgcagcccatcatggacctgctggacagcaacctgaccctgtttgccaagatctgtgagaagacagtgctgaagagggtgctgaaggagctgtggaagctggtgatgaacaccatggagaagaccatcgtgctgccccccctgacagaccagaccatgattggcaacctgctgaggaagcacggcaagggcctggagaagggccgggtgaagctgcccagccacagtgatggcacccagatgatcttcaatgctgccaaggagctgggccagctgagcaagctgaaggaccacatggtgcgggaggaggccaagagcctgacccccaagcagtgtgctgtggtggagctggccctggacaccatcaagcagtacttccacgccggcggcgtgggcctgaagaagaccttcctggagaagagcccagacctgcagagcctgcgctatgccctgagcctgtacacccaggccacagacctgctgatcaagacctttgtgcagacccagagcgcccagggcctgggcgtggaggaccctgtgggggaggtgtctgtgcacgtggagctgttcacccaccctggcaccggggagcacaaggtgacagtgaaggtggtggccgccaatgacctgaagtggcagaccagcggcatcttccggcccttcatcgaggtgaacatcatcggcccccagctgagtgacaagaagaggaagtttgccaccaagagcaagaacaacagctgggcccccaagtacaatgaaagcttccagttcaccctgtctgcagatgctggcccagaatgttatgagctgcaggtgtgtgtgaaggactactgctttgcccgggaggacagaacagtgggcctggccgtgctgcagctgcgggagctggcccagaggggcagcgctgcctgctggctgcccctgggccgccgcatccacatggatgacaccggcctgactgtgctgcgcatcctgagccagaggagcaatgatgaggtggccaaggagtttgtgaagctgaagagtgacaccaggtctgctgaggagggcggggccgccccagccccctag

SEQ ID NO: 175474 - DNA, 5112 bp, synthetic construct
  misc_feature 1..5112: note = Description of Artificial Sequence: Synthetic coding sequence
  source 1..5112: mol_type = other DNA
atgagcctgctgtgtgtgggcgtgaagaaggccaagtttgatggagcccaggagaagttcaacacctacgtgaccctgaaggtgcagaatgtgaagagcaccaccatcgctgtgcggggcagccagcccagctgggagcaggacttcatgtttgagatcaaccggctggacctgggcctgactgtggaggtgtggaacaagggcctcatctgggacaccatggtgggcaccgtgtggatccccctgcggaccatccggcagagcaatgaggagggccctggagagtggctgaccctggacagccaggtgatcatggctgacagcgagatctgtggcaccaaggaccccaccttccaccgcatcctgctggacaccaggtttgagctgcccctggacatccctgaggaggaggcccgctactgggccaagaagctggagcagctgaatgccatgagggaccaggatgagtacagcttccaggatgagcaggacaagcccctgcctgtgcccagcaaccagtgctgcaactggaactacttcggctggggcgagcagcacaatgatgatcctgacagcgctgtggatgaccgggacagcgactacagaagtgagaccagcaacagcatccccccaccctactacaccaccagccagcccaatgcctctgtgcaccagtacagcgtgcggcccccacccctgggcagccgggagagctacagcgacagcatgcacagctatgaggagttcagcgagccccaggccctgagccccaccggcagcagccgctatgccagcagcggggagctgagccagggcagcagccagctgtctgaggactttgatcctgatgagcacagcctgcagggcagtgacatggaggatgagcgggaccgggacagctaccacagctgccacagctctgtgtcctaccacaaggacagcccccgctgggaccaggatgaggaggagctggaggaggacctggaggacttcctggaggaggaggagctgcctgaagatgaggaggagctggaggaggaggaggaggaggtgcctgatgacctgggcagctatgcccagcgggaggatgtggccgtggccgagcccaaggacttcaagaggatcagcctgcccccagctgcccctgggaaggaggacaaggcccctgtggcccccacagaggccccagacatggccaaggtggcccccaagccagccaccccagacaaggtgcctgctgctgagcagatccctgaggccgagccccccaaggatgaggagagcttccggcccagagaagatgaggagggccaggagggccaggacagcatgagccgggccaaggccaactggctgcgggccttcaacaaggtgaggatgcagctgcaggaggcccggggggagggggagatgagcaagagcctgtggttcaagggcggccctgggggcggcctcatcatcatcgacagcatgccagacatcaggaagaggaagcccatccccctggtgtctgacctggccatgagcctggtgcagagcaggaaggccggcatcaccagcgccctggccagcagcaccctgaacaatgaggagctgaagaaccacgtgtacaagaagaccctgcaggccctgatctaccccatcagctgcaccaccccccacaactttgaggtgtggacagccaccacccccacctactgctatgaatgtgagggcctgctgtggggcatcgcccggcagggcatgcgctgcacagaatgtggggtgaagtgccacgagaagtgccaggacctgctgaatgctgactgcctgcagagagctgctgagaagagcagcaagcacggggctgaggacaggacccagaacatcatcatggtgctgaaggacaggatgaagatccgggagaggaacaagccagagatctttgagctgatccaggagatctttgctgtgaccaagacagcccacacccagcagatgaaggctgtgaagcagagcgtgctggatggcaccagcaagtggagcgccaagatcagcatcaccgtggtgtgtgcccagggcctgcaggccaaggacaagacaggcagcagtgacccctacgtgacagtgcaggtgggcaagaccaagaagaggaccaagaccatctacggcaacctgaaccctgtgtgggaggagaacttccactttgagtgccacaacagcagtgaccgcatcaaggtgcgggtgtgggatgaagatgatgacatcaagagccgggtgaagcagcgcttcaagcgggagagtgatgacttcctgggccagaccatcatcgaggtgaggaccctgagcggggagatggatgtgtggtacaacctggacaagaggacagacaagtctgctgtgtctggggccatccggctgcacatctctgtggagatcaagggggaggagaaggtggccccctaccacgtgcagtacacctgcctgcacgagaacctcttccactttgtgacagatgtgcagaacaacggggtggtgaagatcccagatgccaagggagatgatgcctggaaggtgtactatgatgaaacagcccaggagatcgtggatgaatttgccatgagatatggagtggagagcatctaccaggccatgacccactttgcctgcctgagcagcaagtacatgtgccctggggtgcctgctgtgatgagcaccctgctggccaacatcaatgcctactatgcccacaccacagccagcaccaacgtgtctgccagtgacagatttgctgccagcaactttgggaaggagagatttgtgaagctgctggaccagctgcacaacagcctgagaattgacctgtccatgtacagaaacaacttccctgccagcagccctgagcggctgcaggacctgaagagcacagtggacctgctgaccagcatcaccttcttcaggatgaaggtgcaggagctgcagagccccccccgggccagccaggtggtgaaggactgtgtgaaggcctgcctgaacagcacctatgagtacatcttcaacaactgccacgagctgtacagccgggagtaccagacagatcctgccaagaagggggaggtgctgcctgaggagcagggccccagcatcaagaacctggacttctggagcaagctgatcaccctgattgtgtccatcatcgaggaggacaagaacagctacaccccctgcctgaaccagttcccccaggagctgaatgtgggcaagatctctgctgaggtgatgtggaacctgtttgcccaggacatgaagtatgccatggaggagcatgacaagcaccggctgtgcaagtctgctgactacatgaacctgcacttcaaggtgaagtggctgtacaatgaatatgtgacagagctgcctgccttcaaggacagagtgcctgagtacccagcctggtttgagcccttcgtcatccagtggctggatgaaaatgaggaggtgtcccgggacttcctgcatggagccctggagcgggacaagaaggatggcttccagcagaccagcgagcacgccctcttcagctgcagcgtggtggatgtgttcagccagctgaaccagagctttgagatcatcaagaagctggagtgcccagacccccagatcgtgggccactacatgagaagatttgccaagaccatcagcaatgtgctgctgcagtatgctgacatcatcagcaaggactttgccagctactgcagcaaggagaaggagaaggtgccctgcatcctgatgaacaacacccagcagctgcgggtgcagctggagaagatgtttgaggccatgggcggcaaggagctggatgctgaggccagtgacatcctgaaggagctgcaggtgaagctgaacaacgtgctggatgagctgagccgggtgtttgccaccagcttccagccccacatcgaggagtgtgtgaagcagatgggagacatcctgagccaggtgaagggcactggaaatgtgcctgccagcgcctgcagctctgtggcccaggatgctgacaacgtgctgcagcccatcatggacctgctggacagcaacctgaccctgtttgccaagatctgtgagaagacagtgctgaagagggtgctgaaggagctgtggaagctggtgatgaacaccatggagaagaccatcgtgctgccccccctgacagaccagaccatgattggcaacctgctgaggaagcacggcaagggcctggagaagggccgggtgaagctgcccagccacagtgatggcacccagatgatcttcaatgctgccaaggagctgggccagctgagcaagctgaaggaccacatggtgcgggaggaggccaagagcctgacccccaagcagtgtgctgtggtggagctggccctggacaccatcaagcagtacttccacgccggcggcgtgggcctgaagaagaccttcctggagaagagcccagacctgcagagcctgcgctatgccctgagcctgtacacccaggccacagacctgctgatcaagacctttgtgcagacccagagcgcccagggcctgggcgtggaggaccctgtgggggaggtgtctgtgcacgtggagctgttcacccaccctggcaccggggagcacaaggtgacagtgaaggtggtggccgccaatgacctgaagtggcagaccagcggcatcttccggcccttcatcgaggtgaacatcatcggcccccagctgagtgacaagaagaggaagtttgccaccaagagcaagaacaacagctgggcccccaagtacaatgaaagcttccagttcaccctgtctgcagatgctggcccagaatgttatgagctgcaggtgtgtgtgaaggactactgctttgcccgggaggacagaacagtgggcctggccgtgctgcagctgcgggagctggcccagaggggcagcgctgcctgctggctgcccctgggccgccgcatccacatggatgacaccggcctgactgtgctgcgcatcctgagccagaggagcaatgatgaggtggccaaggagtttgtgaagctgaagagtgacaccaggtctgctgaggagggcggggccgccccagccccctag

SEQ ID NO: 175475 - DNA, 1293 bp, synthetic construct
  misc_feature 1..1293: note = Description of Artificial Sequence: Synthetic coding sequence
  source 1..1293: mol_type = other DNA
atggccaccctgtctgtgaagcccagccgccgcttccagctgcctgactggcacaccaacagctacctgctgagcaccaatgcccagctgcagagagatgccagccaccagatccggcaggaggcccgggtgctgagaaatgagaccaacaaccagaccatctgggatgaacatgacaacagaacccggctggtggagagaattgacacagtgaaccgctggaaggagatgctggacaagtgcctgacagacctggatgctgagattgatgccctgacccagatgaaggagagcgctgagcagaacctgcaggccaagaacctgcccctggatgtggccattgaatgtctgaccctgcgggagagcagaagagacattgatgtggtgaaggaccctgtggaggatgagctgcacaaggaggtggaggtgattgaggccaccaagaaggccctgcagcagaaggtgtcccaggcctttgagcagctgtgcctgctgcaggaggtgcagcagcagctgaacagcgaccaccggggcaagatggagaccctggagattgaccggggctgcctgagcctgaacctgcggagccccaacatcagcctgaaggtggaccccaccagggtgcctgatggcagcaccaccctgcagcagtgggatgacttcagccgcttcaacaaggacagagctgaggccgagatgaaggccgccacagagctgcgggaggccacagccctgaccatcgccgagaccaacaatgagctggaggcccagagggtggccacagaatttgccttcaggaagaggctgcgggagatggagaaggtgtacagcgagctgaagtggcaggagaagaacaccctggaggagattgctgagctgcaggaggacatccgccacctggaggaggacctgcggaccaagctgctgagcctgaagctgagccacacccggctggaggcccggacctaccggcccaacgtggagctgtgccgggaccaggcccagtatggcctgacagatgaggtgcaccagctggaggccaccatcgccgccctgaagcagaagctggcccaggcccaggatgccctggatgccctgtgcaagcacctggcccggctgcaggccgacatcgcctgcaaggccaacagcatgctgctggacaccaagtgcatggacaccaggaggaagctgactgtgcctgctgagagatttgtgcctgaggtggacaccttcaccaggaccaccaacagcaccctgagccccctgaagagctgccagctggagctggcctag

SEQ ID NO: 175476 - DNA, 3429 bp, synthetic construct
  misc_feature 1..3429: note = Description of Artificial Sequence: Synthetic coding sequence
  source 1..3429: mol_type = other DNA
atggccaccctgctgagccacccccagcagaggcctcccttcctgcggcaggccatcaagatcagaagaagaagagtgcgggacctgcaggaccccccaccccagatggcccctgagatccagccccccagccaccacttcagccctgagcagagggccctgctgtatgaagatgccctgtacacagtgctgcaccggctgggccaccctgagcccaaccacgtgacagaggccagcgagctgctgcgctacctgcaggaggccttccacgtggagcctgaggagcaccagcagaccctgcagagggtgcgggagctggagaagcccatcttctgcctgaaggccaccgtgaagcaggccaagggcatcctgggcaaggatgtgtctggcttcagtgacccctactgcctgctgggcatcgagcagggcgtgggcgtgcctgggggcagccctggcagccgccaccggcagaaggctgtggtgcgccacaccatccctgaggaggagacccacaggacccaggtgatcacccagaccctgaaccctgtgtgggatgagaccttcatcctggagtttgaggacatcaccaatgccagcttccacctggacatgtgggacctggacacagtggagagcgtgcggcagaagctgggggagctgacagacctgcacggcctgcggcgcatcttcaaggaggccaggaaggacaagggccaggatgacttcctgggcaatgtggtgctgcggctgcaggacctgcgctgccgggaggaccagtggtaccccctggagcccaggacagagacctacccagaccggggccagtgccacctgcagttccagctgatccacaagaggcgggccaccagcgccagccgcagccagcccagctacacagtgcacctgcacctgctgcagcagctggtgtcccatgaggtgacccagcacgaggccggcagcacctcctgggatggcagcctgagcccccaggccgccaccgtgctcttcctgcacgccacccagaaggacctgagtgacttccaccagagcatggcccagtggctggcctacagccggctgtaccagagcctggagttccccagcagctgcctgctgcaccccatcaccagcattgagtaccagtggatccagggccgcctgaaggccgagcagcaggaggagctggccgccagcttcagcagcctgctgacctacggcctgagcctcatccgccgcttccgctctgtgttccccctgtctgtgtctgacagccctgcccggctgcagagcctgctgcgggtgctggtgcagatgtgcaagatgaaggccttcggggagctgtgccccaacacagcccccctgccccagctggtgacagaggccctgcagacaggcaccacagagtggttccacctgaagcagcagcaccaccagcccatggtgcagggcatccctgaggccggcaaggccctgctgggcctggtgcaggatgtgattggagacctgcaccagtgccagaggacctgggacaagatcttccacaacaccctgaagatccacctgttctccatggccttccgggagctgcagtggctggtggccaagagggtgcaggaccacaccaccgtggtgggagatgtggtgtccccagagatgggagagagcctcttccagctgtacatcagcctgaaggagctgtgccagctgaggatgagcagcagcgagagagatggagtgctggccctggacaacttccaccgctggttccagcctgccatccccagctggctgcagaagacctacaatgaggccctggcccgggtgcagagagctgtgcagatggatgagctggtgcccctgggggagctgaccaagcacagcaccagcgctgtggacctgagcacctgctttgcccagatcagccacacagcccggcagctggactggccagaccctgaggaggccttcatgatcaccgtgaagtttgtggaggacacctgccgcctggccctggtgtactgcagcctcatcaaggcccgggcccgggagctgagcagcggccagaaggaccagggccaggccgccaacatgctgtgtgtggtggtgaatgacatggagcagctgcggctggtgattggcaagctgcctgcccagctggcctgggaggccctggagcagagggtgggcgctgtgctggagcagggccagctgcagaacaccctgcacgcccagctgcagagcgccctggccggcctgggccacgagatcagaactggagtgaggaccctggccgagcagctggaggtgggcatcgccaagcacatccagaagctggtgggcgtgcgggagagcgtgctgcctgaagatgccatcctgcccctgatgaagttcctggaggtggagctgtgctacatgaacaccaacctggtgcaggagaacttcagcagcctgctgaccctgctgtggacccacaccctgactgtgctggtggaggccgccgccagccagaggagcagcagcctggccagcaaccggctgaagatcgccctgcagaacctggagatctgcttccacgccgagggctgcggcctgccccccaaggccctgcacacagccaccttccaggccctgcagagggacctggagctgcaggccgccagcagccgggagctgatcaggaagtacttctgcagccgcatccagcagcaggccgagaccaccagcgaggagctgggcgctgtgacagtgaaggccagctaccgggccagcgagcagaagctgcgggtggagctgctgagcgccagcagcctgctgcccctggacagcaatggcagcagtgacccctttgtgcagctgaccctggagcccaggcatgagttccctgagctggccgcccgggagacccagaagcacaagaaggacctgcaccccctgtttgatgagacctttgagttcctggtgcctgctgagccctgcaggaaggccggggcctgcctgctgctgactgtgctggactatgacaccctgggcgcagatgacctggagggggaggccttcctgcccctgcgggaggtgcccggcctgagcggcagcgaggagcccggggaggtgccccagacccggctgcccctgacctacccagcccccaacggggaccccatcctgcagctgctggagggcaggaagggggaccgggaggcccaggtgtttgtgcggctgcggcggcaccgggccaagcagggcatcggccccagcgtgtcctggccctggcccatctgcctgctggccttcctgttccagcccctgggctggggccctggcagcctgggccctggcctgcaggcccagagcctgctggagaagggggagggcaccctgcccaagatgaggctgcagctgccctggggcgagggcggcggccactactag

SEQ ID NO: 175477 - DNA, 2835 bp, synthetic construct
  misc_feature 1..2835: note = Description of Artificial Sequence: Synthetic coding sequence
  source 1..2835: mol_type = other DNA
atggccaccctgctgagccacccccagcagaggcctcccttcctgcggcaggccatcaagatcagaagaagaagagtgcgggacctgcaggaccccccaccccagatggcccctgagatccagccccccagccaccacttcagccctgagcagagggccctgctgtatgaagatgccctgtacacagtgctgcaccggctgggccaccctgagcccaaccacgtgacagaggccagcgagctgctgcgctacctgcaggaggccttccacgtggagcctgaggagcaccagcagaccctgcagagggtgcgggagctggagaagcccatcttctgcctgaaggccaccgtgaagcaggccaagggcatcctgggcaaggatgtgtctggcttcagtgacccctactgcctgctgggcatcgagcagggcgtgggcgtgcctgggggcagccctggcagccgccaccggcagaaggctgtggtgcgccacaccatccctgaggaggagacccacaggacccaggtgatcacccagaccctgaaccctgtgtgggatgagaccttcatcctggagtttgaggacatcaccaatgccagcttccacctggacatgtgggacctggacacagtggagagcgtgcggcagaagctgggggagctgacagacctgcacggcctgcggcgcatcttcaaggaggccaggaaggacaagggccaggatgacttcctgggcaatgtggtgctgcggctgcaggacctgcgctgccgggaggaccagtggtaccccctggagcccaggacagagacctacccagaccggggccagtgccacctgcagttccagctgatccacaagaggcgggccaccagcgccagccgcagccagcccagctacacagtgcacctgcacctgctgcagcagctggtgtcccatgaggtgacccagcacgaggccggcagcacctcctgggatggcagcctgagcccccaggccgccaccgtgctcttcctgcacgccacccagaaggacctgagtgacttccaccagagcatggcccagtggctggcctacagccggctgtaccagagcctggagttccccagcagctgcctgctgcaccccatcaccagcattgagtaccagtggatccagggccgcctgaaggccgagcagcaggaggagctggccgccagcttcagcagcctgctgacctacggcctgagcctcatccgccgcttccgctctgtgttccccctgtctgtgtctgacagccctgcccggctgcagagcctgctgcgggtgctggtgcagatgtgcaagatgaaggccttcggggagctgtgccccaacacagcccccctgccccagctggtgacagaggccctgcagacaggcaccacagagtggttccacctgaagcagcagcaccaccagcccatggtgcagggcatccctgaggccggcaaggccctgctgggcctggtgcaggatgtgattggagacctgcaccagtgccagaggacctgggacaagatcttccacaacaccctgaagatccacctgttctccatggccttccgggagctgcagtggctggtggccaagagggtgcaggaccacaccaccgtggtgggagatgtggtgtccccagagatgggagagagcctcttccagctgtacatcagcctgaaggagctgtgccagctgaggatgagcagcagcgagagagatggagtgctggccctggacaacttccaccgctggttccagcctgccatccccagctggctgcagaagacctacaatgaggccctggcccgggtgcagagagctgtgcagatggatgagctggtgcccctgggggagctgaccaagcacagcaccagcgctgtggacctgagcacctgctttgcccagatcagccacacagcccggcagctggactggccagaccctgaggaggccttcatgatcaccgtgaagtttgtggaggacacctgccgcctggccctggtgtactgcagcctcatcaaggcccgggcccgggagctgagcagcggccagaaggaccagggccaggccgccaacatgctgtgtgtggtggtgaatgacatggagcagctgcggctggtgattggcaagctgcctgcccagctggcctgggaggccctggagcagagggtgggcgctgtgctggagcagggccagctgcagaacaccctgcacgcccagctgcagagcgccctggccggcctgggccacgagatcagaactggagtgaggaccctggccgagcagctggaggtgggcatcgccaagcacatccagaagctggtgggcgtgcgggagagcgtgctgcctgaagatgccatcctgcccctgatgaagttcctggaggtggagctgtgctacatgaacaccaacctggtgcaggagaacttcagcagcctgctgaccctgctgtggacccacaccctgactgtgctggtggaggccgccgccagccagaggagcagcagcctggccagcaaccggctgaagatcgccctgcagaacctggagatctgcttccacgccgagggctgcggcctgccccccaagaccctgcccctgcctgccagccagaagagctgctgcggcggccagggcatcggccccagcgtgtcctggccctggcccatctgcctgctggccttcctgttccagcccctgggctggggccctggcagcctgggccctggcctgcaggcccagagcctgctggagaagggggagggcaccctgcccaagatgaggctgcagctgccctggggcgagggcggcggccactactag

SEQ ID NO: 175478 - DNA, 2790 bp, synthetic construct
  misc_feature 1..2790: note = Description of Artificial Sequence: Synthetic coding sequence
  source 1..2790: mol_type = other DNA
atgacagccagctctgtggagcagctgaggaaggagggcaatgagctgttcaagtgtggggactatggaggagccctggccgcctacacccaggccctgggcctggatgccaccccccaggaccaggccgtgctgcacaggaacagagctgcctgccacctgaagctggaggactatgacaaggccgagacagaggccagcaaggccatcgagaaggatggaggagatgtgaaggccctgtaccgccgcagccaggccctggagaagctgggccgcctggaccaggccgtgctggacctgcagagatgtgtgtccctggagcccaagaacaaggtgttccaggaggccctgaggaacatcggcggccagatccaggagaaggtgcgctacatgagcagcacagatgccaaggtggagcagatgttccagatcctgctggaccctgaggagaagggcacagagaagaagcagaaggccagccagaacctggtggtgctggccagagaagatgctggagctgagaagatcttccgcagcaatggagtgcagctgctgcagaggctgctggacatgggagaaacagacctgatgctggccgccctgcggaccctggtgggcatctgcagcgagcaccagagcaggacagtggccaccctgagcatcctgggcaccaggagagtggtgtccatcctgggcgtggagagccaggccgtgtccctggccgcctgccacctgctgcaggtgatgtttgatgccctgaaggagggcgtgaagaagggcttccggggcaaggagggcgccatcatcgtggaccctgcccgggagctgaaggtgctgatcagcaacctgctggacctgctgacagaggtgggcgtgtctggccagggccgggacaatgccctgaccctgctgatcaaggctgtgcccaggaagagcctgaaggaccccaacaacagcctgaccctgtgggtgattgaccagggcctgaagaagatcctggaggtgggcggcagcctgcaggaccccccaggagagctggccgtgacagccaacagcaggatgtctgccagcatcctgctgagcaagctgtttgatgacctgaagtgtgatgctgagcgggagaacttccaccggctgtgtgagaactacatcaagtcctggtttgagggccagggcctggccggcaagctgcgggccatccagacagtgtcctgcctgctgcagggcccctgtgatgctggcaacagagccctggagctgtctggagtgatggagagcgtcatcgccctgtgtgccagcgagcaggaggaggagcagctggtggccgtggaggccctgattcatgctgctgggaaggccaagagggccagcttcatcacagccaacggggtgtccctgctgaaggacctgtacaagtgcagcgagaaggacagcatccgcatccgggccctggtgggcctgtgcaagctgggcagcgctgggggcacagacttctccatgaagcagtttgctgagggcagcaccctgaagctggccaagcagtgcaggaagtggctgtgcaatgaccagattgatgctggcacccggcgctgggccgtggagggcctggcctacctgacctttgatgctgatgtgaaggaggagtttgtggaggatgctgctgccctgaaggccctcttccagctgagccggctggaggagaggtctgtgctgtttgctgtggccagcgccctggtgaactgcaccaacagctatgactatgaggagccagaccccaagatggtggagctggccaagtatgccaagcagcacgtgcctgagcagcaccccaaggacaagcccagctttgtgcgggcccgggtgaagaagctgctggccgccggcgtggtgtctgccatggtgtgcatggtgaagacagagagccctgtgctgaccagcagctgccgggagctgctgagcagggtcttcctggccctggtggaggaggtggaggaccggggcaccgtggtggcccagggcggcggccgggccctgatccccctggccctggagggcacagatgtgggccagaccaaggccgcccaggccctggccaagctgaccatcaccagcaaccctgagatgaccttccctggagagcgcatctatgaggtggtgcggcccctggtgtccctgctgcacctgaactgcagcggcctgcagaactttgaggccctgatggccctgaccaacctggccggcatcagcgagcggctgcggcagaagatcctgaaggagaaggctgtgcccatgattgagggctacatgtttgaggagcacgagatgatcagaagagctgccacagagtgcatgtgcaacctggccatgagcaaggaggtgcaggacctgtttgaggcccagggcaatgaccggctgaagctgctggtgctgtacagcggggaggatgatgagctgctgcagagagctgctgctgggggcctggccatgctgacctccatgaggcccaccctgtgcagccgcatcccccaggtgaccacccactggctggagatcctgcaggccctgctgctgagcagcaaccaggagctgcagcacagaggagctgtggtggtgctgaacatggtggaggccagccgggagatcgccagcaccctgatggagagcgagatgatggagatcctgtctgtgctggccaagggggaccacagccctgtgaccagggctgctgctgcctgcctggacaaggctgtggagtatggcctcatccagcccaaccaggatggagagtag

SEQ ID NO: 175479 - DNA, 2835 bp, synthetic construct
  misc_feature 1..2835: note = Description of Artificial Sequence: Synthetic coding sequence
  source 1..2835: mol_type = other DNA
atgacagtgtctggccctggcaccccagagcccaggcctgccacccctggggccagctctgtggagcagctgaggaaggagggcaatgaactcttcaagtgtggggactatggaggagccctggccgcctacacccaggccctgggcctggatgccaccccccaggaccaggccgtgctgcacaggaacagagctgcctgccacctgaagctggaggactatgacaaggccgagacagaggccagcaaggccatcgagaaggatggaggagatgtgaaggccctgtacagaagaagccaggccctggagaagctgggccgcctggaccaggccgtgctggacctgcagagatgtgtgtccctggagcccaagaacaaggtgttccaggaggccctgagaaatattggaggccagatccaggagaaggtgcgctacatgagcagcacagatgccaaggtggagcagatgttccagatcctgctggaccctgaggagaagggcacagagaagaagcagaaggccagccagaacctggtggtgctggcccgggaggatgctggagctgagaagatcttccgcagcaatggagtgcagctgctgcagaggctgctggacatgggagaaacagacctgatgctggccgccctgcggaccctggtgggcatctgcagcgagcaccagagcaggacagtggccaccctgagcatcctgggcacccggcgggtggtgtccatcctgggcgtggagagccaggccgtgtccctggccgcctgccacctgctgcaggtgatgtttgatgccctgaaggagggcgtgaagaagggcttccggggcaaggagggcgccatcatcgtggaccctgcccgggagctgaaggtgctgatcagcaacctgctggacctgctgacagaggtgggcgtgtctggccagggccgggacaatgccctgaccctgctgatcaaggctgtgcccaggaagagcctgaaggaccccaacaacagcctgaccctgtgggtgattgaccagggcctgaagaagatcctggaggtgggcggcagcctgcaggaccccccaggagagctggccgtgacagccaacagcaggatgtctgccagcatcctgctgagcaagctgtttgatgacctgaagtgtgatgctgagcgggagaacttccaccggctgtgtgagaactacatcaagtcctggtttgagggccagggcctggccggcaagctgcgggccatccagacagtgtcctgcctgctgcagggcccctgtgatgctggcaacagagccctggagctgagcggcgtgatggagagcgtgattgccctgtgtgccagcgagcaggaggaggagcagctggtggccgtggaggccctgattcatgctgctgggaaggccaagagggccagcttcatcacagccaatggagtgtccctgctgaaggacctgtacaagtgcagcgagaaggacagcatccgcatccgggccctggtgggcctgtgcaagctgggcagcgctgggggcacagacttctccatgaagcagtttgctgagggcagcaccctgaagctggccaagcagtgcaggaagtggctgtgcaatgaccagattgatgctggcacccggcgctgggccgtggagggcctggcctacctgacctttgatgctgatgtgaaggaggagtttgtggaggatgctgctgccctgaaggccctcttccagctgagccggctggaggagaggtctgtgctgtttgctgtggccagcgccctggtgaactgcaccaacagctatgactatgaggagccagaccccaagatggtggagctggccaagtatgccaagcagcacgtgcctgagcagcaccccaaggacaagcccagctttgtgcgggcccgggtgaagaagctgctggccgccggcgtggtgtctgccatggtgtgcatggtgaagacagagagccctgtgctgaccagcagctgccgggagctgctgagcagggtcttcctggccctggtggaggaggtggaggaccggggcaccgtggtggcccagggcggcggccgggccctgatccccctggccctggagggcacagatgtgggccagaccaaggccgcccaggccctggccaagctgaccatcaccagcaaccctgagatgaccttccctggagagcgcatctatgaggtggtgcggcccctggtgtccctgctgcacctgaactgcagcggcctgcagaactttgaggccctgatggccctgaccaacctggccggcatcagcgagcggctgcggcagaagatcctgaaggagaaggctgtgcccatgattgagggctacatgtttgaggagcacgagatgatccggcgggccgccacagagtgcatgtgcaacctggccatgagcaaggaggtgcaggacctgtttgaggcccagggcaatgaccggctgaagctgctggtgctgtacagcggagaagatgatgagctgctgcagagagctgctgctgggggcctggccatgctgacctccatgaggcccaccctgtgcagccgcatcccccaggtgaccacccactggctggagatcctgcaggccctgctgctgagcagcaaccaggagctgcagcacagaggagctgtggtggtgctgaacatggtggaggccagccgggagatcgccagcaccctgatggagagcgagatgatggagatcctgtctgtgctggccaagggggaccacagccctgtgaccagggctgctgctgcctgcctggacaaggctgtggagtatggcctcatccagcccaaccaggatggagagtag

SEQ ID NO: 175480 - DNA, 2409 bp, synthetic construct
  misc_feature 1..2409: note = Description of Artificial Sequence: Synthetic coding sequence
  source 1..2409: mol_type = other DNA
atggccggcaccagcgagaggagcctcatcagcagcatcagccagcccaaggccatcgagtgctttgaggtgaagaagaaggccttcctgacccacggccgctaccacggcagcggggccaccccacccaagaccaaggaccccaagccagagaccttctgtggccagacaggcctgcccaccatggaggtgcgcatcaacgtgtcccggcagcaggtggagaaggtgtttggcctggaggagtactggtgccagtgtgtggcctggagcagcagcggcaccaccaagagccagaaggcctacatccgcatcgcctacctgaggaagaactttgagcaggagcccctggccaaggaggtgtccctggagcagggcatcgtgctgccctgccggcccccagagggcatccccccagctgaggtggagtggctgagaaatgaagacctggtggaccccagcctggaccccaacgtgtacatcacccgggagcacagcctggtggtgcggcaggcccggctggccgacacagccaactacacctgtgtggccaagaacatcgtggcccggcggcgcagcgccagcgctgctgtgattgtgtatgtggatggctcctggagcccctggagcaagtggagcgcctgtggcctggactgcacccactggaggagcagagaatgtagtgaccctgcccccagaaatggaggagaggagtgccagggcacagacctggacaccaggaactgcaccagtgacctgtgtgtgcacacagccagcggcccagaagatgtggccctgtatgtgggcctgattgctgtggccgtgtgcctggtgctgctgctgctggtgctgatcctggtgtactgcaggaagaaggagggcctggacagtgatgtggccgacagcagcatcctgaccagcggcttccagcctgtgtccatcaagcccagcaaggctgacaacccccacctgctgaccatccagcctgacctgagcaccaccaccaccacctaccagggcagcctgtgcccccggcaggacggccccagccccaagttccagctgaccaacggccacctgctgagccccctgggcggcggccgccacaccctgcaccacagcagccccaccagcgaggccgaggagtttgtgtcccggctgagcacccagaactacttccgcagcctgccccggggcaccagcaacatgacctacggcaccttcaacttcctgggcggccgcctgatgatccccaacacaggcatcagcctgctgatccccccagatgccatcccccggggcaagatctatgagatctacctgaccctgcacaagccagaagatgtgcggctgcccctggccggctgccagaccctgctgagccccatcgtgtcctgtggccccccaggagtgctgctgaccaggcctgtgatcctggccatggaccactgtggggagcccagcccagacagctggagcctgcggctgaagaagcagagctgtgagggctcctgggaggatgtgctgcacctgggggaggaggcccccagccacctgtactactgccagctggaggccagcgcctgctacgtgttcacagagcagctgggccgctttgccctggtgggggaggccctgtctgtggccgccgccaagaggctgaagctgctgctgtttgcccctgtggcctgcaccagcctggagtacaacatccgggtgtactgcctgcatgacacccatgatgccctgaaggaggtggtgcagctggagaagcagctgggcggccagctgatccaggagccccgggtgctgcacttcaaggacagctaccacaacctgcggctgagcatccatgatgtgcccagcagcctgtggaagagcaagctgctggtgtcctaccaggagatccccttctaccacatctggaatggcacccagcgctacctgcactgcaccttcaccctggagcgggtgagccccagcaccagtgacctggcctgcaagctgtgggtgtggcaggtggagggagatggccagagcttcagcatcaacttcaacatcaccaaggacaccaggtttgctgagctgctggccctggagagcgaggccggcgtgcctgccctggtgggccccagcgccttcaagatccccttcctgatccggcagaagatcatcagcagcctggaccccccctgcagaagaggagctgactggaggaccctggcccagaagctgcacctggacagccacctgtccttctttgccagcaagcccagccccacagccatgatcctgaacctgtgggaggcccggcacttccccaacggcaacctgagccagctggccgctgctgtggccggcctgggccagccagatgctggcctcttcaccgtgtctgaggctgaatgttag

SEQ ID NO: 175481 - DNA, 2529 bp, synthetic construct
  misc_feature 1..2529: note = Description of Artificial Sequence: Synthetic coding sequence
  source 1..2529: mol_type = other DNA
atggctgtgcggcccggcctgtggccagccctgctgggcatcgtgctggccgcctggctgcggggcagcggggcccagcagagcgccaccgtggccaaccctgtgcctggggccaacccagacctgctgccccacttcctggtggagccagaagatgtgtacatcgtgaagaacaagcctgtgctgctggtgtgcaaggctgtgcctgccacccagatcttcttcaagtgcaatggagagtgggtgcggcaggtggaccacgtgattgaaagaagcacagatggcagcagcggcctgcccaccatggaggtgcgcatcaacgtgtcccggcagcaggtggagaaggtgtttggcctggaggagtactggtgccagtgtgtggcctggagcagcagcggcaccaccaagagccagaaggcctacatccgcatcgcctacctgaggaagaactttgagcaggagcccctggccaaggaggtgtccctggagcagggcatcgtgctgccctgccggcccccagagggcatccccccagctgaggtggagtggctgagaaatgaagacctggtggaccccagcctggaccccaacgtgtacatcacccgggagcacagcctggtggtgcggcaggcccggctggccgacacagccaactacacctgtgtggccaagaacatcgtggcccggcggcgcagcgccagcgctgctgtgattgtgtatgtggatggctcctggagcccctggagcaagtggagcgcctgtggcctggactgcacccactggaggagcagagaatgtagtgaccctgcccccagaaatggaggagaggagtgccagggcacagacctggacaccaggaactgcaccagtgacctgtgtgtgcacacagccagcggcccagaagatgtggccctgtatgtgggcctgattgctgtggccgtgtgcctggtgctgctgctgctggtgctgatcctggtgtactgcaggaagaaggagggcctggacagtgatgtggccgacagcagcatcctgaccagcggcttccagcctgtgtccatcaagcccagcaaggctgacaacccccacctgctgaccatccagcctgacctgagcaccaccaccaccacctaccagggcagcctgtgcccccggcaggacggccccagccccaagttccagctgaccaacggccacctgctgagccccctgggcggcggccgccacaccctgcaccacagcagccccaccagcgaggccgaggagtttgtgtcccggctgagcacccagaactacttccgcagcctgccccggggcaccagcaacatgacctacggcaccttcaacttcctgggcggccgcctgatgatccccaacacaggcatcagcctgctgatccccccagatgccatcccccggggcaagatctatgagatctacctgaccctgcacaagccagaagatgtgcggctgcccctggccggctgccagaccctgctgagccccatcgtgtcctgtggccccccaggagtgctgctgaccaggcctgtgatcctggccatggaccactgtggggagcccagcccagacagctggagcctgcggctgaagaagcagagctgtgagggctcctgggaggatgtgctgcacctgggggaggaggcccccagccacctgtactactgccagctggaggccagcgcctgctacgtgttcacagagcagctgggccgctttgccctggtgggggaggccctgtctgtggccgccgccaagaggctgaagctgctgctgtttgcccctgtggcctgcaccagcctggagtacaacatccgggtgtactgcctgcatgacacccatgatgccctgaaggaggtggtgcagctggagaagcagctgggcggccagctgatccaggagccccgggtgctgcacttcaaggacagctaccacaacctgcggctgagcatccatgatgtgcccagcagcctgtggaagagcaagctgctggtgtcctaccaggagatccccttctaccacatctggaatggcacccagcgctacctgcactgcaccttcaccctggagcgggtgagccccagcaccagtgacctggcctgcaagctgtgggtgtggcaggtggagggagatggccagagcttcagcatcaacttcaacatcaccaaggacaccaggtttgctgagctgctggccctggagagcgaggccggcgtgcctgccctggtgggccccagcgccttcaagatccccttcctgatccggcagaagatcatcagcagcctggaccccccctgcagaagaggagctgactggaggaccctggcccagaagctgcacctggacagccacctgtccttctttgccagcaagcccagccccacagccatgatcctgaacctgtgggaggcccggcacttccccaacggcaacctgagccagctggccgctgctgtggccggcctgggccagccagatgctggcctcttcaccgtgtctgaggctgaatgttag

SEQ ID NO: 175482 - DNA, 2838 bp, synthetic construct
  misc_feature 1..2838: note = Description of Artificial Sequence: Synthetic coding sequence
  source 1..2838: mol_type = other DNA
atgggcgcccggagcggggcccggggggccctgctgctggccctgctgctgtgctgggacccccggctgagccaggccggcacagacagcggcagcgaggtgctgcctgacagcttccccagcgccccagctgagcccctgccctacttcctgcaggagccccaggatgcctacatcgtgaagaacaagcctgtggagctgcgctgccgggccttccctgccacccagatctacttcaagtgcaatggagagtgggtgtcccagaatgaccacgtgacccaggagggcctggatgaggccaccggcctgcgggtgcgggaggtgcagatcgaggtgtcccggcagcaggtggaggagctgtttggcctggaggactactggtgccagtgtgtggcctggagcagcgctggcaccaccaagagccggcgggcctacgtgcgcatcgcctacctgaggaagaactttgaccaggagcccctgggcaaggaggtgcccctggaccacgaggtgctgctgcagtgccggcccccagagggcgtgcctgtggccgaggtggagtggctgaagaatgaagatgtgattgaccccacccaggacaccaacttcctgctgaccatcgaccacaacctgatcatccggcaggcccggctgagtgacacagccaactacacctgtgtggccaagaacatcgtggccaagaggaggagcaccacagccaccgtcatcgtgtatgtgaatggaggctggagctcctgggccgagtggagcccctgcagcaacagatgtggccggggctggcagaagaggaccaggacctgcaccaacccagcccccctgaatggaggagccttctgtgagggccaggccttccagaagacagcctgcaccaccatctgccctgtggatggagcctggacagagtggagcaagtggagcgcctgcagcacagaatgtgcccactggaggagccgggagtgcatggcccccccaccccagaatggaggccgggactgcagcggcaccctgctggacagcaagaactgcacagatggcctgtgcatgcagaacaagaagaccctgagtgaccccaacagccacctgctggaggccagcggagatgctgccctgtatgccggcctggtggtggccatctttgtggtggtggccatcctgatggctgtgggcgtggtggtgtacagaagaaactgccgggactttgacacagacatcacagacagcagcgctgccctgaccggcggcttccaccctgtgaacttcaagacagcccggcccagcaacccccagctgctgcaccccagcgtgcccccagacctgacagccagcgctggcatctaccggggccctgtgtatgccctgcaggacagcacagacaagatccccatgaccaacagccccctgctggaccccctgcccagcctgaaggtgaaggtgtacagcagcagcaccaccggcagcggccctggcctggctgatggagctgacctgctgggcgtgctgcccccaggcacctaccccagcgactttgcccgggacacccacttcctgcacctgcggagcgccagcctgggcagccagcagctgctgggcctgccccgggaccccggcagctctgtgtctggcaccttcggctgcctgggcggccgcctgagcatccctggcactggagtgtccctgctggtgcccaatggagccatcccccagggcaagttctatgagatgtacctgctgatcaacaaggccgagagcaccctgcccctgtctgagggcacccagacagtgctgagccccagcgtgacctgtggccccaccggcctgctgctgtgcaggcctgtgatcctgaccatgccccactgtgccgaggtgtctgcccgggactggatcttccagctgaagacccaggcccaccagggccactgggaggaggtggtgaccctggatgaggagaccctgaacaccccctgctactgccagctggagccccgggcctgccacatcctgctggaccagctgggcacctacgtgttcaccggggagagctacagccgctctgctgtgaagaggctgcagctggccgtgtttgccccagccctgtgcaccagcctggagtacagcctgcgggtgtactgcctggaggacacccctgtggccctgaaggaggtgctggagctggagaggaccctgggcggctacctggtggaggagcccaagcccctgatgttcaaggacagctaccacaacctgcggctgagcctgcatgacctgccccacgcccactggaggagcaagctgctggccaagtaccaggagatccccttctaccacatctggagcggcagccagaaggccctgcactgcaccttcaccctggagcggcacagcctggccagcacagagctgacctgcaagatctgtgtgcggcaggtggagggggagggccagatcttccagctgcacaccaccctggccgagaccccagctggcagcctggacaccctgtgcagcgcccctggcagcacagtgaccacccagctgggcccctatgccttcaagatccccctgagcatccggcagaagatctgcaacagcctggatgcccccaacagcagaggaaatgactggaggatgctggcccagaagctgtccatggaccgctacctgaactactttgccaccaaggccagccccactggagtcatcctggacctgtgggaggccctgcagcaggatgatggagacctgaacagcctggccagcgccctggaggagatgggcaagtctgagatgctggtggccgtggccacagatggagactgctag

SEQ ID NO: 175483 - DNA, 2805 bp, synthetic construct
  misc_feature 1..2805: note = Description of Artificial Sequence: Synthetic coding sequence
  source 1..2805: mol_type = other DNA
atgggcgcccggagcggggcccggggggccctgctgctggccctgctgctgtgctgggacccccggctgagccaggccggcacagacagcggcagcgaggtgctgcctgacagcttccccagcgccccagctgagcccctgccctacttcctgcaggagccccaggatgcctacatcgtgaagaacaagcctgtggagctgcgctgccgggccttccctgccacccagatctacttcaagtgcaatggagagtgggtgtcccagaatgaccacgtgacccaggagggcctggatgaggccaccggcctgcgggtgcgggaggtgcagatcgaggtgtcccggcagcaggtggaggagctgtttggcctggaggactactggtgccagtgtgtggcctggagcagcgctggcaccaccaagagccggcgggcctacgtgcgcatcgcctacctgaggaagaactttgaccaggagcccctgggcaaggaggtgcccctggaccacgaggtgctgctgcagtgccggcccccagagggcgtgcctgtggccgaggtggagtggctgaagaatgaagatgtgattgaccccacccaggacaccaacttcctgctgaccatcgaccacaacctgatcatccggcaggcccggctgagtgacacagccaactacacctgtgtggccaagaacatcgtggccaagaggaggagcaccacagccaccgtcatcgtgtatgtgaatggaggctggagctcctgggccgagtggagcccctgcagcaacagatgtggccggggctggcagaagaggaccaggacctgcaccaacccagcccccctgaatggaggagccttctgtgagggccaggccttccagaagacagcctgcaccaccatctgccctgtggatggagcctggacagagtggagcaagtggagcgcctgcagcacagaatgtgcccactggaggagccgggagtgcatggcccccccaccccagaatggaggccgggactgcagcggcaccctgctggacagcaagaactgcacagatggcctgtgcatgcagatgctggaggccagcggagatgctgccctgtatgccggcctggtggtggccatctttgtggtggtggccatcctgatggctgtgggcgtggtggtgtacagaagaaactgccgggactttgacacagacatcacagacagcagcgctgccctgactggaggcttccaccctgtgaacttcaagacagcccggcccagcaacccccagctgctgcaccccagcgtgcccccagacctgacagccagcgctggcatctaccggggccctgtgtatgccctgcaggacagcacagacaagatccccatgaccaacagccccctgctggaccccctgcccagcctgaaggtgaaggtgtacagcagcagcaccactggaagtggccctggcctggctgatggagctgacctgctgggcgtgctgcccccaggcacctaccccagcgactttgcccgggacacccacttcctgcacctgcggagcgccagcctgggcagccagcagctgctgggcctgccccgggaccccggcagctctgtgtctggcaccttcggctgcctgggcggccgcctgagcatccctggcaccggggtgtccctgctggtgcccaacggggccatcccccagggcaagttctatgagatgtacctgctgatcaacaaggccgagagcaccctgcccctgtctgagggcacccagacagtgctgagccccagcgtgacctgtggccccaccggcctgctgctgtgcaggcctgtgatcctgaccatgccccactgtgccgaggtgtctgcccgggactggatcttccagctgaagacccaggcccaccagggccactgggaggaggtggtgaccctggatgaggagaccctgaacaccccctgctactgccagctggagccccgggcctgccacatcctgctggaccagctgggcacctacgtgttcaccggggagagctacagccgctctgctgtgaagaggctgcagctggccgtgtttgccccagccctgtgcaccagcctggagtacagcctgcgggtgtactgcctggaggacacccctgtggccctgaaggaggtgctggagctggagaggaccctgggcggctacctggtggaggagcccaagcccctgatgttcaaggacagctaccacaacctgcggctgagcctgcatgacctgccccacgcccactggaggagcaagctgctggccaagtaccaggagatccccttctaccacatctggagcggcagccagaaggccctgcactgcaccttcaccctggagcggcacagcctggccagcacagagctgacctgcaagatctgtgtgcggcaggtggagggggagggccagatcttccagctgcacaccaccctggccgagaccccagctggcagcctggacaccctgtgcagcgcccctggcagcacagtgaccacccagctgggcccctatgccttcaagatccccctgagcatccggcagaagatctgcaacagcctggatgcccccaacagcagaggaaatgactggaggatgctggcccagaagctgtccatggaccgctacctgaactactttgccaccaaggccagccccaccggggtcatcctggacctgtgggaggccctgcagcaggatgatggagacctgaacagcctggccagcgccctggaggagatgggcaagtctgagatgctggtggccgtggccacagatggagactgctag

SEQ ID NO: 175484 - DNA, 2673 bp, synthetic construct
  misc_feature 1..2673: note = Description of Artificial Sequence: Synthetic coding sequence
  source 1..2673: mol_type = other DNA
gatgatgacttcttccacgagctgcctgagaccttccccagcgaccccccagagcccctgccccacttcctgattgagcctgaggaggcctacatcgtgaagaacaagcctgtgaacctgtactgcaaggccagccctgccacccagatctacttcaagtgcaacagcgagtgggtgcaccagaaggaccacatcgtggatgagcgggtggatgagaccagcggcctgattgtgcgggaggtgtccattgagatcagccggcagcaggtggaggagctgtttggacctgaggactactggtgccagtgtgtggcctggagcagcgctggcaccaccaagagcaggaaggcctacgtgagaattgcctacctgaggaagacctttgagcaggagcccctgggcaaggaggtgtccctggagcaggaggtgctgctgcagtgcaggcctcctgagggcatccctgtggccgaggtggagtggctgaagaatgaagacatcattgatcctgtggaggacaggaacttctacatcaccatcgaccacaacctgatcatcaagcaggcccggctgagtgacacagccaactacacctgtgtggccaagaacatcgtggccaagaggaagagcaccacagccaccgtgattgtgtatgtgaatggaggctggagcacctggacagagtggagcgtgtgcaacagccgctgtggccggggctaccagaagaggaccaggacctgcaccaacccagcccccctgaatggaggagccttctgtgagggccagagcgtgcagaagatcgcctgcaccaccctgtgccctgtggatggccgctggaccccctggagcaagtggagcacctgtggcacagagtgcacccactggaggcggcgggagtgcacagccccagcccccaagaatggaggcaaggactgtgatggcctggtgctgcagagcaagaactgcacagatggcctgtgcatgcagacagccccagacagtgatgatgtggccctgtatgtgggcatcgtgattgctgtgattgtgtgcctggccatctctgtggtggtggccctgtttgtgtacaggaagaaccaccgggactttgaaagtgacatcatcgacagcagcgccctgaatggaggcttccagcctgtgaacatcaaggccgcccggcaggacctgctggccgtgcccccagacctgaccagcgctgctgccatgtaccggggccctgtgtatgccctgcatgatgtgtctgacaagatccccatgaccaacagccccatcctggaccccctgcccaacctgaagatcaaggtgtacaacaccagcggggctgtgaccccccaggatgacctgtctgagttcaccagcaagctgagcccccagatgacccagagcctgctggagaatgaggccctgagcctgaagaaccagagcctggcccggcagacagaccccagctgcacagccttcggcagcttcaacagcctgggcggccacctgattgtgcccaacagcggcgtgtccctgctgatcccagctggggccatcccccagggccgggtgtatgagatgtatgtgacagtgcacaggaaggagaccatgaggcctcccatggatgacagccagaccctgctgacccctgtggtgtcctgtggccccccaggggccctgctgaccaggcctgtggtgctgaccatgcaccactgtgccgaccccaacacagaggactggaagatcctgctgaagaaccaggccgcccagggccagtgggaggatgtggtggtggtgggggaggagaacttcaccaccccctgctacatccagctggatgctgaggcctgccacatcctgacagagaacctgagcacctacgccctggtgggccacagcaccaccaaggctgctgccaagaggctgaagctggccatcttcggccccctgtgctgcagcagcctggagtacagcatccgggtgtactgcctggatgacacccaggatgccctgaaggagatcctgcacctggagcggcagatgggcggccagctgctggaggagcccaaggccctgcacttcaagggcagcacccacaacctgcggctgagcatccatgacatcgcccacagcctgtggaagagcaagctgctggccaagtaccaggagatccccttctaccacgtgtggagcggcagccagaggaacctgcactgcaccttcaccctggagcgcttcagcctgaacacagtggagctggtgtgcaagctgtgtgtgcggcaggtggagggggagggccagatcttccagctgaactgcaccgtgtctgaggagcccactggaattgacctgcccctgctggaccctgccaacaccatcaccaccgtgacaggccccagcgccttcagcatccccctgcccatccggcagaagctgtgcagcagcctggatgccccccagacccggggccatgactggaggatgctggcccacaagctgaacctggaccgctacctgaactactttgccaccaagagcagccccaccggggtcatcctggacctgtgggaggcccagaacttcccagatggcaacctgtccatgctggccgctgtgctggaggagatgggcagacatgagaccgtggtgtccctggccgctgagggccagtactag

SEQ ID NO: 175485 - DNA, 2796 bp, synthetic construct
  misc_feature 1..2796: note = Description of Artificial Sequence: Synthetic coding sequence
  source 1..2796: mol_type = other DNA
atgaggaagggcctgcgggccacagctgcccgctgtggcctgggcctgggctacctgctgcagatgctggtgctgcctgccctggccctgctgagcgccagcggcaccggcagcgctgcccaggatgatgacttcttccacgagctgcctgagaccttccccagcgaccccccagagcccctgccccacttcctgattgagcctgaggaggcctacatcgtgaagaacaagcctgtgaacctgtactgcaaggccagccctgccacccagatctacttcaagtgcaacagcgagtgggtgcaccagaaggaccacatcgtggatgagcgggtggatgagaccagcggcctcatcgtgcgggaggtgtccattgagatcagccggcagcaggtggaggagctgtttggacctgaggactactggtgccagtgtgtggcctggagcagcgctggcaccaccaagagcaggaaggcctacgtgcgcatcgcctacctgaggaagacctttgagcaggagcccctgggcaaggaggtgtccctggagcaggaggtgctgctgcagtgccggcccccagagggcatccctgtggccgaggtggagtggctgaagaatgaagacatcatcgaccctgtggaggacaggaacttctacatcaccatcgaccacaacctgatcatcaagcaggcccggctgagtgacacagccaactacacctgtgtggccaagaacatcgtggccaagaggaagagcaccacagccaccgtcatcgtgtatgtgaatggaggctggagcacctggacagagtggagcgtgtgcaacagccgctgtggccggggctaccagaagaggaccaggacctgcaccaacccagcccccctgaatggaggagccttctgtgagggccagagcgtgcagaagatcgcctgcaccaccctgtgccctgtggatggccgctggaccccctggagcaagtggagcacctgtggcacagaatgtacccactggaggagaagagaatgtacagccccagcccccaagaatggaggcaaggactgtgatggcctggtgctgcagagcaagaactgcacagatggcctgtgcatgcagacagccccagacagtgatgatgtggccctgtatgtgggcatcgtgattgctgtgattgtgtgcctggccatctctgtggtggtggccctgtttgtgtacaggaagaaccaccgggactttgaaagtgacatcatcgacagcagcgccctgaatggaggcttccagcctgtgaacatcaaggccgcccggcaggacctgctggccgtgcccccagacctgaccagcgctgctgccatgtaccggggccctgtgtatgccctgcatgatgtgtctgacaagatccccatgaccaacagccccatcctggaccccctgcccaacctgaagatcaaggtgtacaacaccagcggggctgtgaccccccaggatgacctgtctgagttcaccagcaagctgagcccccagatgacccagagcctgctggagaatgaggccctgagcctgaagaaccagagcctggcccggcagacagaccccagctgcacagccttcggcagcttcaacagcctgggcggccacctgattgtgcccaacagcggcgtgtccctgctgatcccagctggggccatcccccagggccgggtgtatgagatgtatgtgacagtgcacaggaaggagaccatgaggcctcccatggatgacagccagaccctgctgacccctgtggtgtcctgtggccccccaggggccctgctgaccaggcctgtggtgctgaccatgcaccactgtgccgaccccaacacagaggactggaagatcctgctgaagaaccaggccgcccagggccagtgggaggatgtggtggtggtgggggaggagaacttcaccaccccctgctacatccagctggatgctgaggcctgccacatcctgacagagaacctgagcacctacgccctggtgggccacagcaccaccaaggccgccgccaagaggctgaagctggccatcttcggccccctgtgctgcagcagcctggagtacagcatccgggtgtactgcctggatgacacccaggatgccctgaaggagatcctgcacctggagcggcagatgggcggccagctgctggaggagcccaaggccctgcacttcaagggcagcacccacaacctgcggctgagcatccatgacatcgcccacagcctgtggaagagcaagctgctggccaagtaccaggagatccccttctaccacgtgtggagcggcagccagaggaacctgcactgcaccttcaccctggagcgcttcagcctgaacacagtggagctggtgtgcaagctgtgtgtgcggcaggtggagggggagggccagatcttccagctgaactgcaccgtgtctgaggagcccaccggcatcgacctgcccctgctggaccctgccaacaccatcaccaccgtgacaggccccagcgccttcagcatccccctgcccatccggcagaagctgtgcagcagcctggatgccccccagacccggggccatgactggaggatgctggcccacaagctgaacctggaccgctacctgaactactttgccaccaagagcagccccactggagtcatcctggacctgtgggaggcccagaacttcccagatggcaacctgtccatgctggccgctgtgctggaggagatgggcagacatgaaacagtggtgtccctggccgctgagggccagtactag

SEQ ID NO: 175486 - DNA, 3153 bp, synthetic construct
  misc_feature 1..3153: note = Description of Artificial Sequence: Synthetic coding sequence
  source 1..3153: mol_type = other DNA
atggagcccggccggggcggcacagagaccgtgggcaagtttgagttcagcaggaaggacctgattggccacggggcctttgctgtggtgttcaagggccgccaccgggagaagcatgacctggaggtggccgtgaagtgcatcaacaagaagaacctggccaagagccagaccctgctgggcaaggagatcaagatcctgaaggagctgaagcatgaaaatattgtggccctgtatgacttccaggagatggccaacagcgtgtacctggtgatggagtactgcaatggaggagacctggccgactacctgcacgccatgaggaccctgtctgaggacaccatccgcctcttcctgcagcagattgctggggccatgaggctgctgcacagcaagggcatcatccaccgggacctgaagccccagaacatcctgctgagcaacccagctggccggcgggccaaccccaacagcatccgggtgaagattgctgactttggatttgcccgctacctgcagagcaacatgatggccgccaccctgtgtggcagccccatgtacatggcccctgaggtgatcatgagccagcactatgatggcaaggctgacctgtggagcatcggcaccatcgtgtaccagtgcctgaccgggaaggcccccttccaggccagcagcccccaggacctgcggctcttctatgagaagaacaagaccctggtgcccaccatcccccgggagaccagcgcccccctgcggcagctgctgctggccctgctgcagaggaaccacaaggacaggatggactttgatgagttcttccaccaccccttcctggatgccagccccagcgtgaggaagagcccccctgtgcctgtgcccagctaccccagcagcggcagcggcagcagcagcagcagcagcagcaccagccacctggccagcccccccagcctgggggagatgcagcagctgcagaagaccctggccagccctgctgacacagctggcttcctgcacagcagccgggacagcggcggcagcaaggacagcagctgtgacacagatgactttgtgatggtgcctgcccagtttcctggggacctggtggccgaggcccccagcgccaagcccccaccagacagcctgatgtgcagcggcagcagcctggtggccagcgctggcctggagagccacggccgcacccccagccccagccccccctgcagcagcagccccagccccagcggccgggccggccccttcagcagcagccgctgtggggcctctgtgcccatccctgtgcccacccaggtgcagaactaccagagaattgaaagaaacctgcagagccccacccagttccagacccccaggagcagcgccatcagaagaagtggcagcaccagccccctgggctttgcccgggccagccccagccccccagcccacgccgagcacggcggcgtgctggccaggaagatgagcctgggcggcggccggccctacacccccagcccccaggtgggcaccatccctgagaggcctggctggagcggcacccccagcccccagggcgctgagatgaggggcggccgcagcccccggcccggcagcagcgcccctgagcacagccccaggaccagcggcctgggctgccgcctgcacagcgcccccaacctgagtgacctgcacgtggtgcggcccaagctgcccaagcccccaacagaccccctgggcgctgtgttcagccccccccaggccagccccccccagcccagccacggcctgcagagctgcaggaacctgcggggcagccccaagctgcctgacttcctgcagaggaaccccctgccccccatcctgggcagccccaccaaggctgtgcccagctttgacttccccaagacccccagcagccagaacctgctggccctgctggcccggcagggcgtggtgatgaccccaccaagaaacagaaccctgcctgacctgtctgaggtgggccccttccacggccagcccctgggccctggcctgcggcctggagaggaccccaagggccccttcggccgctccttcagcaccagccggctgacagacctgctgctgaaggccgccttcggcacccaggccccagaccccggcagcacagagagcctgcaggagaagcccatggagatcgcccccagcgctggctttggaggcagcctgcaccctggggcccgggccggcggcaccagcagccccagccctgtggtgttcaccgtgggcagccccccatctggcagcaccccaccccagggccccaggaccaggatgttttctgctggccccactggaagtgccagcagcagcgcccggcacctggtgcccggcccctgcagcgaggccccagcccctgagctgcctgcccctggccacggctgcagctttgctgaccccatcacagccaacctggagggcgctgtgacctttgaggccccagacctgcctgaggagaccctgatggagcaggagcacacagagatcctgcggggcctgcgcttcaccctgctgtttgtgcagcacgtgctggagattgctgccctgaagggcagcgccagcgaggccgccggcggccctgagtaccagctgcaggagagcgtggtggccgaccagatcagcctgctgagccgggagtggggctttgctgagcagctggtgctgtacctgaaggtggccgagctgctgagcagcggcctgcagagcgccatcgaccagatccgggccggcaagctgtgcctgagcagcacagtgaagcaggtggtgcggcggctgaatgagctgtacaaggcctctgtggtgtcctgccagggcctgagcctgcggctgcagcgcttcttcctggacaagcagaggctgctggaccgcatccacagcatcacagctgagcggctcatcttcagccatgctgtgcagatggtgcagagcgctgccctggatgagatgttccagcaccgggagggctgtgtgccccgctaccacaaggccctgctgctgctggagggcctgcagcacatgctgagtgaccaggccgacattgaaaatgtgaccaagtgcaagctgtgcattgaaagaaggctgagcgccctgctgaccggcatctgtgcctag

SEQ ID NO: 175487 - DNA, 1452 bp, synthetic construct
  misc_feature 1..1452: note = Description of Artificial Sequence: Synthetic coding sequence
  source 1..1452: mol_type = other DNA
atgcagagaaatggcagcgccagccggggcctggagaagacccggctgcggctgtgccgggaggcccgcatccctgagagcgccttcctgaccggcctgacccgggagagctgggaggcccgctgctggtgtgccaaggacacccgggaggtggtggccatcaagtgtgtggccaagaagagcctgaacaaggcctctgtggagaacctgctgacagaaattgagatcctgaagggcatccgccacccccacatcgtgcagctgaaggacttccagtgggacagcgacaacatctacctgatcatggagttctgtgccggcggggacctgagccgcttcatccacacccggcgcatcctgcctgagaaggtggcccgggtcttcatgcagcagctggccagcgccctgcagttcctgcacgagaggaacatcagccacctggacctgaagccccagaacatcctgctgagcagcctggagaagccccacctgaagctggccgactttggatttgcccagcacatgagcccctgggatgagaagcacgtgctgcggggcagccccctgtacatggcccctgagatggtgtgccagaggcagtatgatgcccgggtggacctgtggagcatgggcgtcatcctgtatgaggccctgtttggccagcccccatttgccagccgctccttcagcgagctggaggagaagatccgcagcaacagagtcatcgagctgcccctgcggcccctgctgagccgggactgccgggacctgctgcagaggctgctggagcgggaccccagccgccgcatctccttccaggacttctttgcccacccctgggtggacctggagcacatgcccagcggggagagcctgggccgggccacagccctggtggtgcaggccgtgaagaaggaccaggagggggacagcgctgctgccctgagcctgtactgcaaggccctggacttctttgtgcctgccctgcactatgaggtggatgcccagaggaaggaggccatcaaggccaaggtgggccagtatgtgtccagagctgaggagctgaaggccatcgtgagcagcagcaaccaggccctgctgcggcagggcaccagcgcccgggacctgctgcgggagatggcccgggacaagccccggctgctggccgccctggaggtggccagcgctgccatggccaaggaggaggccgccggcggggagcaggatgccctggacctgtaccagcacagcctgggggagctgctgctgctgctggccgctgagcccccaggaagaagaagagagctgctgcacacagaggtgcagaacctgatggcccgggcagagtacctgaaggagcaggtgaagatgagggagagccgctgggaggccgacaccctggacaaggagggcctgtctgagagcgtgcgcagcagctgcaccctgcagtag

SEQ ID NO: 175488 - DNA, 1419 bp, synthetic construct
  misc_feature 1..1419: note = Description of Artificial Sequence: Synthetic coding sequence
  source 1..1419: mol_type = other DNA
atggccggccctggctggggccccccccggctggatggcttcatcctgacagagcggctgggcagcggcacctacgccaccgtgtacaaggcctatgccaagaaggacacccgggaggtggtggccatcaagtgtgtggccaagaagagcctgaacaaggcctctgtggagaacctgctgacagaaattgagatcctgaagggcatccgccacccccacatcgtgcagctgaaggacttccagtgggacagcgacaacatctacctgatcatggagttctgtgccggcggggacctgagccgcttcatccacacccggcgcatcctgcctgagaaggtggcccgggtcttcatgcagcagctggccagcgccctgcagttcctgcatgaaagaaacatcagccacctggacctgaagccccagaacatcctgctgagcagcctggagaagccccacctgaagctggccgactttggatttgcccagcacatgagcccctgggatgagaagcacgtgctgcggggcagccccctgtacatggcccctgagatggtgtgccagaggcagtatgatgcccgggtggacctgtggagcatgggcgtcatcctgtatgaggccctgtttggccagcccccatttgccagccgctccttcagcgagctggaggagaagatccgcagcaacagagtgattgagctgcccctgcggcccctgctgagccgggactgccgggacctgctgcagaggctgctggagcgggaccccagccgccgcatctccttccaggacttctttgcccacccctgggtggacctggagcacatgcccagcggggagagcctgggccgggccacagccctggtggtgcaggccgtgaagaaggaccaggagggggacagcgctgctgccctgagcctgtactgcaaggccctggacttctttgtgcctgccctgcactatgaggtggatgcccagaggaaggaggccatcaaggccaaggtgggccagtatgtgtccagagctgaggagctgaaggccatcgtgagcagcagcaaccaggccctgctgcggcagggcaccagcgcccgggacctgctgcgggagatggcccgggacaagccccggctgctggccgccctggaggtggccagcgctgccatggccaaggaggaggccgccggcggggagcaggatgccctggacctgtaccagcacagcctgggggagctgctgctgctgctggccgctgagcccccaggaagaagaagagagctgctgcacacagaggtgcagaacctgatggcccgggcagagtacctgaaggagcaggtgaagatgagggagagccgctgggaggccgacaccctggacaaggagggcctgtctgagagcgtgcgcagcagctgcaccctgcagtag

SEQ ID NO: 175489 - DNA, 9705 bp, synthetic construct
  misc_feature 1..9705: note = Description of Artificial Sequence: Synthetic coding sequence
  source 1..9705: mol_type = other DNA
atggtgaagaggaagagcagcgagggccaggagcaggacggcggccggggcatccccctgcccatccagaccttcctgtggaggcagaccagcgccttcctgcggcccaagctgggcaagcagtatgaggccagctgtgtgtcctttgagcgggtgctggtggagaacaagctgcacggcctgagccctgccctgtctgaggccatccagagcatcagccgctgggagctggtgcaggccgccctgccccacgtgctgcactgcacagccaccctgctgagcaacagaaacaagctgggccaccaggacaagctgggcgtggccgagaccaagctgctgcacaccctgcactggatgctgctggaggccccccaggactgcaacaatgaaagatttggaggaacagaccggggcagctcctggggcggcagcagcagcgccttcatccaccaggtggagaaccagggcagccctggccagccctgccagagcagcagcaatgatgaggaggagaacaacagaaggaagatcttccagaacagcatggccaccgtggagctgtttgtgttcctgtttgcccccctggtgcaccgcatcaaggagagtgacctgaccttccggctggccagcggcctggtgatctggcagcccatgtgggagcaccggcagcccggggtgtctggcttcaccgccctggtgaagcccatccggaacatcatcacagccaagaggagcagccccatcaacagccagagcaggacctgtgagagccccaaccaggatgcccggcacctggagggcctgcaggtggtgtgtgagaccttccagagcgacagcatcagccccaaggccaccatcagcggctgccaccggggcaacagctttgatggcagcctgagcagccagaccagccaggagcggggccccagccacagccgggccagcctggtgattcctccctgccagaggagccgctatgccacctactttgatgtggccgtgctgcgctgcctgctgcagccccactggagcgaggagggcacccagtggagcctgatgtactacctgcagaggctgcggcacatgctggaggagaagccagagaagcccccagagccagacatccccctgctgccccggcccaggagcagctccatggtggccgccgcccccagcctggtgaacacccacaagacccaggacctgaccatgaagtgcaatgaggaggagaagagcctgagcagcgaggccttcagcaaggtgtccctgaccaacctgcggcgctctgctgtgcctgacctgagcagtgacctgggcatgaacatcttcaagaagttcaagagcaggaaagaagatcgggagaggaagggcagcatccccttccaccacacaggcaagagaagacccaggaggatgggcgtgcccttcctgctgcacgaggaccacctggatgtgagccccaccaggagcaccttctcctttggcagcttcagcggcctgggggaggaccggcggggcattgaaaaaggaggctggcagaccaccatcctgggcaagctgacccggcggggcagcagtgatgctgccacagagatggagagcctgagcgcccggcacagccacagccaccacaccctggtgtctgacctgcctgaccccagcaacagccatggagaaaatacagtgaaggaggtgcgcagccagatcagcaccatcaccgtggccaccttcaacaccaccctggccagcttcaacgtgggctatgctgacttcttcaatgagcacatgaggaagctgtgcaaccaggtgcccatccctgagatgcctcatgagcccctggcctgtgccaacctgcccaggagcctgacagacagctgcatcaactacagctacctggaggacacagagcacattgatggcaccaacaactttgtgcacaagaatggcatgctggacctgtctgtggtgctgaaggctgtgtacctggtgctgaaccacgacatcagcagccgcatctgtgatgtggccctgaacatcgtggagtgcctgctgcagctgggcgtggtgccctgtgtggagaagaacaggaagaagtctgagaacaaggaaaatgagaccctggagaagaggcccagcgagggcgccttccagttcaagggcgtgtctggcagcagcacctgtggctttggaggccctgctgtgtctggagctggagatggcggcggggaggagggcggcggcggagatggcggcggcggcggcggagatggcggcggcggcggcggcggcggcggcggcccctatgagaagaatgacaagaaccaggagaaggatgagagcacccctgtgagcaaccaccggctggccctgaccatgctgatcaagatcgtgaagagcctgggctgtgcctacggctgtggggagggccaccggggcctgagcggggaccggctgcggcaccaggcccagaactgcctgaccaagctgtacaagctggacaagatgcagttccggcagaccatgagggactatgtgaacaaggacagcctgaacaacgtggtggacttcctgcacgccctgctgggcttctgcatggagcctgtgacagacaacaaggccggctttggaaacaacttcaccaccgtggacaacaagagcacagcccagaatgtggagggcatcatcgtgtctgccatgttcaagagcctcatcacccgctgtgccagcaccacccatgagctgcacagccctgagaacctgggcctgtactgtgacatccggcagctggtgcagttcatcaaggaggcccatggaaatgtgttccggcgggtggccctgagcgccctgctggacagcgctgagaagctggcccctgggaagaaggtggaggagaatgagcaggagagcaagccagctggcagcaagaggtctgaggccggcagcatcgtggacaagggccaggtgagcagcgcccctgaggagtgccgctccttcatgagcggccggcccagccagaccccagagcatgatgagcagatgcagggcgccaacctgggcaggaaggacttctggaggaagatgttcaagagccagagcgctgccagtgacaccagcagccagagcgagcaggacaccagtgaatgtaccacagcccacagcggcaccaccagtgacagaagagcccggagccgcagccgccgcatcagcctgaggaagaagctgaagctgcccatcggcaagaggaactggctgaagaggagcagcctgagcggcctggctgatggagtggaggacctgctggacatcagctctgtggaccggctgtccttcatccggcagagcagcaaggtgaagttcaccagcgctgtgaagctgtctgagggcggccctggcagcggcatggagaatggaagagatgaggaggagaacttcttcaagaggctgggctgccacagctttgatgaccacctgagccccaaccaggacggcggcaagagcaagaatgtggtgaacctgggcgccatccggcagggcatgaagcgcttccagttcctgctgaactgctgtgagcccggcaccatcccagatgccagcatcctggccgccgccctggacctggaggcccctgtggtggcccgggccgccctcttcctggagtgtgccaggtttgtgcaccgctgcaacagaggcaactggccagagtggatgaagggccaccacgtgaacatcaccaagaagggcctgagccggggccgcagccccatcgtgggcaacaagaggaaccagaagctgcagtggaatgctgccaagctgttctaccagtggggagatgccatcggcgtgcggctgaatgagctgtgccacggggagagcgagagccctgccaacctgctgggcctcatctatgatgaggagaccaagaggcggctgaggaaagaagatgaggaggaggacttcctggatgacagcacagtgaaccccagcaaatgtggctgcccctttgccctgaagatggccgcctgccagctgctgctggagatcaccaccttcctgcgggagaccttcagctgcctgccccggcccaggacagagcccctggtggacctggagagctgccgcctgcggctggaccctgagctggacagacacagatatgaaaggaagatcagctttgctggggtgctggatgaaaatgaagacagcaaggacagcctgcacagcagcagccacaccctgaagagtgatgctggggtggaggagaagaaggagggcagcccctggagcgccagcgagcccagcattgagcctgagggcatgagcaatgctggagctgaggagaactaccacaggaacatgtcctggctgcacgtgatgatcctgctgtgcaaccagcagagcttcatctgcacccacgtggactactgccacccccactgctacctgcaccacagccgcagctgtgcccggctggtgcgggccatcaagctgctgtatggagacagcgtggacagcctgcgggagagcagcaacatcagctctgtggccctgcggggcaagaagcagaaggaatgtagtgacaagagctgcctgcggacccccagcctgaagaagagggtgtctgatgccaacctggagggcaagaaggacagcggcatgctgaagtacatccggctgcaggtgatgagcctgagccctgcccccctgagcctgctgatcaaggccgcccccatcctgacagaggagatgtatggagacatccagcctgctgcctgggagctgctgctgtccatggatgagcacatggccggggctgctgctgccatgttcctgctgtgtgctgtgaaggtgcctgaggccgtgtctgacatgctgatgtctgagttccaccaccctgagaccgtgcagaggctgaatgctgtgctgaagttccacaccctgtggaggttccgctaccaggtgtggcccaggatggaggagggcgcccagcagatcttcaagatccccccacccagcatcaacttcaccctgcccagccctgtgctgggcatgcccagcgtgcccatgtttgatcctccctgggtgccccagtgcagcggctctgtgcaggaccccatcaatgaagaccagagcaagagcttcagcgcccgggctgtgagccgcagccaccagagagctgagcacatcctgaagaacctgcagcaggaggaggagaagaagaggctgggccgggaggccagcctcatcacagccatccccatcacccaggaggcctgctatgagcccacctgcacccccaacagcgagcctgaggaggaggtggaggaggtgaccaacctggccagccggcggctgtctgtgagccccagctgcaccagcagcaccagccacaggaactacagcttccggcggggctctgtgtggagcgtgcgctctgctgtgtctgcagaagatgaggagcacaccacagagcacacccccaaccaccacgtgccccagcccccccaggccgtgtttcctgcctgcatctgtgccgctgtgctgcccatcgtgcacctgatggaggatggagaggtgcgggaggatggagtggccgtgtctgctgtggcccagcaggtgctgtggaactgcctgattgaggaccccagcacagtgctgcggcacttcctggagaagctgaccatcagcaaccggcaggatgagctgatgtacatgctgaggaagctgctgctgaacatcggggacttccctgcccagaccagccacatcctcttcaactacctggtgggcctcatcatgtactttgtgaggaccccctgtgagtggggcatggatgccatcagcgccaccctgaccttcctgtgggaggtggtgggctacgtggagggcctcttcttcaaggacctgaagcagaccatgaagaaggagcagtgtgaggtgaagctgctggtgacagcctccatgcctggcaccaagaccctggtggtgcacggccagaatgaatgtgacatccccacccagctgcctgtgcatgaggacacccagtttgaggccctgctgaaggaatgtctggagttcttcaacatccctgagagccagagcacccactacttcctgatggacaagcgctggaacctgatccactacaacaagacctacgtgcgggacatctaccccttccgccgctctgtgagcccccagctgaacctggtgcacatgcaccctgagaagggccaggagctgatccagaagcaggtgttcaccaggaagctggaggaggtgggccgggtgctcttcctgatcagcctgacccagaagatccccacagcccacaagcagagccacgtgtccatgctgcaggaggacctgctgcggctgcccagcttccccaggtctgccattgatgctgagttcagcctcttcagtgacccccaggccggcaaggagctgtttggcctggacaccctgcagaagagcctgtggatccagctgctggaggagatgttcctgggcatgcccagcgagttcccctggggagatgagatcatgctgttcctgaatgtgttcaatggagccctgatcctgcacccagaagattctgccctgctgcggcagtatgctgccaccgtcatcaacacagctgtgcacttcaaccacctgttcagcctgagcggctaccagtggatcctgcccaccatgctgcaggtgtacagcgactatgagagcaacccccagctgcggcaggccattgaatttgcctgccaccagttctacatcctgcacaggaagccctttgtgctgcagctgtttgcctctgtggcccccctgctggagttcccagatgctgccaacaacggccccagcaagggcgtgtctgcccagtgcctgtttgacctgctgcagagcctggagggggagaccacagacatcctggacatcctggagctggtgaaggccgagaagcccctgaagagcctggacttctgctatggaaatgaagacctgaccttcagcatcagcgaggccatcaagctgtgtgtgacagtggtggcctatgcccctgagagcttccgcagcctgcagatgctgatggtgctggaggccctggtgccctgctacctgcagaagctgaagaggcagaccagccaggtggagaccgtgcctgctgcccgggaggagattgctgccacagctgccctggccaccagcctgcaggccctgctgtacagcgtggaggtgctgacccggcccatgacagccccccagatgagccgctgtgaccagggccacaagggcaccaccacagccaaccacaccatgagcagtggagtgaacacccgctaccaggagcagggcgccaagctgcacttcatccgggagaacctgcacctgctggaggagggccagggcatcccccgggaggagctggatgaaagaattgcccgggaggagttcagaagaccccgggagagcctgctgaacatctgcacagagttctacaagcactgcggcccccggctgaagatcctgcagaacctggccggggagccccgggtgattgccctggagctgctggatgtgaagagccacatgaggctggccgagatcgcccacagcctgctgaagctggccccctatgacacccagaccatggagagccggggcctgcggcgctacatcatggagatgctgcccatcacagactggacagctgaggccgtgcggcctgccctgatcctgatcctgaagaggctggacaggatgttcaacaagatccacaagatgcccaccctgcggcggcaggtggagtgggagcccgccagcaacctgattgagggcgtgtgcctgaccctgcagaggcagcccatcatctccttcctgccccacctgcggagcctcatcaacgtgtgtgtgaacctggtgatgggcgtggtgggccccagctctgtggctgatggcctgcccctgctgcacctgagcccctacctgagcccccccctgcccttcagcacagctgtggtgcggctggtggccctgcagatccaggccctgaaggaggacttccccctgagccacgtgatcagccccttcaccaaccaggagcggcgggagggcatgctgctgaacctgctgatcccctttgtgctgactgtgggcagcggcagcaaggacagcccctggctggagcagcctgaggtgcagctgctgctgcagaccgtcatcaacgtgctgctgcccccacgcatcatcagcaccagccgcagcaagaacttcatgctggagagcagccctgcccactgcagcaccccaggagatgctgggaaggacctgcggcgggagggcctggccgagagcaccagccaggccgcctacctggccctgaaggtgatcctggtgtgctttgagcggcagctgggcagccagtggtactggctgagcctgcaggtgaaggagatggccctgaggaaggtgggcggcctggccctgtgggacttcctggacttcatcgtgaggacccgcatccccatctttgtgctgctgcggcccttcatccagtgcaagctgctggcccagcctgctgagaaccacgaggagctgagcgcccggcagcacatcgctgaccagctggagcggcgcttcatcccccggcccctgtgcaagagcagcctgattgctgagttcaacagcgagctgaagatcctgaaggaggccgtgcacagcggcagcgcctaccagggcaagaccagcatcagcacagtgggcaccagcaccagcgcctaccgcctgagcctggccaccatgagccgcagcaacacaggcaccggcaccgtgtgggagcaggacagcgagcccagccagcaggccagccaggacaccctgagcaggacagatgaagaagatgaggagaatgacagcatctccatgcccagcgtggtgtctgagcaggaggcctacctgctgagcgccatcggcagaagacgcttcagcagccacgtgtcctccatgtctgtgccccaggccgaggtgggcatgctgcccagccagagggtggccagcatccagagcgagcccggccagcagaacctgctggtgcagcagcccctgggcaggaagaggggcctgcggcagctgcggcggcccctgctgagccggcagaagacccagacagagcccaggaaccggcagggcgcccggctgagcaccaccaggaggagcatccagcccaagaccaagcccagcgctgaccagaagaggtctgtgaccttcatcgaggcccagcctgagcctgctgctgcccccacagatgccctgcctgccaccggccagctgcagggctgcagccctgcccccagcaggaagccagaggccatggatgagcctgtgctgaccagcagccctgccatcgtggtggccgacctgcacagcgtgagccccaagcagagcgagaacttccccacagaggagggggagaaggaggaggacacagaggcccagggcgccacagcccacagccccctgagcgcccagctgagtgaccctgatgacttcaccggcctggagaccagcagcctgctgcagcacggggacacagtgctgcacatcagtgaagaaaatggcatggagaaccccctgctgagcagccagttcaccttcacccccacagagctgggcaagacagatgctgtgctggatgagagccacgtgtag

SEQ ID NO: 175490 - DNA, 9777 bp, synthetic construct
  misc_feature 1..9777: note = Description of Artificial Sequence: Synthetic coding sequence
  source 1..9777: mol_type = other DNA
atggtgaagaggaagagcagcgagggccaggagcaggacggcggccggggcatccccctgcccatccagaccttcctgtggaggcagaccagcgccttcctgcggcccaagctgggcaagcagtatgaggccagctgtgtgtcctttgagcgggtgctggtggagaacaagctgcacggcctgagccctgccctgtctgaggccatccagagcatcagccgctgggagctggtgcaggccgccctgccccacgtgctgcactgcacagccaccctgctgagcaacagaaacaagctgggccaccaggacaagctgggcgtggccgagaccaagctgctgcacaccctgcactggatgctgctggaggccccccaggactgcaacaatgaaagatttggaggaacagaccggggcagctcctggggcggcagcagcagcgccttcatccaccaggtggagaaccagggcagccctggccagccctgccagagcagcagcaatgatgaggaggagaacaacagaaggaagatcttccagaacagcatggccaccgtggagctgtttgtgttcctgtttgcccccctggtgcaccgcatcaaggagagtgacctgaccttccggctggccagcggcctggtgatctggcagcccatgtgggagcaccggcagcccggggtgtctggcttcaccgccctggtgaagcccatccggaacatcatcacagccaagaggagcagccccatcaacagccagagcaggacctgtgagagccccaaccaggatgcccggcacctggagggcctgcaggtggtgtgtgagaccttccagagcgacagcatcagccccaaggccaccatcagcggctgccaccggggcaacagctttgatggcagcctgagcagccagaccagccaggagcggggccccagccacagccgggccagcctggtgattcctccctgccagaggagccgctatgccacctactttgatgtggccgtgctgcgctgcctgctgcagccccactggagcgaggagggcacccagtggagcctgatgtactacctgcagaggctgcggcacatgctggaggagaagccagagaagcccccagagccagacatccccctgctgccccggcccaggagcagctccatggtggccgccgcccccagcctggtgaacacccacaagacccaggacctgaccatgaagtgcaatgaggaggagaagagcctgagcagcgaggccttcagcaaggtgtccctgaccaacctgcggcgctctgctgtgcctgacctgagcagtgacctgggcatgaacatcttcaagaagttcaagagcaggaaagaagatcgggagaggaagggcagcatccccttccaccacacaggcaagagaagacccaggaggatgggcgtgcccttcctgctgcacgaggaccacctggatgtgagccccaccaggagcaccttctcctttggcagcttcagcggcctgggggaggaccggcggggcattgaaaaaggaggctggcagaccaccatcctgggcaagctgacccggcggggcagcagtgatgctgccacagagatggagagcctgagcgcccggcacagccacagccaccacaccctggtgtctgacctgcctgaccccagcaacagccatggagaaaatacagtgaaggaggtgcgcagccagatcagcaccatcaccgtggccaccttcaacaccaccctggccagcttcaacgtgggctatgctgacttcttcaatgagcacatgaggaagctgtgcaaccaggtgcccatccctgagatgcctcatgagcccctggcctgtgccaacctgcccaggagcctgacagacagctgcatcaactacagctacctggaggacacagagcacattgatggcaccaacaactttgtgcacaagaatggcatgctggacctgtctgtggtgctgaaggctgtgtacctggtgctgaaccacgacatcagcagccgcatctgtgatgtggccctgaacatcgtggagtgcctgctgcagctgggcgtggtgccctgtgtggagaagaacaggaagaagtctgagaacaaggaaaatgagaccctggagaagaggcccagcgagggcgccttccagttcaagggcgtgtctggcagcagcacctgtggctttggaggccctgctgtgtctggagctggagatggcggcggggaggagggcggcggcggagatggcggcggcggcggcggagatggcggcggcggcggcggcggcggcggcggcccctatgagaagaatgacaagaaccaggagaaggatgagagcacccctgtgagcaaccaccggctggccctgaccatgctgatcaagatcgtgaagagcctgggctgtgcctacggctgtggggagggccaccggggcctgagcggggaccggctgcggcaccaggtgttcagagaaaatgcccagaactgcctgaccaagctgtacaagctggacaagatgcagttccggcagaccatgagggactatgtgaacaaggacagcctgaacaacgtggtggacttcctgcacgccctgctgggcttctgcatggagcctgtgacagacaacaaggccggcttcggcaacaacttcaccaccgtggacaacaagagcacagcccagaatgtggagggcatcatcgtgtctgccatgttcaagagcctcatcacccgctgtgccagcaccacccatgagctgcacagccctgagaacctgggcctgtactgtgacatccggcagctggtgcagttcatcaaggaggcccacggcaatgtgttcagaagagtggccctgagcgccctgctggacagcgctgagaagctggcccctgggaagaaggtggaggagaatgagcaggagagcaagccagctggcagcaagaggtctgaggccggcagcatcgtggacaagggccaggtgtcctctgccccagaagaatgtcgctccttcatgagcggccggcccagccagaccccagagcatgatgagcagatgcagggcgccaacctgggcaggaaggacttctggaggaagatgttcaagagccagagcgctgccagtgacaccagcagccagagcgagcaggacaccagcgagtgcaccacagcccacagcggcaccaccagtgaccggcgggcccggagccgcagccgccgcatcagcctgaggaagaagctgaagctgcccatcggcaagaggaactggctgaagaggagcagcctgagcggcctggctgatggagtggaggacctgctggacatcagctctgtggaccggctgtccttcatccggcagagcagcaaggtgaagttcaccagcgctgtgaagctgtctgagggcggccctggcagcggcatggagaatggaagagatgaggaggagaacttcttcaagaggctgggctgccacagctttgatgaccacctgagccccaaccaggacggcggcaagagcaagaatgtggtgaacctgggcgccatccggcagggcatgaagcgcttccagttcctgctgaactgctgtgagcccggcaccatcccagatgccagcatcctggccgccgccctggacctggaggcccctgtggtggcccgggccgccctcttcctggagtgtgccaggtttgtgcaccgctgcaacagaggcaactggccagagtggatgaagggccaccacgtgaacatcaccaagaagggcctgagccggggccgcagccccatcgtgggcaacaagaggaaccagaagctgcagtggaatgctgccaagctgttctaccagtggggagatgccatcggcgtgcggctgaatgagctgtgccacggggagagcgagagccctgccaacctgctgggcctcatctatgatgaggagaccaagaggcggctgaggaaggaggatgaggaggaggacttcctggatgacagcacagtgaaccccagcaaatgtggctgcccctttgccctgaagatggccgcctgccagctgctgctggagatcaccaccttcctgcgggagaccttcagctgcctgccccggcccaggacagagcccctggtggacctggagagctgccgcctgcggctggaccctgagctggacagacacagatatgaaaggaagatcagctttgctggggtgctggatgaaaatgaagacagcaaggacagcctgcacagcagcagccacaccctgaagagtgatgctggggtggaggagaagaaggagggcagcccctggagcgccagcgagcccagcattgagcctgagggcatgagcaatgctggagctgaggagaactaccacaggaacatgtcctggctgcacgtgatgatcctgctgtgcaaccagcagagcttcatctgcacccacgtggactactgccacccccactgctacctgcaccacagccgcagctgtgcccggctggtgcgggccatcaagctgctgtatggagacagcgtggacagcctgcgggagagcagcaacatcagctctgtggccctgcggggcaagaagcagaaggagtgcagcgacaagagctgcctgcggacccccagcctgaagaagagggtgtctgatgccaacctggagggcaagaaggacagcggcatgctgaagtacatccggctgcaggtgatgagcctgagccctgcccccctgagcctgctgatcaaggccgcccccatcctgacagaggagatgtacggggacatccagcctgctgcctgggagctgctgctgtccatggatgagcacatggccggggctgctgctgccatgttcctgctgtgtgctgtgaaggtgcctgaggccgtgtctgacatgctgatgtctgagttccaccaccctgagaccgtgcagaggctgaatgctgtgctgaagttccacaccctgtggaggttccgctaccaggtgtggcccaggatggaggagggcgcccagcagatcttcaagatccccccacccagcatcaacttcaccctgcccagccctgtgctgggcatgcccagcgtgcccatgtttgaccccccctgggtgccccagtgcagcggctctgtgcaggaccccatcaatgaagaccagagcaagagcttcagcgcccgggctgtgagccgcagccaccagagagctgagcacatcctgaagaacctgcagcaggaggaggagaagaagaggctgggccgggaggccagcctcatcacagccatccccatcacccaggaggcctgctatgagcccacctgcacccccaacagcgagcctgaggaggaggtggaggaggtgaccaacctggccagccggcggctgtctgtgagccccagctgcaccagcagcaccagccacaggaactacagcttcagaagaggctctgtgtggagcgtgcgctctgctgtgtctgcagaagatgaggagcacaccacagagcacacccccaaccaccacgtgccccagcccccccaggccgtgtttcctgcctgcatctgtgccgctgtgctgcccatcgtgcacctgatggaggatggagaggtgagagaagatggagtggccgtgtctgctgtggcccagcaggtgctgtggaactgcctgattgaggaccccagcacagtgctgcggcacttcctggagaagctgaccatcagcaaccggcaggatgagctgatgtacatgctgaggaagctgctgctgaacattggagacttccctgcccagaccagccacatcctcttcaactacctggtgggcctcatcatgtactttgtgaggaccccctgtgagtggggcatggatgccatcagcgccaccctgaccttcctgtgggaggtggtgggctacgtggagggcctcttcttcaaggacctgaagcagaccatgaagaaggagcagtgtgaggtgaagctgctggtgacagcctccatgcctggcaccaagaccctggtggtgcacggccagaatgaatgtgacatccccacccagctgcctgtgcatgaggacacccagtttgaggccctgctgaaggagtgcctggagttcttcaacatccctgagagccagagcacccactacttcctgatggacaagcgctggaacctgatccactacaacaagacctacgtgcgggacatctaccccttcagaagatctgtgagcccccagctgaacctggtgcacatgcaccctgagaagggccaggagctgatccagaagcaggtgttcaccaggaagctggaggaggtgggccgggtgctcttcctgatcagcctgacccagaagatccccacagcccacaagcagagccacgtgtccatgctgcaggaggacctgctgcggctgcccagcttccccaggtctgccattgatgctgagttcagcctcttcagtgacccccaggccggcaaggagctgtttggcctggacaccctgcagaagagcctgtggatccagctgctggaggagatgttcctgggcatgcccagcgagttcccctggggagatgagatcatgctgttcctgaatgtgttcaacggggccctgatcctgcaccctgaggacagcgccctgctgcggcagtatgctgccaccgtcatcaacacagctgtgcacttcaaccacctgttcagcctgagcggctaccagtggatcctgcccaccatgctgcaggtgtacagcgactatgagagcaacccccagctgcggcaggccatcgagtttgcctgccaccagttctacatcctgcacaggaagccctttgtgctgcagctgtttgcctctgtggcccccctgctggagttcccagatgctgccaacaacggccccagcaaaggagtgtctgcccagtgcctgtttgacctgctgcagagcctggagggggagaccacagacatcctggacatcctggagctggtgaaggccgagaagcccctgaagagcctggacttctgctatggaaatgaagacctgaccttcagcatcagcgaggccatcaagctgtgtgtgacagtggtggcctatgcccctgagagcttccgcagcctgcagatgctgatggtgctggaggccctggtgccctgctacctgcagaagctgaagaggcagaccagccaggtggagaccgtgcctgctgcccgggaggagattgctgccacagctgccctggccaccagcctgcaggccctgctgtacagcgtggaggtgctgacccggcccatgacagccccccagatgagccgctgtgaccagggccacaagggcaccaccacagccaaccacaccatgagcagcggcgtgaacacccgctaccaggagcagggcgccaagctgcacttcatccgggagaacctgcacctgctggaggagggccagggcatcccccgggaggagctggatgagcgcatcgcccgggaggagttccggcggccccgggagagcctgctgaacatctgcacagagttctacaagcactgcggcccccggctgaagatcctgcagaacctggccggggagcccagggtcatcgccctggagctgctggatgtgaagagccacatgaggctggccgagatcgcccacagcctgctgaagctggccccctatgacacccagaccatggagagccggggcctgcggcgctacatcatggagatgctgcccatcacagactggacagctgaggccgtgcggcctgccctgatcctgatcctgaagaggctggacaggatgttcaacaagatccacaagatgcccaccctgcggcggcaggtggagtgggagcccgccagcaacctgattgaaggagtgtgcctgaccctgcagaggcagcccatcatctccttcctgccccacctgcggagcctcatcaacgtgtgtgtgaacctggtgatgggcgtggtgggccccagctctgtggctgatggcctgcccctgctgcacctgagcccctacctgagcccccccctgcccttcagcacagctgtggtgcggctggtggccctgcagatccaggccctgaaggaggacttccccctgagccacgtgatcagccccttcaccaaccaggagcggcgggagggcatgctgctgaacctgctgatcccctttgtgctgactgtgggcagcggcagcaaggacagcccctggctggagcagcctgaggtgcagctgctgctgcagaccgtcatcaacgtgctgctgcccccacgcatcatcagcaccagccgcagcaagaacttcatgctggagagcagccctgcccactgcagcaccccaggagatgctgggaaggacctgcggcgggagggcctggccgagagcaccagccaggccgcctacctggccctgaaggtgatcctggtgtgctttgagcggcagctgggcagccagtggtactggctgagcctgcaggtgaaggagatggccctgaggaaggtgggcggcctggccctgtgggacttcctggacttcatcgtgaggacccgcatccccatctttgtgctgctgcggcccttcatccagtgcaagctgctggcccagcctgcagaaaatcatgaggagctgagcgcccggcagcacatcgctgaccagctggagcggcgcttcatcccccggcccctgtgcaagagcagcctgattgctgagttcaacagcgagctgaagatcctgaaggaggccgtgcacagcggcagcgcctaccagggcaagaccagcatcagcacagtgggcaccagcaccagcgcctaccgcctgagcctggccaccatgagccgcagcaacacaggaactggaacagtgtgggagcaggacagcgagcccagccagcaggccagccaggacaccctgagcaggacagatgaggaggatgaagaaaatgacagcatctccatgcccagcgtggtgtctgagcaggaggcctacctgctgagcgccatcggcagaagacgcttcagcagccacgtgtcctccatgtctgtgccccaggccgaggtgggcatgctgcccagccagagcgagcccaacgtgctggatgacagccagggcctggccgctgagggcagcctgagccgggtggccagcatccagagcgagcccggccagcagaacctgctggtgcagcagcccctgggcaggaagaggggcctgcggcagctgcggcggcccctgctgagccggcagaagacccagacagagcccaggaaccggcagggcgcccggctgagcaccaccaggaggagcatccagcccaagaccaagcccagcgctgaccagaagaggtctgtgaccttcatcgaggcccagcctgagcctgctgctgcccccacagatgccctgcctgccaccggccagctgcagggctgcagccctgcccccagcaggaagccagaggccatggatgagcctgtgctgaccagcagccctgccatcgtggtggccgacctgcacagcgtgagccccaagcagagcgagaacttccccacagaggagggggagaaggaggaggacacagaggcccagggcgccacagcccacagccccctgagcgcccagctgagtgaccctgatgacttcaccggcctggagaccagcagcctgctgcagcacggggacacagtgctgcacatcagtgaagaaaatggcatggagaaccccctgctgagcagccagttcaccttcacccccacagagctgggcaagacagatgctgtgctggatgagagccacgtgtag

SEQ ID NO: 175491 - DNA, 1401 bp, synthetic construct
  misc_feature 1..1401: note = Description of Artificial Sequence: Synthetic coding sequence
  source 1..1401: mol_type = other DNA
atggagagccggggcctgcggcgctacatcatggagatgctgcccatcacagactggacagctgaggccgtgcggcctgccctgatcctgatcctgaagaggctggacaggatgttcaacaagatccacaagatgcccaccctgcggcggcaggtggagtgggagcccgccagcaacctgattgaaggagtgtgcctgaccctgcagaggcagcccatcatctccttcctgccccacctgcggagcctcatcaacgtgtgtgtgaacctggtgatgggcgtggtgggccccagctctgtggctgatggcctgcccctgctgcacctgagcccctacctgagcccccccctgcccttcagcacagctgtggtgcggctggtggccctgcagatccaggccctgaaggaggacttccccctgagccacgtgatcagccccttcaccaaccaggagcggcgggagggcatgctgctgaacctgctgatcccctttgtgctgactgtgggcagcggcagcaaggacagcccctggctggagcagcctgaggtgcagctgctgctgcagaccgtcatcaacgtgctgctgcccccacgcatcatcagcaccagccgcagcaagaacttcatgctggagagcagccctgcccactgcagcaccccaggagatgctgggaaggacctgcggcgggagggcctggccgagagcaccagccaggccgcctacctggccctgaaggtgatcctggtgtgctttgagcggcagctgggcagccagtggtactggctgagcctgcaggtgaaggagatggccctgaggaaggtgggcggcctggccctgtgggacttcctggacttcatcgtgaggacccgcatccccatctttgtgctgctgcggcccttcatccagtgcaagctgctggcccagcctgcagaaaatcatgaggagctgagcgcccggcagcacatcgctgaccagctggagcggcgcttcatcccccggcccctgtgcaagagcagcctgattgctgagttcaacagcgagctgaagatcctgaaggaggccgtgcacagcggcagcgcctaccagggcaagaccagcatcagcacagtgggcaccagcaccagcgcctaccgcctgagcctggccaccatgagccgcagcaacacaggaactggaacagtgtgggagcaggacagcgagcccagccagcaggccagccaggacaccctgagcaggacagatgaggaggatgaagaaaatgacagcatctccatgcccagcgtggtgtctgagcaggaggcctacctgctgagcgccatcggcagaagacgcttcagcagccacgtgtcctccatgtctgtgccccaggccgaggtgggcatgctgcccagccagaggtag

SEQ ID NO: 175492 - DNA, 786 bp, synthetic construct; identical to SEQ ID NO: 155762
  misc_feature 1..786: note = Description of Artificial Sequence: Synthetic coding sequence
  source 1..786: mol_type = other DNA

SEQ ID NO: 175493 - DNA, 1248 bp, synthetic construct
  misc_feature 1..1248: note = Description of Artificial Sequence: Synthetic coding sequence
  source 1..1248: mol_type = other DNA
atggacaggagcctgagaaatgtgctggtggtgtcctttggcttcctgctgctcttcaccgcctacggcggcctgcagagcctgcagagcagcctgtacagcgaggagggcctgggcgtgacagccctgagcaccctgtatggaggcatgctgctgagctccatgttcctgccccccctgctgattgaaaggctgggctgcaagggcaccatcatcctgtccatgtgtggctacgtggccttctctgtgggcaacttctttgcctcctggtacaccctcatccccaccagcatcctgctgggcctgggcgccgcccccctgtggagcgcccagtgcacctacctgaccatcaccggcaacacccatgctgagaaggccggcaagaggggcaaggacatggtgaaccagtacttcggcatcttcttcctgatcttccagagcagcggcgtgtggggcaacctgatcagcagcctggtgtttggccagacccccagccagggcagcggcgtgctggccgtgctgatgattgctgccttcctgcagcccatcagagatgtgcagcgggagagcgagggggagaagaagtctgtgcccttctggagcaccctgctgagcaccttcaagctgtacagagacaagaggctgtgcctgctgatcctgctgcccctgtacagcggcctgcagcagggcttcctgagcagcgagtacaccaggagctatgtgacctgcaccctgggcatccagtttgtgggctacgtgatgatctgcttcagcgccacagatgccctgtgcagcgtgctgtatggcaaggtgtcccagtacacaggccgggctgtgctgtatgtgctgggcgctgtgacccacgtgtcctgcatgattgccctgctgctgtggaggcccagggctgaccacctggccgtgttctttgtgttcagcggcctgtggggcgtggctgatgctgtgtggcagacccagaacaatgccctgtatggagtgctgtttgagaagagcaaggaggccgcctttgccaactaccgcctgtgggaggccctgggctttgtgattgccttcggctacagcatgttcctgtgtgtgcacgtgaagctgtacatcctgctgggcgtgctgagcctgaccatggtggcctacggcctggtggagtgtgtggagagcaagaaccccatccggccccacgcccctggccaggtgaaccaggctgaagatgaggagatccagaccaagatgtag

SEQ ID NO: 175494 - DNA, 435 bp, synthetic construct
  misc_feature 1..435: note = Description of Artificial Sequence: Synthetic coding sequence
  source 1..435: mol_type = other DNA
atggacaggagcctgagaaatgtgctggtggtgtcctttggcttcctgctgctcttcaccgcctacggcggcctgcagagcctgcagagcagcctgtacagcgaggagggcctgggcgtgacagccctgagcaccctgtatggaggcatgctgctgagctccatgttcctgccccccctgctgattgaaaggctgggctgcaagggcaccatcatcctgtccatgtgtggctacgtggccttctctgtgggcaacttctttgcctcctggtacaccctcatccccaccagcatcctgctgggcctgggcgccgcccccctgtggagcgcccagtgcacctacctgaccatcaccggcaacacccatgctgagaaggccggcaagaggggcaaggacatggtgaaccagtacttcggcatcttcttcctgatctag

SEQ ID NO: 175495 - DNA, 1545 bp, synthetic construct
  misc_feature 1..1545: note = Description of Artificial Sequence: Synthetic coding sequence
  source 1..1545: mol_type = other DNA
atgagccgctggctgtggccctggagcaactgtgtgaaggagcgggtgtgccgctacctgctgcaccactacctgggccacttcttccaggagcacctgagcctggaccagctgagcctggacctgtacaagggctctgtggccctgcgggacatccacctggagatctggagcgtgaatgaggtgctggagagcatggagagccccctggagctggtggagggctttgtgggcagcattgaggtggccgtgccctgggccgccctgctgacagaccactgcaccgtgcgggtgtctggcctgcagctgaccctgcagccccggcggggccctgcccctggagctgctgacagccagagctgggccagctgcatgaccaccagcctgcagctggcccaggagtgcctgagagatggcctgcctgagcccagcgagcccccccagcccctggagggcctggagatgtttgcccagaccatcgagaccgtgctgcggcgcatcaaggtgaccttcctggacacagtggtgcgggtggagcacagccctggagatggagagcggggcgtggccgtggaggtgcgggtgcagaggctggagtactgtgatgaggccgtgcgggaccccagccaggcccctcctgtggatgtgcaccagcccccagccttcctgcacaagctgctgcagctggccggcgtgcggctgcactatgaggagctgcctgcccaggaggagcccccagagccccccctgcagatcggcagctgcagcggctacatggagctgatggtgaagctgaagcagaatgaggccttccctggccccaagctggaggtggccggccagctgggcagcctgcacctgctgctgaccccccggcagctgcagcagctgcaggagctgctgtctgctgtgtccctgacagaccacgagggcctggccgacaagctgaacaagagccggcccctgggcgctgaggacctgtggctgattgagcaggacctgaaccagcagctgcaggccggggctgtggccgagcccctgagcccagaccccctgaccaaccccctgctgaacctggacaacacagacctcttcttctccatggccggcctgaccagctctgtggccagcgccctgtctgagctgagcctgagtgatgtggacctggccagctctgtgcggagtgacatggccagccggcggctgagcgcccaggcccggcccggcctggccctgcagggcatggccaccgtgaaggatgccttccctgcctgccccctgcccatctgctgtgagcggggggccagcctgccctggggcctgagccctggcagcgccctcttcctgcggggggagaggaccctgcccctgccccggcccggccccaccctgctgcccagccccaggacagaggccttcggccccagcgaccccatccccctgagccaggtgtccttctgtgtgtggggcgaggagggcatgatctctgtgtggtttgatgtgctcttcctgagctctgtgtctgcctgggtgtctgtgtgctag

SEQ ID NO: 175496 - DNA, 924 bp, synthetic construct
  misc_feature 1..924: note = Description of Artificial Sequence: Synthetic coding sequence
  source 1..924: mol_type = other DNA
atgggcggcctgacagccagtgatgtgcaccccaccctgggcgtgcagctgttctctgctggcattgctgcctgcctggctgatgtgatcaccttccccctggacacagccaaggtgcggctgcaggtgcagggcgagtgccccaccagcagcgtcatccgctacaagggcgtgctgggcaccatcacagctgtggtgaagacagagggccgcatgaagctgtacagcggcctgcctgctggcctgcagaggcagatcagcagcgccagcctgagaattggcctgtatgacacagtgcaggagttcctgacagctgggaaggagacagcccccagcctgggcagcaagatcctggccggcctgaccactggaggagtggccgtgttcatcggccagcccacagaggtggtgaaggtgcggctgcaggcccagagccacctgcacggcatcaagccccgctacacaggcacctacaatgcctaccgcatcatcgccaccacagagggcctgaccggcctgtggaagggcaccacccccaacctgatgaggagcgtcatcatcaactgcacagagctggtgacctatgacctgatgaaggaggcctttgtgaagaacaacatcctggctgatgatgtgccctgccacctggtgtctgccctgattgctggcttctgtgccacagccatgagcagccctgtggatgtggtgaagacccgcttcatcaacagccccccaggccagtacaagtctgtgcccaactgtgccatgaaggtgttcaccaatgaaggccccacagccttcttcaagggcctggtgcccagcttcctgcggctgggctcctggaatgtcatcatgtttgtgtgctttgagcagctgaagcgggagctgagcaagagccggcagaccatggactgtgccacctag

SEQ ID NO: 175497 - DNA, 930 bp, synthetic construct
  misc_feature 1..930: note = Description of Artificial Sequence: Synthetic coding sequence
  source 1..930: mol_type = other DNA
atggtgggcttcaaggccacagatgtgcccccaacagccaccgtgaagttcctgggcgccggcacagctgcctgcatcgctgacctgatcaccttccccctggacacagccaaggtgcggctgcagatccagggcgagagccagggccctgtgcgggccacagccagcgcccagtacagaggagtgatgggcaccatcctgaccatggtgaggacagagggccccaggagcctgtacaacggcctggtggccggcctgcagaggcagatgagctttgcctctgtgagaattggcctgtatgacagcgtgaagcagttctacaccaagggcagcgagcacgccagcatcggcagccggctgctggccggcagcaccaccggggccctggccgtggccgtggcccagcccacagatgtggtgaaggtgcgcttccaggcccaggcccgggccggcggcggccgccgctaccagagcacagtgaatgcctacaagaccatcgcccgggaggagggcttccggggcctgtggaagggcaccagccccaacgtggccagaaatgccatcgtgaactgtgccgagctggtgacctatgacctgatcaaggatgccctgctgaaggccaacctgatgacagatgacctgccctgccacttcaccagcgccttcggggccggcttctgcaccaccgtgattgccagccctgtggatgtggtgaagacccgctacatgaacagcgccctgggccagtacagcagcgctggccactgtgccctgaccatgctgcagaaggagggcccccgggccttctacaagggcttcatgcccagcttcctgcggctgggctcctggaatgtggtgatgtttgtgacctatgagcagctgaagagggccctgatggccgcctgcaccagccgggaggcccccttctag

SEQ ID NO: 175498 - DNA, 102 bp, synthetic construct
  misc_feature 1..102: note = Description of Artificial Sequence: Synthetic coding sequence
  source 1..102: mol_type = other DNA
atggtgggcttcaaggccacagatgtgcccccaacagccaccgtgaagttcctgggcgccggcacagctgcctgcatcgctgacctgatcaccttcccctag

SEQ ID NO: 175499 - DNA, 939 bp, synthetic construct
  misc_feature 1..939: note = Description of Artificial Sequence: Synthetic coding sequence
  source 1..939: mol_type = other DNA
atggtgggcctgaagcccagtgatgtgccccccaccatggctgtgaagttcctgggcgccggcacagctgcctgctttgctgacctggtgaccttccccctggacacagccaaggtgcggctgcagatccagggcgagaaccaggccgtgcagacagcccggctggtgcagtaccggggcgtgctgggcaccatcctgaccatggtgaggacagagggcccctgcagcccctacaacggcctggtggccggcctgcagaggcagatgagctttgccagcatccgcatcggcctgtatgattctgtgaagcaggtgtacacccccaagggagctgacaacagcagcctgaccacccgcatcctggccggctgcaccaccggggccatggctgtgacctgtgcccagcccacagatgtggtgaaggtgcgcttccaggccagcatccacctgggccccagcagaagtgacaggaagtacagcggcaccatggatgcctaccgcaccatcgcccgggaggagggcgtgcggggcctgtggaagggcaccctgcccaacatcatgagaaatgccatcgtgaactgtgccgaggtggtgacctatgacatcctgaaggagaagctgctggactaccacctgctgacagacaacttcccctgccactttgtgtctgcctttggagctggcttctgtgccaccgtggtggccagccctgtggatgtggtgaagacccgctacatgaacagccccccaggccagtacttcagccccctggactgcatgatcaagatggtggcccaggagggccccacagccttctacaagggcttcacccccagcttcctgcggctgggctcctggaatgtggtgatgtttgtgacctatgagcagctgaagagggccctgatgaaggtgcagatgctgcgggagagccccttctag

SEQ ID NO: 175500 - DNA, 633 bp, synthetic construct
  misc_feature 1..633: note = Description of Artificial Sequence: Synthetic coding sequence
  source 1..633: mol_type = other DNA
atggtgggcctgaagcccagtgatgtgccccccaccatggctgtgaagttcctgggcgccggcacagctgcctgctttgctgacctggtgaccttccccctggacacagccaaggtgcggctgcagatccagggcgagaaccaggccgtgcagacagcccggctggtgcagtaccggggcgtgctgggcaccatcctgaccatggtgaggacagagggcccctgcagcccctacaacggcctggtggccggcctgcagaggcagatgagctttgccagcatccgcatcggcctgtatgattctgtgaagcaggtgtacacccccaagggagctgacaacaacttcccctgccactttgtgtctgcctttggagctggcttctgtgccaccgtggtggccagccctgtggatgtggtgaagacccgctacatgaacagccccccaggccagtacttcagccccctggactgcatgatcaagatggtggcccaggagggccccacagccttctacaagggcttcacccccagcttcctgcggctgggctcctggaatgtggtgatgtttgtgacctatgagcagctgaagagggccctgatgaaggtgcagatgctgcgggagagccccttctag

SEQ ID NO: 175501 - DNA, 828 bp, synthetic construct
  misc_feature 1..828: note = Description of Artificial Sequence: Synthetic coding sequence
  source 1..828: mol_type = other DNA
atggtgggcctgaagcccagtgatgtgccccccaccatggctgtgaagttcctgggcgccggcacagctgcctgctttgctgacctggtgaccttccccctggacacagccaaggtgcggctgcagatccagggcgagaaccaggccgtgcagacagcccggctggtgcagtaccggggcgtgctgggcaccatcctgaccatggtgaggacagagggcccctgcagcccctacaacggcctggtggccggcctgcagaggcagatgagctttgccagcatccgcatcggcctgtatgattctgtgaagcaggtgtacacccccaagggagctgacaacagcagcctgaccacccgcatcctggccggctgcaccaccggggccatggctgtgacctgtgcccagcccacagatgtggtgaaggtgcgcttccaggccagcatccacctgggccccagcagaagtgacaggaagtacagcggcaccatggatgcctaccgcaccatcgcccgggaggagggcgtgcggggcctgtggaagggcaccctgcccaacatcatgagaaatgccatcgtgaactgtgccgaggtggtgacctatgacatcctgaaggagaagctgctggactaccacctgctgacagacaacttcccctgccactttgtgtctgcctttggagctggcttctgtgccaccgtggtggccagccctgtggatgtggtgaagacccgctacatgaacagccccccaggccagtacttcagccccctggactgcatgatcaagatggtggcccaggagggccccacagccttctacaagggctag

SEQ ID NO: 175502 - DNA, 291 bp, synthetic construct
  misc_feature 1..291: note = Description of Artificial Sequence: Synthetic coding sequence
  source 1..291: mol_type = other DNA
atggtgggcctgaagcccagtgatgtgccccccaccatggctgtgaagttcctgggcgccggcacagctgcctgctttgctgacctggtgaccttccccctggacacagccaaggtgcggctgcagatccagggcgagaaccaggccgtgcagacagcccggctggtgcagtaccggggcgtgctgggcaccatcctgaccatggtgaggacagagggcccctgcagcccctacaacggcctggtggccggcctgcagaggcagatgagctttgccagcatccgcatctag

SEQ ID NO: 175503 - DNA, 1026 bp, synthetic construct
  misc_feature 1..1026: note = Description of Artificial Sequence: Synthetic coding sequence
  source 1..1026: mol_type = other DNA
atgctgctgcggccccggcggcccccacccctggcccccccagccccacccagccctgccagcccagaccctgagcccaggaccccaggagatgcccctggcaccccaccccggcggcctgccagccccagcgccctgggggagctgggcctgcctgtgtccccaggcagcgcccagaggaccccctggagcgcccgggagacagagctgctgctgggcaccctgctgcagcctgctgtgtggagggccctgctgctggaccggcggcaggccctgcccacctaccgccgggtgtctgctgccctggcccagcagcaggtgcggaggaccccagcccagtgcagaagacgctacaagttcctgaaggacaagttccgggaggcccacggccagcccccaggcccctttgatgagcagatcaggaagctgatgggcctgctgggggacaatggaaggaagaggcccaggagaagaagccctggcagcggccggccccagagggcccggcggcctgtgcccaatgcccacgccccagcccccagcgagccagatgccacccccctgcccacagcccgggacagagatgctgaccccacctggaccctgcgcttcagccccagcccccccaagtctgcagatgccagccctgcccctggcagccccccagccccagcccccacagccctggccacctgcatcccagaagatcgggcccctgtgcggggccctggcagccccccacctcctccagccagagaagatcctgacagccccccaggccggcctgaggactgtgcccctcctcctgctgccccacccagcctgaacacagccctgctgcagaccctgggccacctgggggacatcgccaacatcctgggccccctgcgggaccagctgctgaccctgaaccagcacgtggagcagctgcggggggcctttgaccagacagtgtccctggccgtgggcttcatcctgggcagcgctgctgctgagcggggcgtgctgcgggacccctgccagtag

SEQ ID NO: 175504 - DNA, 3357 bp, synthetic construct
  misc_feature 1..3357: note = Description of Artificial Sequence: Synthetic coding sequence
  source 1..3357: mol_type = other DNA
atgtctgtggaggcctacggccccagcagccagaccctgaccttcctggacacagaggaggccgagctgctgggcgctgacacccagggcagcgagtttgagttcacagacttcaccctgcccagccagacccagaccccacctgggggccctgggggccctgggggcggcggggccggcggccctgggggcgctggggccggggctgctgctggccagctggatgcccaggtgggccctgagggcatcctgcagaatggagctgtggatgacagcgtggccaagaccagccagctgctggccgagctgaactttgaagaagatgaggaggacacctactacaccaaggacctgcccatccacgcctgcagctactgcggcatccatgaccctgcctgtgtggtgtactgcaacaccagcaagaagtggttctgcaatggccggggcaacaccagcggcagccacatcgtgaaccacctggtgcgggccaagtgcaaggaggtgaccctgcacaaggatggccccctgggggagaccgtgctggagtgctacaactgtggctgcagaaatgtgttcctgctgggcttcatcccagccaaggctgacagcgtggtggtgctgctgtgccggcagccctgtgccagccagagcagcctgaaggacatcaactgggacagcagccagtggcagcccctcatccaggaccgctgcttcctgtcctggctggtgaagatccccagcgagcaggagcagctgcgggcccggcagatcacagcccagcagatcaacaagctggaggagctgtggaaggagaaccccagcgccaccctggaggacctggagaagccaggagtggatgaggagccccagcacgtgctgctgcgctatgaagatgcctaccagtaccagaacatcttcggccccctggtgaagctggaggccgactatgacaagaagctgaaggagagccagacccaggacaacatcaccgtgcgctgggacctgggcctgaacaagaagagaattgcctacttcaccctgcccaagacagacagcgacatgaggctgatgcagggagatgagatctgcctgcgctacaagggggacctggcccccctgtggaagggcattggacatgtgatcaaggtgcctgacaactatggagatgaaattgccatcgagctgcggagctctgtgggcgcccctgtggaggtgacccacaacttccaggtggactttgtgtggaagagcaccagctttgacaggatgcagagcgccctgaagacctttgctgtggatgagacctctgtgtctggctacatctaccacaagctgctgggccacgaggtggaggatgtgatcatcaagtgccagctgcccaagcgcttcaccgcccagggcctgcctgacctgaaccacagccaggtgtatgctgtgaagacagtgctgcagaggcccctgagcctcatccagggccccccaggcaccgggaagacagtgaccagcgccaccatcgtgtaccacctggcccggcagggcaatggacctgtgctggtgtgtgcccccagcaacattgctgtggaccagctgacagagaagatccaccagacaggcctgaaggtggtgcggctgtgtgccaagagccgggaggccatcgacagccctgtgtccttcctggccctgcacaaccagatccggaacatggacagcatgcctgagctgcagaagctgcagcagctgaaggatgagaccggggagctgagcagcgcagatgagaagcgctaccgggccctgaagaggacagctgagcgggagctgctgatgaatgctgatgtgatctgctgcacctgtgtgggcgctggggacccccggctggccaagatgcagttccgcagcatcctgattgatgagagcacccaggccacagagcctgagtgcatggtgcctgtggtgctgggcgccaagcagctgatcctggtgggggaccactgccagctgggccctgtggtgatgtgcaagaaggccgccaaggccggcctgagccagagcctgtttgagcggctggtggtgctgggcatccggcccatccggctgcaggtgcagtacaggatgcacccagccctgagcgccttccccagcaacatcttctatgagggcagcctgcagaatggagtgacagctgctgacagagtgaagaagggctttgacttccagtggccccagcctgacaagcccatgttcttctacgtgacccagggccaggaggagatcgccagcagcggcaccagctacctgaacagaacagaggccgccaacgtggagaagatcaccaccaagctgctgaaggccggggccaagccagaccagatcggcatcatcaccccctatgagggccagaggagctacctggtgcagtacatgcagttcagcggcagcctgcacaccaagctgtaccaggaggtggagatcgcctctgtggatgccttccagggccgggagaaggacttcatcatcctgagctgtgtgcgggccaatgagcaccagggcatcggcttcctgaatgacccccggcggctgaatgtggccctgacccgggcccgctatggagtcatcatcgtgggcaaccccaaggccctgagcaagcagcccctgtggaaccacctgctgaactactacaaggagcagaaggtgctggtggagggccccctgaacaacctgcgggagagcctgatgcagttcagcaagcccaggaagctggtgaacaccatcaaccctggggcccgcttcatgaccacagccatgtatgatgcccgggaggccatcatccctggctctgtgtatgacaggagcagccagggccggcccagctccatgtacttccagacccatgaccagatcggcatgatctctgctggccccagccacgtggccgccatgaacatccccatccccttcaacctggtgatgccacccatgcctcctcctggctacttcggccaggccaacggccctgctgctggccggggcacccccaagggcaagacaggccggggcggccggcagaagaacagatttggcctgcccggccccagccagaccaacctgcccaacagccaggccagccaggatgtggccagccagcccttcagccagggcgccctgacccagggctacatctccatgagccagcccagccagatgagccagcccggcctgagccagcctgagctgagccaggacagctacctgggagatgagttcaagagccagattgatgtggccctgagccaggacagcacctaccagggcgagcgggcctaccagcacggcggcgtgacaggcctgagccagtactag

SEQ ID NO: 175505 - DNA, 1740 bp, synthetic construct
  misc_feature 1..1740: note = Description of Artificial Sequence: Synthetic coding sequence
  source 1..1740: mol_type = other DNA
atgcctgctgagaggaagaagccagcctccatggaggagaaggacagcctgcccaacaacaaggagaaggactgcagcgagaggagaacagtgagcagcaaggagcggcccaaggatgacatcaagctgacagccaagaaggaggtgtccaaggcccctgaggagagcaagaagaaggaggaggaggagaagaagaagcaccaggaggaggagaggaagaagcaggaggagcaggccaagaggcagcaggaggaggaggccgccgcccagatgaaggagaaggaggagagcatccagctgcaccaggaggcctgggagcggcaccacctgaggaaggagctgcggagcaagaaccagaatgccccagacagcaggcctgaggagaacttcttcagccggctggacagcagcctgaagaagaacacagcctttgtgaagaagctgaagaccatcacagagcagcagagggacagcctgagccatgacttcaacggcctgaacctgagcaagtacatcgccgaggccgtggccagcatcgtggaggccaagctgaagatcagtgatgtgaactgtgctgtgcacctgtgcagcctcttccaccagagatatgctgactttgcccccagcctgctgcaggtgtggaagaagcactttgaggccaggaaggaggagaagacccccaacatcaccaagctgaggacagacctgcgcttcatcgccgagctgaccatcgtgggcatcttcacagacaaggagggcctgagcctcatctatgagcagctgaagaacatcatcaatgctgaccgggagagccacacccacgtgtctgtggtgatctccttctgccgccactgtggagatgacattgctggcctggtgcccaggaaggtgaagtctgctgctgagaagttcaacctgtccttccccccatctgagatcatcagccctgagaagcagcagcccttccagaacctgctgaaggagtacttcaccagcctgaccaagcacctgaagagggaccaccgggagctgcagaacacagagcggcagaacagacgcatcctgcacagcaagggggagctgtctgaagatagacacaagcagtatgaggagtttgccatgagctaccagaagctgctggccaacagccagagcctggccgacctgctggatgagaacatgccagacctgccccaggacaagcccaccccagaggagcacggccctggcatcgacatcttcacccctgggaagccaggagaatatgacctggagggcggcatctgggaggatgaagatgccaggaacttctatgagaacctgattgacctgaaggcctttgtgcctgccatcctcttcaaggacaatgagaagagctgccagaacaaggagagcaacaaggatgacaccaaggaggccaaggagagcaaggagaacaaggaggtgagcagcccagatgacctggagctggagctggagaacctggagatcaatgatgacaccctggagctggagggcggagatgaagctgaggacctgaccaagaagctgctggatgagcaggagcaggaggatgaggaggccagcacaggcagccacctgaagctgattgtggatgccttcctgcagcagctgcccaactgtgtgaacagagacctgattgacaaggccgagaaggccttctgcaatggaaacctggcccgggtgaacctgctgctgaggatggctgtgaagaagtag

SEQ ID NO: 175506 - DNA, 3819 bp, synthetic construct
  misc_feature 1..3819: note = Description of Artificial Sequence: Synthetic coding sequence
  source 1..3819: mol_type = other DNA
atgcctgctgagaggaagaagccagcctccatggaggagaaggacagcctgcccaacaacaaggagaaggactgcagcgagaggagaacagtgagcagcaaggagcggcccaaggatgacatcaagctgacagccaagaaggaggtgtccaaggcccctgaggacaagaagaagaggctggaggatgacaagaggaagaaggaggacaaggagaggaagaagaaggatgaggagaaggtgaaggccgaggaggagagcaagaagaaggaggaggaggagaagaagaagcaccaggaggaggagaggaagaagcaggaggagcaggccaagaggcagcaggaggaggaggccgccgcccagatgaaggagaaggaggagagcatccagctgcaccaggaggcctgggagcggcaccacctgaggaaggagctgcggagcaagaaccagaatgccccagacagcaggcctgaggagaacttcttcagccggctggacagcagcctgaagaagaacacagcctttgtgaagaagctgaagaccatcacagagcagcagagggacagcctgagccatgacttcaacggcctgaacctgagcaagtacatcgccgaggccgtggccagcatcgtggaggccaagctgaagatcagtgatgtgaactgtgctgtgcacctgtgcagcctcttccaccagagatatgctgactttgcccccagcctgctgcaggtgtggaagaagcactttgaggccaggaaggaggagaagacccccaacatcaccaagctgaggacagacctgcgcttcatcgccgagctgaccatcgtgggcatcttcacagacaaggagggcctgagcctcatctatgagcagctgaagaacatcatcaatgctgaccgggagagccacacccacgtgtctgtggtgatctccttctgccgccactgtggagatgacattgctggcctggtgcccaggaaggtgaagtctgctgctgagaagttcaacctgtccttccccccatctgagatcatcagccctgagaagcagcagcccttccagaacctgctgaaggagtacttcaccagcctgaccaagcacctgaagagggaccaccgggagctgcagaacacagagcggcagaacagacgcatcctgcacagcaagggggagctgtctgaagatagacacaagcagtatgaggagtttgccatgagctaccagaagctgctggccaacagccagagcctggccgacctgctggatgagaacatgccagacctgccccaggacaagcccaccccagaggagcacggccctggcatcgacatcttcacccctgggaagccaggagaatatgacctggagggcggcatctgggaggatgaagatgccaggaacttctatgagaacctgattgacctgaaggcctttgtgcctgccatcctcttcaaggacaatgagaagagctgccagaacaaggagagcaacaaggatgacaccaaggaggccaaggagagcaaggagaacaaggaggtgagcagcccagatgacctggagctggagctggagaacctggagatcaatgatgacaccctggagctggagggcggagatgaagctgaggacctgaccaagaagctgctggatgagcaggagcaggaggatgaggaggccagcacaggcagccacctgaagctgattgtggatgccttcctgcagcagctgcccaactgtgtgaacagagacctgattgacaaggccgccatggacttctgcatgaacatgaacaccaaggccaacaggaagaagctggtgcgggccctcttcatcgtgccccggcagaggctggacctgctgcccttctacgcccggctggtggccaccctgcacccctgcatgtctgatgtggccgaggacctgtgcagcatgctgcggggggacttccgcttccacgtgaggaagaaggaccagatcaacatcgagaccaagaacaagacagtgcgcttcatcggggagctgaccaagttcaagatgttcaccaagaatgacaccctgcactgcctgaagatgctgctgagtgacttcagccaccaccacatcgagatggcctgcaccctgctggagacctgtggccgcttcctgttccgcagccctgagagccacctgcggacctctgtgctgctggagcagatgatgaggaagaagcaggccatgcacctggatgcccgctacgtgaccatggtggagaatgcctactactactgcaaccccccacctgctgagaagacagtgaagaagaagaggcctcccctgcaggagtatgtgaggaagctgctgtacaaggacctgagcaaggtgaccacagagaaggtgctgcggcagatgaggaagctgccctggcaggaccaggaggtgaaggactatgtgatctgctgcatgatcaacatctggaatgtgaagtacaacagcatccactgtgtggccaacctgctggccggcctggtgctgtaccaggaggatgtgggcatccacgtggtggatggagtgctggaggacatccggctgggcatggaggtgaaccagcccaagttcaaccagaggcgcatcagcagcgccaagttcctgggggagctgtacaactacaggatggtggagagcgctgtgatcttccgcaccctgtacagcttcaccagctttggagtgaacccagatggcagccccagcagcctggaccccccagagcacctgttccgcatccggctggtgtgcaccatcctggacacctgtggccagtactttgaccggggcagcagcaagaggaagctggactgcttcctggtgtacttccagcgctacgtgtggtggaagaagagcctggaggtgtggaccaaggaccaccccttccccatcgacatcgactacatgatcagtgacaccctggagctgctgcggcccaagatcaagctgtgcaacagcctggaggagagcatccggcaggtgcaggacctggagcgggagttcctgatcaagctgggcctggtgaatgacaaggacagcaaggacagcatgacagaaggagagaacctggaggaggatgaggaggaggaggagggcggcgctgagacagaggagcagagcggaaatgaaagtgaggtgaatgaacctgaggaggaggagggcagtgacaatgatgatgatgaaggagaggaggaggaggaggagaacacagactacctgacagacagcaacaaggaaaatgaaacagatgaagaaaatacagaggtgatgatcaagggcggcggcctgaagcacgtgccctgtgtggaggatgaggacttcatccaggccctggacaagatgatgctggagaacctgcagcagaggtctggagagagcgtgaaggtgcaccagctggatgtggccatccccctgcacctgaagagccagctgaggaagggcccccccctgggcggcggggagggggaggccgagagcgctgacaccatgccctttgtgatgctgaccaggaaaggaaacaagcagcagttcaagatcctgaatgtgcccatgagcagccagctggccgccaaccactggaaccagcagcaggccgagcaggaggagaggatgaggatgaagaagctgaccctggacatcaatgaaaggcaggagcaggaggactaccaggagatgctgcagagcctggcccagaggcctgccccagccaacaccaaccgggagcggcggccccgctaccagcaccccaagggggccccaaatgctgacctgatcttcaagacaggaggaagaagaagatag

SEQ ID NO: 175507 - DNA, 3819 bp, synthetic construct; identical to SEQ ID NO: 175506
  misc_feature 1..3819: note = Description of Artificial Sequence: Synthetic coding sequence
  source 1..3819: mol_type = other DNA

SEQ ID NO: 175508 - DNA, 375 bp, synthetic construct
  misc_feature 1..375: note = Description of Artificial Sequence: Synthetic coding sequence
  source 1..375: mol_type = other DNA
atgatcaagggcggcggcctgaagcacgtgccctgtgtggaggatgaggacttcatccaggccctggacaagatgatgctggagaacctgcagcagaggtctggagagagcgtgaaggtgcaccagctggatgtggccatccccctgcacctgaagagccagctgaggaaaggaccacccctgggcggcggggagggggaggccgagagcgctgacaccatgccctttgtgatgctgaccaggaagggcaacaagcagcagttcaagatcctgaatgtgcccatgagcagccagctggccgccaaccactggaaccagcagcaggccgagaggagagaagatgaaaatgagaaggcccacacccgctaccagtag

SEQ ID NO: 175509 - DNA, 1740 bp, synthetic construct; identical to SEQ ID NO: 175505
  misc_feature 1..1740: note = Description of Artificial Sequence: Synthetic coding sequence
  source 1..1740: mol_type = other DNA

SEQ ID NO: 175510 - DNA, 3819 bp, synthetic construct; identical to SEQ ID NO: 175506
  misc_feature 1..3819: note = Description of Artificial Sequence: Synthetic coding sequence
  source 1..3819: mol_type = other DNA

SEQ ID NO: 175511 - DNA, 1332 bp, synthetic construct
  misc_feature 1..1332: note = Description of Artificial Sequence: Synthetic coding sequence
  source 1..1332: mol_type = other DNA
atgaggtctgagaaggagggcgctgggggcctgcgggctgctgtggccgcccggggccccagcggccgggagaagctgagcgccctggaggtgcagttccaccgggacagccagcagcaggaggccgagaccccacccaccagcagcagcggctgcggcggcggggccggcaagccccgggaggagaagaggacagccctgagcaaggtggtgatccggcggctgcccccaggcctgaccaaggagcagctggaggagcagctgcggcccctgcctgcccatgactactttgagttctttgctgctgacctgagcctgtacccccacctgtacagccgggcctacatcaacttcagaaatccagatgacatcctgctcttccgggacagatttgatggctacatcttcctggacagcaaggaccctgagtacaagaagttcctggagacctactgtgtggaggaggagaagaccagcgccaaccctgagaccctgctgggggagatggaggccaagacccgggagctgattgcccggaggaccacccccctgctggagtacatcaagaacaggaagctggagaagcagaggatccgggaggagaagcgggaggagaggagaagaagagagctggagaagaagaggctgcgggaggaggagaagagaagaagaagagaggaggagcgctgcaagaagaaggagacagacaagcagaagaagattgctgagaaggaggtgcgcatcaagctgctgaagaagccagagaagggggaggagcccaccacagagaagcccaaggagcggggggaggagattgacaccggcggcggcaagcaggagagctgtgcccctggagctgtggtgaaggcccggcccatggagggcagcctggaggagccccaggagaccagccacagcggcagtgacaaggagcacagagatgtggagaggagccaggagcaggagagcgaggcccagcgctaccacgtggatgatggccgccgccaccgggcccaccacgagcctgagcggctgagcagaagaagtgaagatgagcagcgctggggcaaaggacctggccaggaccggggcaagaagggcagccaggacagcggggcccctggagaggccatggagcggctgggccgggcccagagatgtgatgacagccctgcccccaggaaggagcggctggccaacaaggacaggcctgccctgcagctgtatgaccccggggcccgcttccgggccagagaatgtggcggcaacagacgcatctgcaaggccgagggcagcggcaccggccctgagaagcgggaggaggccgagtag

SEQ ID NO: 175512 - DNA, 1431 bp, synthetic construct
  misc_feature 1..1431: note = Description of Artificial Sequence: Synthetic coding sequence
  source 1..1431: mol_type = other DNA
atgaggtctgagaaggagggcgctgggggcctgcgggctgctgtggccgcccggggccccagcggccgggagaagctgagcgccctggaggtgcagttccaccgggacagccagcagcaggaggccgagaccccacccaccagcagcagcggctgcggcggcggggccggcaagccccgggaggagaagaggacagccctgagcaaggtggtgatccggcggctgcccccaggcctgaccaaggagcagctggaggagcagctgcggcccctgcctgcccatgactactttgagttctttgctgctgacctgagcctgtacccccacctgtacagccgggcctacatcaacttcagaaatccagatgacatcctgctcttccgggacagatttgatggctacatcttcctggacagcaagggcctggagtacccagctgtggtggagtttgcccccttccagaagatcgccaagaagaagctgaggaagaaggatgccaagacaggcagcattgaagatgatcctgagtacaagaagttcctggagacctactgtgtggaggaggagaagaccagcgccaaccctgagaccctgctgggggagatggaggccaagacccgggagctgattgcccggaggaccacccccctgctggagtacatcaagaacaggaagctggagaagcagaggatccgggaggagaagcgggaggagaggagaagaagagagctggagaagaagaggctgcgggaggaggagaagagaagaagaagagaggaggagcgctgcaagaagaaggagacagacaagcagaagaagattgctgagaaggaggtgcgcatcaagctgctgaagaagccagagaagggggaggagcccaccacagagaagcccaaggagcggggggaggagattgacacaggaggcggcaagcaggagagctgtgcccctggagctgtggtgaaggcccggcccatggagggcagcctggaggagccccaggagaccagccacagcggcagtgacaaggagcacagagatgtggagaggagccaggagcaggagagcgaggcccagcgctaccacgtggatgatggaagaagacaccgggcccaccacgagcctgagcggctgagccgccgctcagaagatgagcagcgctggggcaagggccctggccaggaccggggcaagaagggcagccaggacagcggggcccctggagaggccatggagcggctgggccgggcccagagatgtgatgacagccctgcccccaggaaggagcggctggccaacaaggacaggcctgccctgcagctgtatgaccccggggcccgcttccgggcccgggagtgtggcggcaacagacgcatctgcaaggccgagggcagcggcactggacctgagaagcgggaggaggccgagtag

SEQ ID NO: 175513 - DNA, 627 bp, synthetic construct
  misc_feature 1..627: note = Description of Artificial Sequence: Synthetic coding sequence
  source 1..627: mol_type = other DNA
atggaggccaagacccgggagctgattgcccggaggaccacccccctgctggagtacatcaagaacaggaagctggagaagcagaggatccgggaggagaagcgggaggagaggagaagaagagagctggagaagaagaggctgcgggaggaggagaagagaagaagaagagaggaggagcgctgcaagaagaaggagacagacaagcagaagaagattgctgagaaggaggtgcgcatcaagctgctgaagaagccagagaagggggaggagcccaccacagagaagcccaaggagcggggggaggagattgacaccggcggcggcaagcaggagagctgtgcccctggagctgtggtgaaggcccggcccatggagggcagcctggaggagccccaggagaccagccacagcggcagtgacaaggagcacagagatgtggagaggagccaggagcaggagagcgaggcccccaggaaggagcggctggccaacaaggacaggcctgccctgcagctgtatgaccccggggcccgcttccgggcccgggagtgtggcggcaacagacgcatctgcaaggccgagggcagcggcactggacctgagaagcgggaggaggccgagtag

SEQ ID NO: 175514 - DNA, 1452 bp, synthetic construct
  misc_feature 1..1452: note = Description of Artificial Sequence: Synthetic coding sequence
  source 1..1452: mol_type = other DNA
atgaaggaggagaaggagcaccggcccaaggagaagagggtgaccctgctgaccccagctggggccactggaagtggcggcggcaccagcggggacagcagcaaaggagaggacaagcaggacaggaacaaggagaagaaggaggccctgagcaaggtggtgatccggcggctgccccccaccctgaccaaggagcagctgcaggagcacctgcagcccatgcctgagcatgactactttgagttcttcagcaatgacaccagcctgtacccccacatgtatgcccgggcctacatcaacttcaagaaccaggaggacatcatcctcttccgggacagatttgatggctacgtgttcctggacaacaagggccaggagtacccagccatcgtggagtttgcccccttccagaaggccgccaagaagaagaccaagaagagggacaccaaggtgggcaccattgatgatgatcctgagtacaggaagttcctggagagctatgccacagacaatgagaagatgaccagcaccccagagaccctgctggaggagattgaggccaagaaccgggagctgattgccaagaagaccacccccctgctgtccttcctgaagaacaagcagaggatgagggaggagaagcgggaggagaggagaagaagagaaattgaaaggaagaggcagcgggaggaggagaggaggaagtggaaggaggaggagaagaggaagaggaaggacatcgagaagctgaagaagattgaccgcatccctgagcgggacaagctgaaggatgagcccaagatcaaggtgcaccgcttcctgctgcaggccgtgaaccagaagaacctgctgaagaagccagagaagggagatgagaaggagctggacaagcgggagaaggccaagaagctggacaaggagaacctgagtgatgagcgggccagcggccagagctgcaccctgcccaagagaagtgacagcgagctgaaggatgagaagcccaagaggccagaagatgaaagtggccgggactaccgggagcgggagcgggagtatgaaagagaccaggagcgcatcctgcgggagcgggagcggctgaagaggcaggaggaggagcggcggcggcagaaggagagatatgagaaggagaagaccttcaagaggaaggaggaggagatgaagaaggagaaggacaccctgcgggacaagggcaagaaggccgagagcacagagagcatcggcagcagcgagaagacagagaagaaggaggaggtggtgaagagggaccgcatccggaacaaggacaggcctgccatgcagctgtaccagcccggggcccggagcaggaaccggctgtgccccccagatgacagcaccaagagcggggacagcgctgctgagaggaagcaggagagcggcatcagccacaggaaggagggcggggaggagtag

SEQ ID NO: 175515 - DNA, 1413 bp, synthetic construct
  misc_feature 1..1413: note = Description of Artificial Sequence: Synthetic coding sequence
  source 1..1413: mol_type = other DNA
atgaaggaggagaaggagcaccggcccaaggagaagagggtgaccctgctgaccccagctggggccactggaagtggcggcggcaccagcggggacagcagcaaaggagaggacaagcaggacaggaacaaggagaagaaggaggccctgagcaaggtggtgatccggcggctgccccccaccctgaccaaggagcagctgcaggagcacctgcagcccatgcctgagcatgactactttgagttcttcagcaatgacaccagcctgtacccccacatgtatgcccgggcctacatcaacttcaagaaccaggaggacatcatcctcttccgggacagatttgatggctacgtgttcctggacaacaagggccaggagtacccagccatcgtggagtttgcccccttccagaaggccgccaagaagaagaccaagaagagggacaccaaggtgggcaccattgatgatgatcctgagtacaggaagttcctggagagctatgccacagacaatgagaagatgaccagcaccccagagaccctgctggaggagattgaggccaagaaccgggagctgattgccaagaagaccacccccctgctgtccttcctgaagaacaagcagaggatgagggaggagaagcgggaggagaggagaagaagagaaattgaaaggaagaggcagcgggaggaggagaggaggaagtggaaggaggaggagaagaggaagaggaaggacatcgagaagctgaagaagattgaccgcatccctgagcgggacaagctgaaggatgagcccaagatcaagctgctgaagaagccagagaagggagatgagaaggagctggacaagcgggagaaggccaagaagctggacaaggagaacctgagtgatgagcgggccagcggccagagctgcaccctgcccaagagaagtgacagcgagctgaaggatgagaagcccaagaggccagaagatgagagcggccgggactaccgggagcgggagcgggagtatgagcgggaccaggagcgcatcctgcgggagcgggagcggctgaagaggcaggaggaggagcggcggcggcagaaggagagatatgagaaggagaagaccttcaagaggaaggaggaggagatgaagaaggagaaggacaccctgcgggacaagggcaagaaggccgagagcacagagagcatcggcagcagcgagaagacagagaagaaggaggaggtggtgaagagggaccgcatccggaacaaggacaggcctgccatgcagctgtaccagcccggggcccggagcaggaaccggctgtgccccccagatgacagcaccaagagcggggacagcgctgctgagaggaagcaggagagcggcatcagccacaggaaggagggcggggaggagtag

SEQ ID NO: 175516 - DNA, 657 bp, synthetic construct
  misc_feature 1..657: note = Description of Artificial Sequence: Synthetic coding sequence
  source 1..657: mol_type = other DNA
atgaaggaggagaaggagcaccggcccaaggagaagagggtgaccctgctgaccccagctggggccactggaagtggcggcggcaccagcggggacagcagcaaaggagaggacaagcaggacaggaacaaggagaagaaggaggccctgagcaaggtggtgatccggcggctgccccccaccctgaccaaggagcagctgcaggagcacctgcagcccatgcctgagcatgactactttgagttcttcagcaatgacaccagcctgtacccccacatgtatgcccgggcctacatcaacttcaagaaccaggaggacatcatcctcttccgggacagatttgatggctacgtgttcctggacaacaagggccaggagtacccagccatcgtggagtttgcccccttccagaaggccgccaagaagaagaccaagaagagggacaccaaggtgggcaccattgatgatgatcctgagtacaggaagttcctggagagctatgccacagacaatgagaagatgaccagcaccccagagaccctgctggaggagattgaggccaagaaccgggagctgattgccaagaagaccacccccctgctgtccttcctgaagaacaagcagaggatgagggaggagaagcgggaggacttctag

SEQ ID NO: 175517 - DNA, 441 bp, synthetic construct
  misc_feature 1..441: note = Description of Artificial Sequence: Synthetic coding sequence
  source 1..441: mol_type = other DNA
atgatgtggcagaagtatgccggcagccgccgctccatgcccctgggcgcccgcatcctcttccacggcgtcttctacgccggcggctttgccatcgtgtactacctgatccagaagttccacagccgggccctgtactacaagctggccgtggagcagctgcagagccaccctgaggcccaggaggccctgggcccccccctgaacatccactacctgaagctgattgacagagaaaattttgtggacatcgtggatgccaagctgaagatccctgtgtctggcagcaagtctgagggcctgctgtatgtgcacagcagcagaggaggccccttccagcgctggcacctggatgaggtgttcctggagctgaaggatggccagcagatccctgtgttcaagctgagcggggagaatggagatgaggtgaagaaggagtag

SEQ ID NO: 175518 - DNA, 2667 bp, synthetic construct
  misc_feature 1..2667: note = Description of Artificial Sequence: Synthetic coding sequence
  source 1..2667: mol_type = other DNA
atggagggagatgactgtgagttccgctatggagatggcaccaatgaggcccaggacaatgacttccccaccgtggagaggagccggctgcaggagatgctgagcctgctgggcctggagacctaccaggtgcagaagctgagcctgcaggacagcctgcagatcagctttgacagcatgaagaactgggccccccaggtgcccaaggacctgccctggaacttcctgaggaagctgcaggccctgaatgctgatgccaggaacaccaccatggtgctggatgtgctgcctgatgcccggcctgtggagaaggagagccagatggaggaggagatcatctactgggaccctgcagatgacctggccgctgacatctacagcttcagcgagctgcccaccccagacacccctgtgaaccccctggacctgctgtgtgccctgctgctgagcagtgacagcttcctgcagcaggagatcgccctgaagatggccctgtgccagtttgccctgcccctggtgctgcctgattctgagaaccactaccacaccttcctgctgtgggccatgaggggcatcgtgaggacctggtggagccagcccccccggggcatgggcagcttcagagaagattctgtggtgctgagccgggccccagcctttgcctttgtgaggatggatgtgagcagcaacagcaagagccagctgctgaatgctgtgctgagccctggccaccggcagtgggactgcttctggcaccgggacctgaacctgggcaccaatgcccgggagatcagtgatggcctggtggagatctcctggttcttccccagcggccgggaggacctggacatcttccctgagcctgtggccttcctgaacctgcggggggacatcggcagccactggctgcagttcaagctgctgacagagatcagcagcgctgtgttcatcctgacagacaacatcagcaagaaggagtacaagctgctgtacagcatgaaggagagcaccaccaagtactacttcatcctgagcccctaccggggcaagaggaacaccaacctgcgcttcctgaacaagctgatccctgtgctgaagattgaccacagccacgtgctggtgaaggtgagcagcacagacagcgacagctttgtgaagaggatccgggccatcgtgggcaatgtgctgcgggccccctgcagaagagtgtctgtggaggacatggcccatgctgccaggaagctgggcctgaaggtggatgaggactgtgaggagtgccagaaggccaaggacaggatggagcgcatcaccaggaagatcaaggacagtgatgcctacagaagagatgagctgcggctgcagggcgacccctggaggaaggccgcccaggtggagaaggagttctgccagctgcagtgggccgtggaccccccagagaagcacagagctgagctgcggcggcggctgctggagctgaggatgcagcagaatggacatgaccccagcagtggagtgcaggagttcatcagcggcatcagcagccccagcctgtctgagaagcagtacttcctgcgctggatggagtggggcctggcccgggtggcccagccccggctgcggcagcccccagagaccctgctgaccctgcggcccaagcatggaggcaccacagatgtgggggagcccctgtggccagagcccctgggcgtggagcacttcctgcgggagatgggccagttctatgaagctgagagctgcctggtggaggccggccgcctgcctgctggccagaggagatttgcccacttccctggcctggccagcgagctgctgctgaccggcctgcccctggagctgattgatggcagcaccctgtccatgcctgtgcgctgggtgacaggcctgctgaaggagctgcacgtgcggctggagaggaggagccggctggtggtgctgagcacagtgggcgtgcccggcaccgggaagagcaccctgctgaacaccatgtttggcctgcgctttgccaccgggaagagctgtggccccaggggggccttcatgcagctgatcaccgtggccgagggcttcagccaggacctgggctgtgaccacatcctggtgattgacagcggcggcctcatcggcggggccctgaccagcgctggggacagatttgagctggaggccagcctggccaccctgctgatgggcctgagcaatgtgaccgtcatcagcctggccgagaccaaggacatcccagctgccatcctgcacgccttcctgcggctggagaagacaggccacatgcccaactaccagtttgtgtaccagaacctgcatgatgtgtctgtgcccggcccccggccccgggacaagaggcagctgctggaccccccaggggacctgagcagagctgctgcccagatggagaagcagggagatggcttccgggccctggccggcctggccttctgtgaccctgagaagcagcacatctggcacatccctggcctgtggcacggggccccacccatggctgctgtgtccctggcctacagcgaggccatctttgagctgaagcgctgcctgctggagaacatcagaaatggcctgagcaaccagaacaagaacatccagcagctgattgagctggtgcggcggctgtag

SEQ ID NO: 175519 - DNA, 2769 bp, synthetic construct
  misc_feature 1..2769: note = Description of Artificial Sequence: Synthetic coding sequence
  source 1..2769: mol_type = other DNA
atggccagccctggccacagcgacctgggggaggtggcccctgagatcaaggccagcgagaggagaacagctgtggccatcgctgacctggagtggagggagatggagggagatgactgtgagttccgctatggagatggcaccaatgaggcccaggacaatgacttccccaccgtggagaggagccggctgcaggagatgctgagcctgctgggcctggagacctaccaggtgcagaagctgagcctgcaggacagcctgcagatcagctttgacagcatgaagaactgggccccccaggtgcccaaggacctgccctggaacttcctgaggaagctgcaggccctgaatgctgatgccaggaacaccaccatggtgctggatgtgctgcctgatgcccggcctgtggagaaggagagccagatggaggaggagatcatctactgggaccctgcagatgacctggccgctgacatctacagcttcagcgagctgcccaccccagacacccctgtgaaccccctggacctgctgtgtgccctgctgctgagcagtgacagcttcctgcagcaggagatcgccctgaagatggccctgtgccagtttgccctgcccctggtgctgcctgattctgagaaccactaccacaccttcctgctgtgggccatgaggggcatcgtgaggacctggtggagccagcccccccggggcatgggcagcttcagagaagattctgtggtgctgagccgggccccagcctttgcctttgtgaggatggatgtgagcagcaacagcaagagccagctgctgaatgctgtgctgagccctggccaccggcagtgggactgcttctggcaccgggacctgaacctgggcaccaatgcccgggagatcagtgatggcctggtggagatctcctggttcttccccagcggccgggaggacctggacatcttccctgagcctgtggccttcctgaacctgcggggggacatcggcagccactggctgcagttcaagctgctgacagagatcagcagcgctgtgttcatcctgacagacaacatcagcaagaaggagtacaagctgctgtacagcatgaaggagagcaccaccaagtactacttcatcctgagcccctaccggggcaagaggaacaccaacctgcgcttcctgaacaagctgatccctgtgctgaagattgaccacagccacgtgctggtgaaggtgagcagcacagacagcgacagctttgtgaagaggatccgggccatcgtgggcaatgtgctgcgggccccctgcagaagagtgtctgtggaggacatggcccatgctgccaggaagctgggcctgaaggtggatgaggactgtgaggagtgccagaaggccaaggacaggatggagcgcatcaccaggaagatcaaggacagtgatgcctacagaagagatgagctgcggctgcagggcgacccctggaggaaggccgcccaggtggagaaggagttctgccagctgcagtgggccgtggaccccccagagaagcacagagctgagctgcggcggcggctgctggagctgaggatgcagcagaatggacatgaccccagcagtggagtgcaggagttcatcagcggcatcagcagccccagcctgtctgagaagcagtacttcctgcgctggatggagtggggcctggcccgggtggcccagccccggctgcggcagcccccagagaccctgctgaccctgcggcccaagcatggaggcaccacagatgtgggggagcccctgtggccagagcccctgggcgtggagcacttcctgcgggagatgggccagttctatgaagctgagagctgcctggtggaggccggccgcctgcctgctggccagaggagatttgcccacttccctggcctggccagcgagctgctgctgaccggcctgcccctggagctgattgatggcagcaccctgtccatgcctgtgcgctgggtgacaggcctgctgaaggagctgcacgtgcggctggagaggaggagccggctggtggtgctgagcacagtgggcgtgcccggcaccgggaagagcaccctgctgaacaccatgtttggcctgcgctttgccaccgggaagagctgtggccccaggggggccttcatgcagctgatcaccgtggccgagggcttcagccaggacctgggctgtgaccacatcctggtgattgacagcggcggcctcatcggcggggccctgaccagcgctggggacagatttgagctggaggccagcctggccaccctgctgatgggcctgagcaatgtgaccgtcatcagcctggccgagaccaaggacatcccagctgccatcctgcacgccttcctgcggctggagaagacaggccacatgcccaactaccagtttgtgtaccagaacctgcatgatgtgtctgtgcccggcccccggccccgggacaagaggcagctgctggaccccccaggggacctgagcagagctgctgcccagatggagaagcagggagatggcttccgggccctggccggcctggccttctgtgaccctgagaagcagcacatctggcacatccctggcctgtggcacggggccccacccatggctgctgtgtccctggcctacagcgaggccatctttgagctgaagcgctgcctgctggagaacatcagaaatggcctgagcaaccagaacaagaacatccagcagctgattgagctggtgcggcggctgtag

SEQ ID NO: 175520 - DNA, 492 bp, synthetic construct
  misc_feature 1..492: note = Description of Artificial Sequence: Synthetic coding sequence
  source 1..492: mol_type = other DNA
atggagggagatgactgtgagttccgctatggagatggcaccaatgaggcccaggacaatgacttccccaccgtggagaggagccggctgcaggagatgctgagcctgctgggcctggagacctaccaggtgcagaagctgagcctgcaggacagcctgcagatcagctttgacagcatgaagaactgggccccccaggtgcccaaggacctgccctggaacttcctgaggaagctgcaggccctgaatgctgatgccaggaacaccaccatggtgctggatgtgctgcctgatgcccggcctgtggagaaggagagccagatggaggaggagatcatctactgggaccctgcagatgacctggccgctgacatctacagcttcagcgagctgcccaccccagacacccctgtgaaccccctggacctgctgtgtgccctgctgctgagcagtgacagcttcctgcagcaggagatcgccctgaagatgtag

SEQ ID NO: 175521 - DNA, 2667 bp, synthetic construct; identical to SEQ ID NO: 175518
  misc_feature 1..2667: note = Description of Artificial Sequence: Synthetic coding sequence
  source 1..2667: mol_type = other DNA

SEQ ID NO: 175522 - DNA, 2667 bp, synthetic construct; identical to SEQ ID NO: 175518
  misc_feature 1..2667: note = Description of Artificial Sequence: Synthetic coding sequence
  source 1..2667: mol_type = other DNA

SEQ ID NO: 175523 - DNA, 2796 bp, synthetic construct
  misc_feature 1..2796: note = Description of Artificial Sequence: Synthetic coding sequence
  source 1..2796: mol_type = other DNA
atggccagccctggcatcgaggtggagctgctgggcaagggccacagcgacctgggggaggtggcccctgagatcaaggccagcgagaggagaacagctgtggccatcgctgacctggagtggagggagatggagggagatgactgtgagttccgctatggagatggcaccaatgaggcccaggacaatgacttccccaccgtggagaggagccggctgcaggagatgctgagcctgctgggcctggagacctaccaggtgcagaagctgagcctgcaggacagcctgcagatcagctttgacagcatgaagaactgggccccccaggtgcccaaggacctgccctggaacttcctgaggaagctgcaggccctgaatgctgatgccaggaacaccaccatggtgctggatgtgctgcctgatgcccggcctgtggagaaggagagccagatggaggaggagatcatctactgggaccctgcagatgacctggccgctgacatctacagcttcagcgagctgcccaccccagacacccctgtgaaccccctggacctgctgtgtgccctgctgctgagcagtgacagcttcctgcagcaggagatcgccctgaagatggccctgtgccagtttgccctgcccctggtgctgcctgacagcgagaaccactaccacaccttcctgctgtgggccatgaggggcatcgtgaggacctggtggagccagcccccccggggcatgggcagcttccgggaggacagcgtggtgctgagccgggccccagcctttgcctttgtgaggatggatgtgagcagcaacagcaagagccagctgctgaatgctgtgctgagccctggccaccggcagtgggactgcttctggcaccgggacctgaacctgggcaccaatgcccgggagatcagtgatggcctggtggagatctcctggttcttccccagcggccgggaggacctggacatcttccctgagcctgtggccttcctgaacctgcggggggacatcggcagccactggctgcagttcaagctgctgacagagatcagcagcgctgtgttcatcctgacagacaacatcagcaagaaggagtacaagctgctgtacagcatgaaggagagcaccaccaagtactacttcatcctgagcccctaccggggcaagaggaacaccaacctgcgcttcctgaacaagctgatccctgtgctgaagattgaccacagccacgtgctggtgaaggtgagcagcacagacagcgacagctttgtgaagaggatccgggccatcgtgggcaatgtgctgcgggccccctgccggcgggtgtctgtggaggacatggcccacgccgccaggaagctgggcctgaaggtggatgaggactgtgaggagtgccagaaggccaaggacaggatggagcgcatcaccaggaagatcaaggacagtgatgcctacagaagagatgagctgcggctgcagggcgacccctggaggaaggccgcccaggtggagaaggagttctgccagctgcagtgggccgtggaccccccagagaagcacagagctgagctgcggcggcggctgctggagctgaggatgcagcagaatggacatgaccccagcagcggcgtgcaggagttcatcagcggcatcagcagccccagcctgtctgagaagcagtacttcctgcgctggatggagtggggcctggcccgggtggcccagccccggctgcggcagcccccagagaccctgctgaccctgcggcccaagcacggcggcaccacagatgtgggggagcccctgtggccagagcccctgggcgtggagcacttcctgcgggagatgggccagttctatgaggccgagagctgcctggtggaggccggccgcctgcctgctggccagaggagatttgcccacttccctggcctggccagcgagctgctgctgaccggcctgcccctggagctgattgatggcagcaccctgtccatgcctgtgcgctgggtgacaggcctgctgaaggagctgcacgtgcggctggagcggcgcagccggctggtggtgctgagcacagtgggcgtgcccggcaccgggaagagcaccctgctgaacaccatgtttggcctgcgctttgccaccgggaagagctgtggccccaggggggccttcatgcagctgatcaccgtggccgagggcttcagccaggacctgggctgtgaccacatcctggtgattgattctgggggcctgattggaggagccctgaccagcgctggggacagatttgagctggaggccagcctggccaccctgctgatgggcctgagcaatgtgaccgtcatcagcctggccgagaccaaggacatcccagctgccatcctgcacgccttcctgcggctggagaagacaggccacatgcccaactaccagtttgtgtaccagaacctgcatgatgtgtctgtgcccggcccccggccccgggacaagaggcagctgctggaccccccaggggacctgagcagagctgctgcccagatggagaagcagggagatggcttccgggccctggccggcctggccttctgtgaccctgagaagcagcacatctggcacatccctggcctgtggcatggagccccacccatggctgctgtgtccctggcctacagcgaggccatctttgagctgaagcgctgcctgctggagaacatcagaaatggcctgagcaaccagaacaagaacatccagcagctgattgagctggtgcggcggctgtag

SEQ ID NO: 175524 - DNA, 369 bp, synthetic construct
  misc_feature 1..369: note = Description of Artificial Sequence: Synthetic coding sequence
  source 1..369: mol_type = other DNA
atggagggagatgactgtgagttccgctatggagatggcaccaatgaggcccaggacaatgacttccccaccgtggagaggagccggctgcaggagatgctgagcctgctgggcctggagacctaccaggtgcagaagctgagcctgcaggacagcctgcagatcagctttgacagcatgaagaactgggccccccaggtgcccaaggacctgccctggaacttcctgaggaagctgcaggccctgaatgctgatgccaggaacaccaccatggtgctggatgtgctgcctgatgcccggcctgtggagaaggagagccagatggaggaggagatcatctactgggaccctgcagatgacctggcctag

SEQ ID NO: 175525 - DNA, 1623 bp, synthetic construct
  misc_feature 1..1623: note = Description of Artificial Sequence: Synthetic coding sequence
  source 1..1623: mol_type = other DNA
atggcctgggtgctgaagatggatgaggtgattgaaagtggcctggtgcatgactttgatgccagcctgagcggcatcggccaggagctgggcgctggggcctacagcatgtctgatgtgctggccctgcccatcttcaagcaggaggacagcagcctgcccctggatggagaaacagagcacccccccttccagtatgtgatgtgtgccgccaccagccctgctgtgaagctgcatgatgagaccctgacctacctgaaccagggccagagctatgagatccgcatgctggacaacaggaagatgggagacatgcctgagatcaatggcaagctggtgaagagcatcatccgggtggtgttccatgaccggcggctgcagtacacagagcaccagcagctggagggctggaagtggaacagacctggggaccggctgctggacctggacatccccatgtctgtgggcatcatcgacaccaggaccaaccccagccagctgaatgctgtggagttcctgtgggaccctgccaagaggaccagcgccttcatccaggtgcactgcatcagcacagagttcacccccaggaagcacggcggggagaagggcgtgcccttccgcatccaggtggacaccttcaagcagaatgaaaatggagagtacacagaccacctgcacagcgccagctgccagatcaaggtgttcaagcccaagggagctgacaggaagcagaagacagaccgggagaagatggagaagaggacagcccacgagaaggagaagtaccagcccagctatgacaccaccatcctgacagagatgaggctggagcccatcattgaagatgctgtggagcacgagcagaagaagagcagcaagaggaccctgcctgctgactatggagacagcctggccaagaggggcagctgcagcccctggccagatgcccccacagcctacgtgaacaacagccccagccctgcccccaccttcaccagcccccagcagagcacctgcagcgtgcctgacagcaacagcagcagccccaaccaccagggagatggagccagccagaccagcggggagcagatccagcccagcgccaccatccaggagacccagcagtggctgctgaagaaccgcttcagcagctacaccaggctcttcagcaacttctctggagctgacctgctgaagctgaccaaggaggacctggtgcagatctgtggggctgctgatggcatccggctgtacaacagcctgaagagccgctctgtgcggccccggctgaccatctacgtgtgccgggagcagcccagcagcacagtgctgcagggccagcagcaggccgccagcagcgcctctgaaaatggaagtggggccccctacgtgtaccacgccatctacctggaggagatgattgccagcgaggtggccaggaagctggccctggtgttcaacatccccctgcaccagatcaaccaggtgtaccggcagggccccaccggcatccacatcctggtgtctgaccagatggtgcagaacttccaggatgagagctgcttcctgttcagcacagtgaaggccgagagcagtgatggcatccacatcatcctgaagtag

SEQ ID NO: 175526 - DNA, 1623 bp, synthetic construct; identical to SEQ ID NO: 175525
  misc_feature 1..1623: note = Description of Artificial Sequence: Synthetic coding sequence
  source 1..1623: mol_type = other DNA

SEQ ID NO: 175527 - DNA, 1515 bp, synthetic construct
  misc_feature 1..1515: note = Description of Artificial Sequence: Synthetic coding sequence
  source 1..1515: mol_type = other DNA
atggcctgggtgctgaagatggatgaggtgattgaaagtggcctggtgcatgactttgatgccagcctgagcggcatcggccaggagctgggcgctggggcctacagcatgtctgatgtgctggccctgcccatcttcaagcaggaggacagcagcctgcccctggatggagaaacagagcacccccccttccagtatgtgatgtgtgccgccaccagccctgctgtgaagctgcatgatgagaccctgacctacctgaaccagggccagagctatgagatccgcatgctggacaacaggaagatgggagacatgcctgagatcaatggcaagctggtgaagagcatcatccgggtggtgttccatgaccggcggctgcagtacacagagcaccagcagctggagggctggaagtggaacagacctggggaccggctgctggacctggacatccccatgtctgtgggcatcatcgacaccaggaccaaccccagccagctgaatgctgtggagttcctgtgggaccctgccaagaggaccagcgccttcatccaggtgcactgcatcagcacagagttcacccccaggaagcacggcggggagaagggcgtgcccttccgcatccaggtggacaccttcaagcagaatgaaaatggagagtacacagaccacctgcacagcgccagctgccagatcaaggtgttcaagcccaagggagctgacaggaagcagaagacagaccgggagaagatggagaagaggacagcccacgagaaggagaagtaccagcccagctatgacaccaccatcctgacagaatgtagcccctggccagatgcccccacagcctacgtgaacaacagccccagccctgcccccaccttcaccagcccccagcagagcacctgcagcgtgcctgacagcaacagcagcagccccaaccaccagggagatggagccagccagaccagcggggagcagatccagcccagcgccaccatccaggagacccagcagtggctgctgaagaaccgcttcagcagctacaccaggctcttcagcaacttctctggagctgacctgctgaagctgaccaaggaggacctggtgcagatctgtggggctgctgatggcatccggctgtacaacagcctgaagagccgctctgtgcggccccggctgaccatctacgtgtgccgggagcagcccagcagcacagtgctgcagggccagcagcaggccgccagcagcgcctctgaaaatggaagtggggccccctacgtgtaccacgccatctacctggaggagatgattgccagcgaggtggccaggaagctggccctggtgttcaacatccccctgcaccagatcaaccaggtgtaccggcagggccccaccggcatccacatcctggtgtctgaccagatggtgcagaacttccaggatgagagctgcttcctgttcagcacagtgaaggccgagagcagtgatggcatccacatcatcctgaagtag

SEQ ID NO: 175528 - DNA, 447 bp, synthetic construct
  misc_feature 1..447: note = Description of Artificial Sequence: Synthetic coding sequence
  source 1..447: mol_type = other DNA
atggcctgggtgctgaagatggatgaggtgattgaaagtggcctggtgcatgactttgatgccagcctgagcggcatcggccaggagctgggcgctggggcctacagcatgtctgatgtgctggccctgcccatcttcaagcaggaggacagcagcctgcccctggatggagaaacagagcacccccccttccagtatgtgatgtgtgccgccaccagccctgctgtgaagctgcatgatgagaccctgacctacctgaaccagggccagagctatgagatccgcatgctggacaacaggaagatgggagacatgcctgagatcaatggcaagctggtgaagagcatcatccgggtggtgttccatgaccggcggctgcagtacacagagcaccagcagctggagggctggaagtggaacagacctggggaccggctgctggactag

SEQ ID NO: 175529 - DNA, 2295 bp, synthetic construct
  misc_feature 1..2295: note = Description of Artificial Sequence: Synthetic coding sequence
  source 1..2295: mol_type = other DNA
atgaatggagaggccgactgccccacagacctggagatggccgcccccaagggccaggaccgctggagccaggaggacatgctgaccctgctggagtgcatgaagaacaacctgcccagcaatgacagcagcaagttcaagaccacagagagccacatggactgggagaaggtggccttcaaggacttcagcggggacatgtgcaagctgaagtgggtggagatcagcaatgaggtgaggaagttccgcaccctgacagagctgatcctggatgcccaggagcacgtgaagaacccctacaagggcaagaagctgaagaagcacccagacttccccaagaagcccctgaccccctacttccgcttcttcatggagaagagggccaagtatgccaagctgcaccctgagatgagcaacctggacctgaccaagatcctgagcaagaagtacaaggagctgcctgagaagaagaagatgaagtacatccaggacttccagcgggagaagcaggagtttgagaggaacctggcccgcttccgggaggaccacccagacctgatccagaatgccaagaagagtgacatccctgagaagcccaagaccccccagcagctgtggtacacccatgagaagaaggtgtacctgaaggtgcggccagatgccaccaccaaggaggtgaaggacagcctgggcaagcagtggagccagctgagtgacaagaagaggctgaagtggatccacaaggccctggagcagaggaaggagtatgaggagatcatgagggactacatccagaagcaccctgagctgaacatcagcgaggagggcatcaccaagagcaccctgaccaaggccgagcggcagctgaaggacaagtttgatggccggcccaccaagcccccacccaacagctacagcctgtactgtgccgagctgatggccaacatgaaggatgtgcccagcacagagaggatggtgctgtgcagccagcagtggaagctgctgagccagaaggagaaggatgcctaccacaagaagtgtgaccagaagaagaaggactatgaggtggagctgctgcgcttcctggagagcctgcctgaggaggagcagcagagggtgctgggggaggagaagatgctgaacatcaacaagaagcaggccaccagccctgccagcaagaagccagcccaggagggcggcaaaggaggcagcgagaagcccaagaggcctgtgtctgccatgttcatcttcagcgaggagaagaggcggcagctgcaggaggagaggcctgagctgtctgagagcgagctgacccggctgctggccaggatgtggaatgacctgtctgagaagaagaaggccaagtacaaggcccgggaggccgccctgaaggcccagagcgagaggaagccaggaggagagcgggaggagcggggcaagctgcctgagagccccaagagagctgaggagatctggcagcagagcgtgattggagactacctggcccgcttcaagaatgacagagtgaaggccctgaaggccatggagatgacctggaacaacatggagaagaaggagaagctgatgtggatcaagaaggctgctgaggaccagaagagatatgagcgggagctgtctgagatgagggcccctcctgctgccaccaacagcagcaagaagatgaagttccagggcgagcccaagaagccacccatgaatggctaccagaagttcagccaggagctgctgagcaatggagagctgaaccacctgcccctgaaggagaggatggtggagatcggcagccgctggcagaggatcagccagagccagaaggagcactacaagaagctggccgaggagcagcagaagcagtacaaggtgcacctggacctgtgggtgaagagcctgagcccccaggacagagctgcctacaaggagtacatcagcaacaagaggaagtccatgaccaagctgcggggccccaaccccaagagcagcaggaccaccctgcagagcaagtctgagagtgaagaagatgatgaagaagatgaagatgatgaagatgaagatgaggaggaggaggatgatgaaaatggagacagcagtgaagatggaggagacagcagcgagagcagcagtgaagatgaaagtgaagatggagatgaaaatgaggaggatgatgaagatgaagatgatgatgaagatgatgatgaagatgaagataatgaaagtgagggcagcagcagcagcagcagcagcagcggggacagcagtgacagcgacagcaactag

SEQ ID NO: 175530 - DNA, 2184 bp, synthetic construct
  misc_feature 1..2184: note = Description of Artificial Sequence: Synthetic coding sequence
  source 1..2184: mol_type = other DNA
atgaatggagaggccgactgccccacagacctggagatggccgcccccaagggccaggaccgctggagccaggaggacatgctgaccctgctggagtgcatgaagaacaacctgcccagcaatgacagcagcaagttcaagaccacagagagccacatggactgggagaaggtggccttcaaggacttcagcggggacatgtgcaagctgaagtgggtggagatcagcaatgaggtgaggaagttccgcaccctgacagagctgatcctggatgcccaggagcacgtgaagaacccctacaagggcaagaagctgaagaagcacccagacttccccaagaagcccctgaccccctacttccgcttcttcatggagaagagggccaagtatgccaagctgcaccctgagatgagcaacctggacctgaccaagatcctgagcaagaagtacaaggagctgcctgagaagaagaagatgaagtacatccaggacttccagcgggagaagcaggagtttgagaggaacctggcccgcttccgggaggaccacccagacctgatccagaatgccaagaagagtgacatccctgagaagcccaagaccccccagcagctgtggtacacccatgagaagaaggtgtacctgaaggtgcggccagatgagatcatgagggactacatccagaagcaccctgagctgaacatcagcgaggagggcatcaccaagagcaccctgaccaaggccgagcggcagctgaaggacaagtttgatggccggcccaccaagcccccacccaacagctacagcctgtactgtgccgagctgatggccaacatgaaggatgtgcccagcacagagaggatggtgctgtgcagccagcagtggaagctgctgagccagaaggagaaggatgcctaccacaagaagtgtgaccagaagaagaaggactatgaggtggagctgctgcgcttcctggagagcctgcctgaggaggagcagcagagggtgctgggggaggagaagatgctgaacatcaacaagaagcaggccaccagccctgccagcaagaagccagcccaggagggcggcaagggcggcagcgagaagcccaagaggcctgtgtctgccatgttcatcttcagcgaggagaagaggcggcagctgcaggaggagaggcctgagctgtctgagagcgagctgacccggctgctggccaggatgtggaatgacctgtctgagaagaagaaggccaagtacaaggcccgggaggccgccctgaaggcccagagcgagaggaagccaggaggagagcgggaggagcggggcaagctgcctgagagccccaagagagctgaggagatctggcagcagagcgtcatcggggactacctggcccgcttcaagaatgacagagtgaaggccctgaaggccatggagatgacctggaacaacatggagaagaaggagaagctgatgtggatcaagaaggctgctgaggaccagaagagatatgaaagagagctgtctgagatgagggcccccccagctgccaccaacagcagcaagaagatgaagttccagggcgagcccaagaagccacccatgaatggctaccagaagttcagccaggagctgctgagcaatggagagctgaaccacctgcccctgaaggagaggatggtggagatcggcagccgctggcagaggatcagccagagccagaaggagcactacaagaagctggccgaggagcagcagaagcagtacaaggtgcacctggacctgtgggtgaagagcctgagcccccaggaccgggccgcctacaaggagtacatcagcaacaagaggaagtccatgaccaagctgcggggccccaaccccaagagcagcaggaccaccctgcagagcaagtctgagagcgaggaggatgatgaggaggatgaagatgatgaagatgaagatgaggaggaggaggatgatgaaaatggagacagcagtgaagatggaggagacagcagcgagagcagcagtgaagatgaaagtgaagatggagatgaaaatgaagaagatgatgaagatgaagatgatgatgaagatgatgatgaagatgaggacaatgaaagtgagggcagcagcagcagcagcagcagcagcggggacagcagtgacagcgacagcaactag

SEQ ID NO: 175531 - DNA, 2184 bp, synthetic construct; identical to SEQ ID NO: 175530
  misc_feature 1..2184: note = Description of Artificial Sequence: Synthetic coding sequence
  source 1..2184: mol_type = other DNA

SEQ ID NO: 175532 - DNA, 2295 bp, synthetic construct; identical to SEQ ID NO: 175529
  misc_feature 1..2295: note = Description of Artificial Sequence: Synthetic coding sequence
  source 1..2295: mol_type = other DNA

SEQ ID NO: 175533 - DNA, 2184 bp, synthetic construct; identical to SEQ ID NO: 175530
  misc_feature 1..2184: note = Description of Artificial Sequence: Synthetic coding sequence
  source 1..2184: mol_type = other DNA

SEQ ID NO: 175534 - DNA, 2295 bp, synthetic construct; identical to SEQ ID NO: 175529
  misc_feature 1..2295: note = Description of Artificial Sequence: Synthetic coding sequence
  source 1..2295: mol_type = other DNA

SEQ ID NO: 175535 - DNA, 2184 bp, synthetic construct; identical to SEQ ID NO: 175530
  misc_feature 1..2184: note = Description of Artificial Sequence: Synthetic coding sequence
  source 1..2184: mol_type = other DNA

SEQ ID NO: 175536 - DNA, 849 bp, synthetic construct
  misc_feature 1..849: note = Description of Artificial Sequence: Synthetic coding sequence
  source 1..849: mol_type = other DNA
atgaagggccagcagaagacagctgagacagaggagggcaccgtgcagatccaggagggcgctgtggccaccggggaggaccccacctctgtggccatcgccagcatccagagcgctgccaccttcccagaccccaacgtgaagtatgtgttcagaacagaaaatggaggccaggtgatgtacagagtcatccaggtgtctgagggccagctggatggccagacagagggcaccggggccatcagcggctacccagccacccagagcatgacccaggccgtcatccagggcgccttcaccagtgatgatgctgtggacacagagggcacagctgctgagacccactacacctacttccccagcacagctgtgggagatggagctgggggccagttctttgtgatgatgagcccccaggaggtgctgcagggcggcagccagaggagcatcgcccccaggacccacccctacagccccaagtctgaggcccccaggaccaccagagatgagaagaggcgggcccagcacaatgaggtggagaggagaagaagagacaagatcaacaactggatcgtgcagctgagcaagatcatcccagactgcagcatggagagcaccaagagcggccagagcaagggcggcatcctgagcaaggcctgtgactacatccaggagctgcggcagagcaaccaccggctgtctgaggagctgcagggcctggaccagctgcagctggacaatgatgtgctgcggcagcaggtggaggacctgaagaacaagaacctgctgctgcgggcccagctgcggcaccacggcctggaggtggtgatcaagaatgacagcaactag

SEQ ID NO: 175537 - DNA, 933 bp, synthetic construct
  misc_feature 1..933: note = Description of Artificial Sequence: Synthetic coding sequence
  source 1..933: mol_type = other DNA
atgaagggccagcagaagacagctgagacagaggagggcaccgtgcagatccaggagggcgctgtggccaccggggaggaccccacctctgtggccatcgccagcatccagagcgctgccaccttcccagaccccaacgtgaagtatgtgttcagaacagaaaatggaggccaggtgatgtacagagtcatccaggtgtctgagggccagctggatggccagacagagggcaccggggccatcagcggctacccagccacccagagcatgacccaggccgtcatccagggcgccttcaccagtgatgatgctgtggacacagagggcacagctgctgagacccactacacctacttccccagcacagctgtgggagatggagctgggggcaccaccagcggcagcacagctgctgtggtgaccacccagggcagcgaggccctgctgggccaggccaccccacctggcaccggccagttctttgtgatgatgagcccccaggaggtgctgcagggcggcagccagaggagcatcgcccccaggacccacccctacagccccaagtctgaggcccccaggaccaccagagatgagaagaggcgggcccagcacaatgaggtggagaggagaagaagagacaagatcaacaactggatcgtgcagctgagcaagatcatcccagactgcagcatggagagcaccaagagcggccagagcaagggcggcatcctgagcaaggcctgtgactacatccaggagctgcggcagagcaaccaccggctgtctgaggagctgcagggcctggaccagctgcagctggacaatgatgtgctgcggcagcaggtggaggacctgaagaacaagaacctgctgctgcgggcccagctgcggcaccacggcctggaggtggtgatcaagaatgacagcaactag

SEQ ID NO: 175538 - DNA, 933 bp, synthetic construct; identical to SEQ ID NO: 175537
  misc_feature 1..933: note = Description of Artificial Sequence: Synthetic coding sequence
  source 1..933: mol_type = other DNA

SEQ ID NO: 175539 - DNA, 756 bp, synthetic construct
  misc_feature 1..756: note = Description of Artificial Sequence: Synthetic coding sequence
  source 1..756: mol_type = other DNA
atgtacagagtcatccaggtgtctgagggccagctggatggccagacagagggcactggagccatcagcggctacccagccacccagagcatgacccaggccgtcatccagggcgccttcaccagtgatgatgctgtggacacagagggcacagctgctgagacccactacacctacttccccagcacagctgtgggagatggagctgggggcaccaccagcggcagcacagctgctgtggtgaccacccagggcagcgaggccctgctgggccaggccaccccacctggcaccggccagttctttgtgatgatgagcccccaggaggtgctgcagggcggcagccagaggagcatcgcccccaggacccacccctacagccccaagtctgaggcccccaggaccaccagagatgagaagagaagagcccagcacaatgaggtggagaggagaagaagagacaagatcaacaactggatcgtgcagctgagcaagatcatcccagactgcagcatggagagcaccaagagcggccagagcaaaggaggcatcctgagcaaggcctgtgactacatccaggagctgcggcagagcaaccaccggctgtctgaggagctgcagggcctggaccagctgcagctggacaatgatgtgctgcggcagcaggtggaggacctgaagaacaagaacctgctgctgcgggcccagctgcggcaccacggcctggaggtggtgatcaagaatgacagcaactag

SEQ ID NO: 175540 - DNA, 1155 bp, synthetic construct
  misc_feature 1..1155: note = Description of Artificial Sequence: Synthetic coding sequence
  source 1..1155: mol_type = other DNA
atggccggggctgagtggaagagcctggaggagtgcctggagaagcacctgcccctgcctgacctgcaggaggtgaagagggtgctgtatggcaaggagctgaggaagctggacctgccccgggaggcctttgaggccgccagccgggaggactttgagctgcagggctacgcctttgaagctgctgaggagcagctgcggcggcccagaattgtgcacgtgggcctggtgcagaaccgcatccccctgcctgccaatgcccctgtggccgagcaggtgtctgccctgcaccggcgcatcaaggccatcgtggaggtggccgccatgtgtggggtgaacatcatctgcttccaggaggcctggaccatgccctttgccttctgcacccgggagaagctgccctggacagaatttgctgagagcgcagaagatggccccaccacccgcttctgccagaagctggccaagaaccacgacatggtggtggtgagccccatcctggagcgggacagcgagcacggagatgtgctgtggaacacagctgtggtgatcagcaacagcggggctgtgctgggcaagaccaggaagaaccacatcccccgggtgggggacttcaatgaaagcacctactacatggagggcaacctgggccaccctgtgttccagacccagtttggaagaattgctgtgaacatctgctacggccgccaccaccccctgaactggctgatgtacagcatcaacggggctgagatcatcttcaaccccagcgccaccatcggggccctgtctgagagcctgtggcccatcgaggccagaaatgctgccatcgccaaccactgcttcacctgtgccatcaacagagtgggcacagagcacttccccaatgagttcaccagcggagatggcaagaaggcccaccaggactttggctacttctacggcagcagctatgtggccgccccagacagcagcaggaccccaggcctgagccgcagcagagatggcctgctggtggccaagctggacctgaacctgtgccagcaggtgaatgatgtgtggaacttcaagatgacaggccgctatgagatgtatgcccgggagctggccgaggccgtgaagagcaactacagccccaccatcgtgaaggagtag

SEQ ID NO: 175541 - DNA, 951 bp, synthetic construct
  misc_feature 1..951: note = Description of Artificial Sequence: Synthetic coding sequence
  source 1..951: mol_type = other DNA
atgctgggggaggccccagctgccccccggctggccggcagcgaggcccggagcctgtggcagggcacccaggtgtctgccctgcaccggcgcatcaaggccatcgtggaggtggccgccatgtgtggggtgaacatcatctgcttccaggaggcctggaccatgccctttgccttctgcacccgggagaagctgccctggacagaatttgctgagagcgcagaagatggccccaccacccgcttctgccagaagctggccaagaaccacgacatggtggtggtgagccccatcctggagcgggacagcgagcacggagatgtgctgtggaacacagctgtggtgatcagcaacagcggggctgtgctgggcaagaccaggaagaaccacatcccccgggtgggggacttcaatgaaagcacctactacatggagggcaacctgggccaccctgtgttccagacccagtttggaagaattgctgtgaacatctgctacggccgccaccaccccctgaactggctgatgtacagcatcaacggggctgagatcatcttcaaccccagcgccaccatcggggccctgtctgagagcctgtggcccatcgaggccagaaatgctgccatcgccaaccactgcttcacctgtgccatcaacagagtgggcacagagcacttccccaatgagttcaccagcggagatggcaagaaggcccaccaggactttggctacttctacggcagcagctatgtggccgccccagacagcagcaggaccccaggcctgagccgcagcagagatggcctgctggtggccaagctggacctgaacctgtgccagcaggtgaatgatgtgtggaacttcaagatgacaggccgctatgagatgtatgcccgggagctggccgaggccgtgaagagcaactacagccccaccatcgtgaaggagtag

SEQ ID NO: 175542 - DNA, 561 bp, synthetic construct
  misc_feature 1..561: note = Description of Artificial Sequence: Synthetic coding sequence
  source 1..561: mol_type = other DNA
atggccggggctgagtggaagagcctggaggagtgcctggagaagcacctgcccctgcctgacctgcaggaggtgaagagggtgctgtatggcaaggagctgaggaagctggacctgccccgggaggcctttgaggccgccagccgggaggactttgagctgcagggctacgcctttgaagctgctgaggagcagctgcggcggcccagaattgtgcacgtgggcctggtgcagaaccgcatccccctgcctgccaatgcccctgtggccgagcaggtgtctgccctgcaccggcgcatcaaggccatcgtggaggtggccgccatgtgtggggtgaacatcatctgcttccaggaggcctggatcctgcggccccaccaccaggagccccggcccccctgctgctacgcccccagctgctgcctgatccccagcgtcttcccccacaggtctgagagcatccgcagcagccccagcctgtaccaccacctggtgcaggcccctggcagcagccccctggcctttgtgatccccagctcctggagccctgtgcccagctag

SEQ ID NO: 175543 - DNA, 2955 bp, synthetic construct
  misc_feature 1..2955: note = Description of Artificial Sequence: Synthetic coding sequence
  source 1..2955: mol_type = other DNA
atggatgaccgctacccagccctgcagagggcccagctgcggctggacttcatccacgccaacagcaccacccacagcttcctgtttggagccctggccgagctgctggacaatgccagagatgctggagctgagcggctggatgtgttttctgtggacaatgagaagctgcagggcggcttcatgctgtgcttcctggatgatggctgcggcatgagccctgaggaggccagtgacatcatctacttcggccgcagcaagaagaggctgagcaccctgaagttcatcggccagtatggaaatggcctgaagagcggctccatgagaattggcaaggacttcatcctcttcaccaagaaggaggagaccatgacctgtgtgttcttcagccagaccttctgtgaggaggagagcctgtctgaggtggtggtgcccatgcccagctggctgatccgcacccgggagagcgtgacagatgacccccagaagtttgccatggagctgagcatcatctacaagtacagccccttcaagacagaagctgagctgatgcagcagtttgatgtgatctatggaaaatgtggcaccctgctggtgatctacaacctgaagctgctgctgaatggagagcctgagctggatgtgaagacagacaaggaggacatcctgatggccggggccctggaggacttccctgcccgctggagcttccgggcctacacctctgtgctgtacttcaacccctggatgaggatcttcatccaggccaagagggtgaagaccaagcacctgtgctactgcctgtaccggcccaggaagtacctgtatgtgaccagcagcttcaagggggccttcaaggatgaggtgaagaaggccgaggaggccgtgaagattgctgagagcatcctgaaggaggcccagatcaaggtgaaccagtgtgacaggaccagcctgagcagcgccaaggatgtgctgcagagggccctggaggatgtggaggccaagcagaagaacctgaaggagaagcagcgggagctgaagacagcccggaccctgagcctcttctacggcgtgaatgtggagaacagaagccaggccggcatgttcatctacagcaacaacagactcatcaagatgcatgagaaggtgggcagccagctgaagctgaagagcctgctgggcgccggcgtggtgggcatcgtgaacatccccctggaggtgatggagcccagccacaacaagcaggagttcctgaatgtgcaggagtacaaccacctgctgaaggtgatgggccagtacctggtgcagtactgcaaggacaccggcatcaacaacagaaacctgaccctcttctgcaatgaatttggctaccagaatgacattgatgtggagaagcccctgaacagcttccagtaccagaggcggcaggccatgggcatccccttcatcatccagtgtgacctgtgcctgaagtggagggtgctgcccagcagcaccaactaccaggagaaggagttctttgacatctggatctgtgccaacaaccccaaccggctggagaacagctgccaccaggtggagtgcctgcccagcatccccctgggcaccatgagcaccatcagccccagcaagaatgagaaggagaagcagctgcgggagagcgtcatcaagtaccagaaccggctggccgagcagcagccccagccccagttcatccctgtggatgagatcaccgtgaccagcacctgcctgaccagcgcccacaaggagaacaccaagacccagaagatccggctgctgggagatgacctgaagcatgagagcctgagcagctttgagctgagcgccagccggcggggccagaagagaaatattgaggagacagacagtgatgtggagtacatcagcgagaccaagatcatgaagaagtccatggaggagaagatgaacagccagcagcagagaattcctgtggccctgcctgaaaatgtgaagctggccgagaggagccagaggagccagatcgccaacatcaccaccgtgtggagggcccagcccacagagggctgcctgaagaatgcccaggccgcctcctgggagatgaagaggaagcagagcctgaactttgtggaggagtgcaaggtgctgacagaagatgagaacaccagtgacagcgacatcatcctggtgtctgacaagagcaacacagatgtgtccctgaagcaggagaagaaggagatccccctgctgaaccaggagaagcaggagctgtgcaatgatgtgctggccatgaagaggagcagcagcctgcccagctggaagagcctgctgaatgtgcccatggaggatgtgaacctgagcagcggccacatcgcccgggtgtctgtgtctggcagctgcaaggtggccagcagccctgccagcagccagagcacccctgtgaaggagaccgtgaggaagctgaagagcaagctgcgggagatcctgctgtacttcttccctgagcaccagctgcccagcgagctggaggagcccgccctgagctgtgagctggagcagtgcccagagcagatgaacaagaagctgaagatgtgcttcaaccagatccagaacacctacatggtgcagtatgagaagaagatcaagaggaagctgcagagcatcatctatgacagcaacacccggggcatccacaatgagatcagcctgggccagtgtgagaacaagaggaagatcagcgaggacaagctgaagaacctgcgcatcaagctggccctgctgctgcagaagctgcagctgggcggccctgagggggacctggagcagacagacacctacctggaggccctgctgaaggaggacaacctgctcttccagaacaacctgaacaaggtgaccattgatgcccggcaccggctgcccctggagaagaatgagaagaccagtgaaaattag

SEQ ID NO: 175544 - DNA, 618 bp, synthetic construct
  misc_feature 1..618: note = Description of Artificial Sequence: Synthetic coding sequence
  source 1..618: mol_type = other DNA
atgctggagatcctggagcagcagaagaaggtggatgctgagaccgtgggccgggtgaagcgcttcatccaggagaatgtgtttgtggccgccaaccacaacggcagccccctgagcatcaaggaggcccccaaggagctgagctttggagcccgggcagagctgccccgcatccaccctgtggccagcaagctgctgcggctgatgcagaagaaggagaccaacctgtgcctgtctgcagatgtgtccctggcccgggagctgctgcagctggctgatgccctgggccccagcatctgcatgctgaagacccacgtggacatcctgaatgacttcaccctggatgtgatgaaggagctgatcaccctggccaagtgccacgagttcctgatctttgaggacaggaagtttgctgacatcggcaacacagtgaagaagcagtatgaaggagacaacctgggccagcagtacaacagcccccaggaggtgattggcaagaggggcagtgacatcatcatcgtgggccggggcatcatctctgctgctgaccggctggaggccgctgagatgtacaggaaggccgcctgggaggcctacctgagccggctgggcgtgtag

SEQ ID NO: 175545 - DNA, 1167 bp, synthetic construct
  misc_feature 1..1167: note = Description of Artificial Sequence: Synthetic coding sequence
  source 1..1167: mol_type = other DNA
atgctgatccggaggaaggagaccaaggactatggcaccaagaggctggtggagggcaccatcaaccctggagagacctgcctgatcattgaagatgtggtgaccagcggcagctctgtgctggagaccgtggaggtgctgcagaaggagggcctgaaggtgacagatgccatcgtgctgctggaccgggagcagggcggcaaggacaagctgcaggcccacggcatccggctgcacagcgtgtgcaccctgagcaagatgctggagatcctggagcagcagaagaaggtggatgctgagaccgtgggccgggtgaagcgcttcatccaggagaatgtgtttgtggccgccaaccacaacggcagccccctgagcatcaaggaggcccccaaggagctgagctttggagcccgggcagagctgccccgcatccaccctgtggccagcaagctgctgcggctgatgcagaagaaggagaccaacctgtgcctgtctgcagatgtgtccctggcccgggagctgctgcagctggctgatgccctgggccccagcatctgcatgctgaagacccacgtggacatcctgaatgacttcaccctggatgtgatgaaggagctgatcaccctggccaagtgccacgagttcctgatctttgaggacaggaagtttgctgacatcggcaacacagtgaagaagcagtatgagggcggcatcttcaagatcgcctcctgggccgacctggtgaatgcccacgtggtgcccggcagcggcgtggtgaagggcctgcaggaggtgggcctgcccctgcaccggggctgcctgctgattgctgagatgagcagcacaggcagcctggccactggagactacaccagggctgctgtgaggatggccgaggagcacagcgagtttgtggtgggcttcatcagcggcagccgggtgtccatgaagccagagttcctgcacctgaccccaggagtgcagctggaggccggcggggacaacctgggccagcagtacaacagcccccaggaggtgattggcaagaggggcagtgacatcatcatcgtgggccggggcatcatctctgctgctgaccggctggaggccgctgagatgtacaggaaggccgcctgggaggcctacctgagccggctgggcgtgtag

SEQ ID NO: 175546 - DNA, 909 bp, synthetic construct
  misc_feature 1..909: note = Description of Artificial Sequence: Synthetic coding sequence
  source 1..909: mol_type = other DNA
atgctggagatcctggagcagcagaagaaggtggatgctgagaccgtgggccgggtgaagcgcttcatccaggagaatgtgtttgtggccgccaaccacaacggcagccccctgagcatcaaggaggcccccaaggagctgagctttggagcccgggcagagctgccccgcatccaccctgtggccagcaagctgctgcggctgatgcagaagaaggagaccaacctgtgcctgtctgcagatgtgtccctggcccgggagctgctgcagctggctgatgccctgggccccagcatctgcatgctgaagacccacgtggacatcctgaatgacttcaccctggatgtgatgaaggagctgatcaccctggccaagtgccacgagttcctgatctttgaggacaggaagtttgctgacatcggcaacacagtgaagaagcagtatgagggcggcatcttcaagatcgcctcctgggccgacctggtgaatgcccacgtggtgcccggcagcggcgtggtgaagggcctgcaggaggtgggcctgcccctgcaccggggctgcctgctgattgctgagatgagcagcacaggcagcctggccactggagactacaccagggctgctgtgaggatggccgaggagcacagcgagtttgtggtgggcttcatcagcggcagccgggtgtccatgaagccagagttcctgcacctgaccccaggagtgcagctggaggccggcggggacaacctgggccagcagtacaacagcccccaggaggtgattggcaagaggggcagtgacatcatcatcgtgggccggggcatcatctctgctgctgaccggctggaggccgctgagatgtacaggaaggccgcctgggaggcctacctgagccggctgggcgtgtag

SEQ ID NO: 175547 - DNA, 933 bp, synthetic construct
  misc_feature 1..933: note = Description of Artificial Sequence: Synthetic coding sequence
  source 1..933: mol_type = other DNA
atggccgccaccggggccaatgctgagaaggccgagagccacaatgactgccctgtgcggctgctgaaccccaacatcgccaagatgaaggaggacatcctgtaccacttcaacctgaccaccagccgccacaacttccctgccctgtttggagatgtgaagtttgtgtgtgtgggcggcagccccagcaggatgaaggccttcatccgctgtgtgggcgctgagctgggcctggactgccccggccgggactaccccaacatctgtgccggcacagacagatatgccatgtacaaggtgggccctgtgctgtctgtgagccacggcatgggcatccccagcatcagcatcatgctgcacgagctgatcaagctgctgtactatgcccgctgcagcaatgtgaccatcatcagaattggcaccagcggcggcatcggcctggagcccggcaccgtggtgatcacagagcaggccgtggacacctgcttcaaggccgagtttgagcagatcgtgctgggcaagagggtcatcaggaagacagacctgaacaagaagctggtgcaggagctgctgctgtgcagcgctgagctgtctgagttcaccaccgtggtgggcaacaccatgtgcaccctggacttctatgagggccagggccgcctggatggagccctgtgcagctacacagagaaggacaagcaggcctacctggaggccgcctatgctgctggggtgagaaatattgagatggagagctctgtgtttgctgccatgtgcagcgcctgtggcctgcaggccgctgtggtgtgtgtgaccctgctgaaccggctggagggggaccagatcagcagccccagaaatgtgctgtctgagtaccagcagaggccccagaggctggtgtcctacttcatcaagaagaagctgagcaaggcctag

SEQ ID NO: 175548 - DNA, 933 bp, synthetic construct; identical to SEQ ID NO: 175547
  misc_feature 1..933: note = Description of Artificial Sequence: Synthetic coding sequence
  source 1..933: mol_type = other DNA

SEQ ID NO: 175549 - DNA, 933 bp, synthetic construct; identical to SEQ ID NO: 175547
  misc_feature 1..933: note = Description of Artificial Sequence: Synthetic coding sequence
  source 1..933: mol_type = other DNA

SEQ ID NO: 175550 - DNA, 435 bp, synthetic construct
  misc_feature 1..435: note = Description of Artificial Sequence: Synthetic coding sequence
  source 1..435: mol_type = other DNA
atggccgccaccggggccaatgctgagaaggccgagagccacaatgactgccctgtgcggctgctgaaccccaacatcgccaagatgaaggaggacatcctgtaccacttcaacctgaccaccagccgccacaacttccctgccctgtttggagatgtgaagtttgtgtgtgtgggcggcagccccagcaggatgaaggccttcatccgctgtgtgggcgctgagctgggcctggactgccccggccgggactaccccaacatctgtgccggcacagacagatatgccatgtacaaggtgggccctgtgctgtctgtgagccacggcatgggcatccccagcatcagcatcatgctgcacgagctgatcaagctgctgtactatgcccgctgcagcaatgtgaccatcatcagaattggcaccagcggcggctag

SEQ ID NO: 175551 - DNA, 516 bp, synthetic construct
  misc_feature 1..516: note = Description of Artificial Sequence: Synthetic coding sequence
  source 1..516: mol_type = other DNA
atggccgccaccggggccaatgctgagaaggccgagagccacaatgactgccctgtgcggctgctgaaccccaacatcgccaagatgaaggaggacatcctgtaccacttcaacctgaccaccagccgccacaacttccctgccctgtttggagatgtgaagtttgtgtgtgtgggcggcagccccagcaggatgaaggccttcatccgctgtgtgggcgctgagctgggcctggactgccccggccgggactaccccaacatctgtgccggcacagacagatatgccatgtacaaggtgggccctgtgctgtctgtgagccacggcatgggcatccccagcatcagcatcatgctgcacgagctgatcaagctgctgtactatgcccgctgcagcaatgtgaccatcatcagaattggcaccagcggcggcatcggcatcctgaagcacctgcggaggaaggacaccgggaagagcaagggcggccgggagaggaggagcaccaagctgaggtag

SEQ ID NO: 175552 - DNA, 522 bp, synthetic construct
  misc_feature 1..522: note = Description of Artificial Sequence: Synthetic coding sequence
  source 1..522: mol_type = other DNA
atgcagaggaagctgaaggtgaccagcctggagcccggcaccgtggtgatcacagagcaggccgtggacacctgcttcaaggccgagtttgagcagatcgtgctgggcaagagggtcatcaggaagacagacctgaacaagaagctggtgcaggagctgctgctgtgcagcgctgagctgtctgagttcaccaccgtggtgggcaacaccatgtgcaccctggacttctatgagggccagggccgcctggatggagccctgtgcagctacacagagaaggacaagcaggcctacctggaggccgcctatgctgctggggtgaggaacatcgagatggagagctctgtgtttgctgccatgtgcagcgcctgtggcctgcaggccgctgtggtgtgtgtgaccctgctgaaccggctggagggggaccagatcagcagccccagaaatgtgctgtctgagtaccagcagaggccccagaggctggtgtcctacttcatcaagaagaagctgagcaaggcctag

SEQ ID NO: 175553 - DNA, 90 bp, synthetic construct
  misc_feature 1..90: note = Description of Artificial Sequence: Synthetic coding sequence
  source 1..90: mol_type = other DNA
atggccgccaccggggccaatgctgagaaggccgagagccacaatgactgccctgtgcggctgctgaaccccaacatcgccaagatgtag

SEQ ID NO: 175554 - DNA, 441 bp, synthetic construct
  misc_feature 1..441: note = Description of Artificial Sequence: Synthetic coding sequence
  source 1..441: mol_type = other DNA
atggccgccaccggggccaatgctgagaaggccgagagccacaatgactgccctgtgcggctgctgaaccccaacatcgccaagatgaaggaggacatcctgtaccacttcaacctgaccaccagccgccacaacttccctgccctgtttggagatgtgaagtttgtgtgtgtgggcggcagccccagcaggatgaaggccttcatccgctgtgtgggcgctgagctgggcctggactgccccggccgggactaccccaacatctgtgccggcacagacagatatgccatgtacaaggtgggccctgtgctgtctgtgagccacggcatgggcatccccagcatcagcatcatgctgcacgagctgatcaagctgctgtactatgcccgctgcagcaatgtgaccatcatcagaattggcaccagcggcggcattggatag

SEQ ID NO: 175555 - DNA, 606 bp, synthetic construct
  misc_feature 1..606: note = Description of Artificial Sequence: Synthetic coding sequence
  source 1..606: mol_type = other DNA
atggccagcgctggaggagaggactgtgagagccctgcccctgaggccgaccggccccaccagaggcccttcctgattggagtgtctgggggcacagccagcggcaagagcacagtgtgtgagaagatcatggagctgctgggccagaatgaggtggagcagaggcagaggaaggtggtgatcctgagccaggaccgcttctacaaggtgctgacagctgagcagaaggccaaggccctgaagggccagtacaactttgaccacccagatgcctttgacaatgacctgatgcacaggaccctgaagaacatcgtggagggcaagacagtggaggtgcccacctatgactttgtgacccacagccggctgcctgagaccaccgtggtgtacccagcagatgtggtgctgtttgagggcatcctggtgttctacagccaggagatccgggacatgttccacctgcggctgtttgtggacacagacagtgatgtgcggctgagccggcgggacaaggaggtgtgccgctgtgaccacccagcccggagcggccagtatggctgccaccagcctgacagagctgcccaccctggccacagcgagtggtag

SEQ ID NO: 175556 - DNA, 807 bp, synthetic construct
  misc_feature 1..807: note = Description of Artificial Sequence: Synthetic coding sequence
  source 1..807: mol_type = other DNA
atggccagcgctggaggagaggactgtgagagccctgcccctgaggccgaccggccccaccagaggcccttcctgattggcagcacagtgtgtgagaagatcatggagctgctgggccagaatgaggtggagcagaggcagaggaaggtggtgatcctgagccaggaccgcttctacaaggtgctgacagctgagcagaaggccaaggccctgaagggccagtacaactttgaccacccagatgcctttgacaatgacctgatgcacaggaccctgaagaacatcgtggagggcaagacagtggaggtgcccacctatgactttgtgacccacagccggctgcctgagaccaccgtggtgtacccagcagatgtggtgctgtttgagggcatcctggtgttctacagccaggagatccgggacatgttccacctgcggctgtttgtggacacagacagtgatgtgcggctgagcagaagagtgctgagagatgtgcggcggggccgggacctggagcagatcctgacccagtacaccacctttgtgaagccagcctttgaggagttctgcctgcccaccaagaagtatgcagatgtgatcatcccccggggcgtggacaacatggtggccatcaacctgattgtgcagcacatccaggacatcctgaatggagacatctgcaagtggcaccggggcggcagcaatggccgcagctacaagaggaccttcagcgagcccggggaccaccctggcatgctgaccagcggcaagaggagccacctggagagcagcagccggccccactag

SEQ ID NO: 175557 - DNA, 849 bp, synthetic construct
  misc_feature 1..849: note = Description of Artificial Sequence: Synthetic coding sequence
  source 1..849: mol_type = other DNA
atggccagcgctggaggagaggactgtgagagccctgcccctgaggccgaccggccccaccagaggcccttcctgattggagatgagcgcttccaggccggcatccccctgctgtgcctgcagagcacagtgtgtgagaagatcatggagctgctgggccagaatgaggtggagcagaggcagaggaaggtggtgatcctgagccaggaccgcttctacaaggtgctgacagctgagcagaaggccaaggccctgaagggccagtacaactttgaccacccagatgcctttgacaatgacctgatgcacaggaccctgaagaacatcgtggagggcaagacagtggaggtgcccacctatgactttgtgacccacagccggctgcctgagaccaccgtggtgtacccagcagatgtggtgctgtttgagggcatcctggtgttctacagccaggagatccgggacatgttccacctgcggctgtttgtggacacagacagtgatgtgcggctgagcagaagagtgctgagagatgtgcggcggggccgggacctggagcagatcctgacccagtacaccacctttgtgaagccagcctttgaggagttctgcctgcccaccaagaagtatgcagatgtgatcatcccccggggcgtggacaacatggtggccatcaacctgattgtgcagcacatccaggacatcctgaatggagacatctgcaagtggcaccggggcggcagcaatggccgcagctacaagaggaccttcagcgagcccggggaccaccctggcatgctgaccagcggcaagaggagccacctggagagcagcagccggccccactag

SEQ ID NO: 175558 - DNA, 834 bp, synthetic construct
  misc_feature 1..834: note = Description of Artificial Sequence: Synthetic coding sequence
  source 1..834: mol_type = other DNA
atggccagcgctggaggagaggactgtgagagccctgcccctgaggccgaccggccccaccagaggcccttcctgattggagtgtctgggggcacagccagcggcaagagcacagtgtgtgagaagatcatggagctgctgggccagaatgaggtggagcagaggcagaggaaggtggtgatcctgagccaggaccgcttctacaaggtgctgacagctgagcagaaggccaaggccctgaagggccagtacaactttgaccacccagatgcctttgacaatgacctgatgcacaggaccctgaagaacatcgtggagggcaagacagtggaggtgcccacctatgactttgtgacccacagccggctgcctgagaccaccgtggtgtacccagcagatgtggtgctgtttgagggcatcctggtgttctacagccaggagatccgggacatgttccacctgcggctgtttgtggacacagacagtgatgtgcggctgagccggcgggtgctgagagatgtgagaagaggccgggacctggagcagatcctgacccagtacaccacctttgtgaagccagcctttgaggagttctgcctgcccaccaagaagtatgcagatgtgatcatcccccggggcgtggacaacatggtggccatcaacctgattgtgcagcacatccaggacatcctgaatggagacatctgcaagtggcacagaggaggcagcaatggccgcagctacaagaggaccttcagcgagcccggggaccaccctggcatgctgaccagcggcaagaggagccacctggagagcagcagccggccccactag

SEQ ID NO: 175559 - DNA, 1647 bp, synthetic construct
  misc_feature 1..1647: note = Description of Artificial Sequence: Synthetic coding sequence
  source 1..1647: mol_type = other DNA
atggccgcccccccagcccgggcagatgctgaccccagccccaccagccccccaacagcccgggacaccccaggccggcaggccgagaagtcagaaacagcctgtgaggacaggagcaatgctgagagcctggaccggctgctgccccctgtgggcaccggccgcagccccaggaagaggaccaccagccagtgcaagtctgagccccccctgctgcggaccagcaagaggaccatctacacagctggccggcccccctggtacaatgaacatggcacccagagcaaggaggcctttgccatcggcctgggcggcggcagcgccagcggcaagaccaccgtggccaggatgatcatcgaggccctggatgtgccctgggtggtgctgctgtccatggacagcttctacaaggtgctgacagagcagcagcaggagcaggccgcccacaacaacttcaactttgaccacccagatgcctttgattttgacctgatcatcagcaccctgaagaagctgaagcagggcaagtctgtgaaggtgcccatctatgacttcaccacccacagcaggaagaaggactggaagaccctgtatggagccaacgtcatcatctttgagggcatcatggcctttgctgacaagaccctgctggagctgctggacatgaagatctttgtggacacagacagcgacatccggctggtgcggcggctgcggcgggacatcagcgagcggggccgggacattgaaggagtcatcaagcagtacaacaagtttgtgaagcccagctttgaccagtacatccagcccaccatgaggctggccgacatcgtggtgccccggggcagcggcaacacagtggccatcgacctgattgtgcagcacgtgcacagccagctggaggagcgggagctgtctgtgcgggccgccctggccagcgcccaccagtgccaccccctgcccaggaccctgtctgtgctgaagagcaccccccaggtgcggggcatgcacaccatcatccgggacaaggagaccagcagagatgagttcatcttctacagcaagaggctgatgaggctgctgattgagcacgccctgtccttcctgcccttccaggactgtgtggtgcagaccccccagggccaggactatgctggaaaatgttatgctgggaagcagatcactggagtgtccatcctgcgggccggggagaccatggagcccgccctgcgggctgtgtgcaaggatgtgagaattggcaccatcctgatccagaccaaccagctgaccggggagcctgagctgcactacctgcggctgcccaaggacatcagtgatgaccacgtgatcctgatggactgcaccgtgtccactggagctgctgccatgatggctgtgcgggtgctgctggaccatgatgtgcctgaggacaagatcttcctgctgagcctgctgatggccgagatgggcgtgcacagcgtggcctatgccttcccccgggtgcgcatcatcaccacagctgtggacaagagggtgaatgacctcttccgcatcatccctggcatcggcaactttggagaccgctacttcggcacagatgctgtgcctgatggcagtgatgaggaggaggtggcctacacaggatag

SEQ ID NO: 175560 - DNA, 1260 bp, synthetic construct
  misc_feature 1..1260: note = Description of Artificial Sequence: Synthetic coding sequence
  source 1..1260: mol_type = other DNA
atggccgcccccccagcccgggcagatgctgaccccagccccaccagccccccaacagcccgggacaccccaggccggcaggccgagaagtcagaaacagcctgtgaggacaggagcaatgctgagagcctggaccggctgctgccccctgtgggcaccggccgcagccccaggaagaggaccaccagccagtgcaagtctgagccccccctgctgcggaccagcaagaggaccatctacacagctggccggcccccctggtacaatgaacatggcacccagagcaaggaggcctttgccatcggcctgggcggcggcagcgccagcggcaagaccaccgtggccaggatgatcatcgaggccctggatgtgccctgggtggtgctgctgtccatggacagcttctacaaggtgctgacagagcagcagcaggagcaggccgcccacaacaacttcaactttgaccacccagatgcctttgattttgacctgatcatcagcaccctgaagaagctgaagcagggcaagtctgtgaaggtgcccatctatgacttcaccacccacagcaggaagaaggactggaagaccctgtatggagccaacgtcatcatctttgagggcatcatggcctttgctgacaagaccctgctggagctgctggacatgaagatctttgtggacacagacagcgacatccggctggtgcggcggctgcggcgggacatcagcgagcggggccgggacattgaaggagtcatcaagcagtacaacaagtttgtgaagcccagctttgaccagtacatccagcccaccatgaggctggccgacatcgtggtgccccggggcagcggcaacacagtggccatcgacctgattgtgcagcacgtgcacagccagctggaggagggctgtgccggcctgggcacccctgtgcccccagctgccccagatgctgagaggcctgaggagcacgccgccggcaccggccacgcccaccaccaccaggtgcgggcccacctgggcaccggccggccccgggcccgggccccagcccagctgctggccccccagggccagggcgaccagagccggcgggtgcacctgctgctgcaggagacagatgctgctgcccaccgggcccgggccctgctgcctgccctgagcggcctgcggaggacagatcctgctggggccggcctgtgtggccaggtgctgtgtggggaggccgaccaccgctgtgtgcacagcgcccggaggtag

SEQ ID NO: 175561 - DNA, 1647 bp, synthetic construct
  misc_feature 1..1647: note = Description of Artificial Sequence: Synthetic coding sequence
  source 1..1647: mol_type = other DNA
atggccgcccccccagcccgggcagatgctgaccccagccccaccagccccccaacagcccgggacaccccaggccggcaggccgagaagtcagaaacagcctgtgaggacaggagcaatgctgagagcctggaccggctgctgccccctgtgggcaccggccgcagccccaggaagaggaccaccagccagtgcaagtctgagccccccctgctgcggaccagcaagaggaccatctacacagctggccggcccccctggtacaatgaacatggcacccagagcaaggaggcctttgccatcggcctgggcggcggcagcgccagcggcaagaccaccgtggccaggatgatcatcgaggccctggatgtgccctgggtggtgctgctgtccatggacagcttctacaaggtgctgacagagcagcagcaggagcaggccgcccacaacaacttcaactttgaccacccagatgcctttgattttgacctgatcatcagcaccctgaagaagctgaagcagggcaagtctgtgaaggtgcccatctatgacttcaccacccacagcaggaagaaggactggaagaccctgtatggagccaacgtcatcatctttgagggcatcatggcctttgctgacaagaccctgctggagctgctggacatgaagatctttgtggacacagacagcgacatccggctggtgcggcggctgcggcgggacatcagcgagcggggccgggacattgaaggagtcatcaagcagtacaacaagtttgtgaagcccagctttgaccagtacatccagcccaccatgaggctggccgacatcgtggtgccccggggcagcggcaacacagtggccatcgacctgattgtgcagcacgtgcacagccagctggaggagctgcgctttgtgcccagggctgccctggccagcgcccaccagtgccaccccctgcccaggaccctgtctgtgctgaagagcaccccccaggtgcggggcatgcacaccatcatccgggacaaggagaccagcagagatgagttcatcttctacagcaagaggctgatgaggctgctgattgagcacgccctgtccttcctgcccttccaggactgtgtggtgcagaccccccagggccaggactatgctggaaaatgttatgctgggaagcagatcactggagtgtccatcctgcgggccggggagaccatggagcccgccctgcgggctgtgtgcaaggatgtgagaattggcaccatcctgatccagaccaaccagctgaccggggagcctgagctgcactacctgcggctgcccaaggacatcagtgatgaccacgtgatcctgatggactgcaccgtgtccactggagctgctgccatgatggctgtgcgggtgctgctggaccatgatgtgcctgaggacaagatcttcctgctgagcctgctgatggccgagatgggcgtgcacagcgtggcctatgccttcccccgggtgcgcatcatcaccacagctgtggacaagagggtgaatgacctcttccgcatcatccctggcatcggcaactttggagaccgctacttcggcacagatgctgtgcctgatggcagtgatgaggaggaggtggcctacacaggatag

SEQ ID NO: 175562 - DNA, 1602 bp, synthetic construct
  misc_feature 1..1602: note = Description of Artificial Sequence: Synthetic coding sequence
  source 1..1602: mol_type = other DNA
atgagcagccccccagcctacccaggcatccgcatcagcggctgccgggccctgggcgctgagggcagcagcaatgctgagagcctggaccggctgctgccccctgtgggcaccggccgcagccccaggaagaggaccaccagccagtgcaagtctgagccccccctgctgcggaccagcaagaggaccatctacacagctggccggcccccctggtacaatgagcacggcacccagagcaaggaggcctttgccatcggcctgggcggcggcagcgccagcggcaagaccaccgtggccaggatgatcatcgaggccctggatgtgccctgggtggtgctgctgtccatggacagcttctacaaggtgctgacagagcagcagcaggagcaggccgcccacaacaacttcaactttgaccacccagatgcctttgattttgacctgatcatcagcaccctgaagaagctgaagcagggcaagtctgtgaaggtgcccatctatgacttcaccacccacagcaggaagaaggactggaagaccctgtatggagccaacgtcatcatctttgagggcatcatggcctttgctgacaagaccctgctggagctgctggacatgaagatctttgtggacacagacagcgacatccggctggtgcggcggctgcggcgggacatcagcgagcggggccgggacatcgagggcgtcatcaagcagtacaacaagtttgtgaagcccagctttgaccagtacatccagcccaccatgaggctggccgacatcgtggtgccccggggcagcggcaacacagtggccatcgacctgattgtgcagcacgtgcacagccagctggaggagcgggagctgtctgtgcgggccgccctggccagcgcccaccagtgccaccccctgcccaggaccctgtctgtgctgaagagcaccccccaggtgcggggcatgcacaccatcatccgggacaaggagaccagcagagatgagttcatcttctacagcaagaggctgatgaggctgctgattgaacatgccctgtccttcctgcccttccaggactgtgtggtgcagaccccccagggccaggactatgctgggaagtgctacgccggcaagcagatcaccggggtgtccatcctgcgggccggggagaccatggagcccgccctgcgggctgtgtgcaaggatgtgcgcatcggcaccatcctgatccagaccaaccagctgactggagagcctgagctgcactacctgcggctgcccaaggacatcagtgatgaccacgtgatcctgatggactgcaccgtgtccactggagctgctgccatgatggctgtgcgggtgctgctggaccatgatgtgcctgaggacaagatcttcctgctgagcctgctgatggccgagatgggcgtgcacagcgtggcctatgccttcccccgggtgcgcatcatcaccacagctgtggacaagagggtgaatgacctcttccgcatcatccctggcatcggcaactttggagaccgctactttggaacagatgctgtgcctgatggcagtgatgaggaggaggtggcctacacaggatag

SEQ ID NO: 175563 - DNA, 261 bp, synthetic construct
  misc_feature 1..261: note = Description of Artificial Sequence: Synthetic coding sequence
  source 1..261: mol_type = other DNA
atgagcagccccccagcctacccaggcatccgcatcagcggctgccgggccctgggcgctgagggcagcagcaatgctgagagcctggaccggctgctgccccctgtgggcaccggccgcagccccaggaagaggaccaccagccagtgcaagtctgagccccccctgctgcggaccagcaagaggaccatctacacagctggccggcccccctggtacaatgagcacggcacccagagcaaggaggcctttgccatctag

SEQ ID NO: 175564 - DNA, 408 bp, synthetic construct
  misc_feature 1..408: note = Description of Artificial Sequence: Synthetic coding sequence
  source 1..408: mol_type = other DNA
atgcacaccatcatccgggacaaggagaccagcagagatgagttcatcttctacagcaagaggctgatgaggctgctgattgaacatgccctgtccttcctgcccttccaggactgtgtggtgcagaccccccagggccaggactatgctgggaagtgctacgccggcaagcagatcaccggggtgtccatcctgcgggccggggagaccatggagcccgccctgcgggctgtgtgcaaggatgtgcgcatcggcaccatcctgatccagaccaaccagctgactggagagcctgagctgcactacctgcggctgcccaaggacatcagtgatgaccacgtgatcctgatggactgcaccgtgtccactggagctgctgccatgatggctgtgcgggtgctgctgtag

SEQ ID NO: 175565 - DNA, 786 bp, synthetic construct
  misc_feature 1..786: note = Description of Artificial Sequence: Synthetic coding sequence
  source 1..786: mol_type = other DNA
atggccggggacagcgagcagaccctgcagaaccaccagcagcccaacggcggggagcccttcctgattggagtgtctgggggcacagccagcggcaagagctctgtgtgtgccaagatcgtgcagctgctgggccagaatgaggtggactaccggcagaagcaggtggtgatcctgagccaggacagcttctacagagtgctgaccagcgagcagaaggccaaggccctgaagggccagttcaactttgaccacccagatgcctttgacaatgaactcatcctgaagaccctgaaggagatcacagagggcaagacagtgcagatccctgtgtatgactttgtgagccacagcaggaaggaggagaccgtgacagtgtacccagcagatgtggtgctgtttgagggcatcctggccttctacagccaggaggtgcgggacctcttccagatgaagctgtttgtggacacagatgctgacacccggctgagcagaagagtgctgcgggacatcagcgagcggggccgggacctggagcagatcctgagccagtacatcacctttgtgaagccagcctttgaggagttctgcctgcccaccaagaagtatgcagatgtgatcatccccagaggagctgacaacctggtggccatcaacctgattgtgcagcacatccaggacatcctgaatggaggccccagcaagaggcagaccaacggctgcctgaatggctacacccccagcaggaagaggcaggccagcgagagcagcagccggccccactag

SEQ ID NO: 175566 - DNA, 393 bp, synthetic construct
  misc_feature 1..393: note = Description of Artificial Sequence: Synthetic coding sequence
  source 1..393: mol_type = other DNA
atggccggggacagcgagcagaccctgcagaaccaccagcagcccaacggcggggagcccttcctgattggagtgtctgggggcacagccagcggcaagagctctgtgtgtgccaagatcgtgcagctgctgggccagaatgaggtggactaccggcagaagcaggtggtgatcctgagccaggacagcttctacagagtgctgaccagcgagcagaaggccaaggccctgaagggccagttcaactttgaccacccagatgcctttgacaatgaactcatcctgaagaccctgaaggagatcacagagggcaagacagtgcagatccctgtgtatgactttgtgagccacagccgcatcaagggccaccagcgggagcggcagggcagctag

SEQ ID NO: 175567 - DNA, 2031 bp, synthetic construct
  misc_feature 1..2031: note = Description of Artificial Sequence: Synthetic coding sequence
  source 1..2031: mol_type = other DNA
atgagcagcctgcaggccctgtgcagcggcctgcccctgcggcccctgcctgagaacagaggccggcaggccggcgtgccccacgcccctgtgaggacccccagcctgagccctgtggagaagcagctggccctgagaaatgccctgcgctacttccccccagatgtgcaggagctgctggcccctgagtttgcccaggagctgcagctgtatggccacatctacatgtaccgcttctgcccagacatcgagatgagggcctaccccatcgagcagtacccctgccagaccaaggtggccgccgccatcatgcacatgatcatgaacaacctggaccctgctgtggcccagttcccccaggagctggtgacctatggaggaaatggccaggtgttcagcaactgggcccagttctggctgaccatgttctacctgagcaagatgacagaggagcagaccctggtgatgtacagcggccaccccctgggcctcttccccagcagccgcagcgccccccggctggtgatcaccaacggcatggtgatccccaactacagcagcaggacagaatatgagaagctgtttgccctgggcgtgaccatgtatggccagatgacagctggcagctactgctacatcggcccccagggcatcgtgcacggcaccgtgctgactgtgctgaatgctgcccggcgctacctgggcatcgaggacctggccggcaaggtgtttgtgaccagcggcctgggcggcatgtctggggcccaggccaaggccgccgtcatcgtgggctgcatcggcgtgattgctgaggtggacaaggccgccctggagaagaggcaccggcagggctggctgatggaggtgacagacagcctggaccgctgcatccagaggctgcgggaggccaggaagaagaaggaggtgctgagcctgggctaccatggaaatgtggtggccctgtgggagcggctggtgcatgagctggacaccaccggggagtgcctggtggacctgggcagtgaccagaccagctgccacaaccccttcaatggaggctactaccctgtgcagctgtccttcacagaggcccagagcctgatggccagcaacccagctgtgttcaaggacctggtgcaggagagcctgcggcggcaggtgtctgccatcaaccggctggccgaggagaagttcttcttctgggactatggaaatgccttcctgctggaggcccagagagctggagcagatgtggagaagaagggagctggccgcacagagttccgctaccccagctatgtgcagcacatcatgggagacatcttcagccagggcttcggccccttccgctgggtgtgcaccagcggggacccccaggacctggccgtgacagatgagctggccacctctgtgctggaggaggccatcgcagatggagtgaaggtgtctgtgaagctgcagtacatggacaacatccgctggatccgggaggccgcccggcaccggctggtggtgggcagccaggcccgcatcctgtacagcgaccagaagggccgggtggccatcgctgtggccatcaaccaggccatcgcctgccgccgcatcaaggcccctgtggtgctgagccgggaccaccatgatgtgtctggaacagacagccccttccgggagaccagcaacatctatgatggcagcgccttctgtgccgacatggctgtgcagaactttgtgggagatgcctgccgcggggccacctgggtggccctgcacaatggaggcggcgtgggctggggcgaggtgatcaatggaggcttcggcctggtgctggatggcaccccagaggccgagggccgggcccggctgatgctgtcctgggatgtgtccaatggagtggcccggcgctgctggagcggcaaccagaaggcctatgagatcatctgccagaccatgcaggagaacagcaccctggtggtgaccctgccccacaaggtggaggatgagcgggtgctgcagcaggccctgcagctgtag

SEQ ID NO: 175568 - DNA, 2211 bp, synthetic construct
  misc_feature 1..2211: note = Description of Artificial Sequence: Synthetic coding sequence
  source 1..2211: mol_type = other DNA
atgagcagcctgcaggccctgtgcagcggcctgcccctgcggcccctgcctgagaacagaggccggcaggccggcgtgccccacgcccctgtgaggacccccagcctgagccctgtggagaagcagctggccctgagaaatgccctgcgctacttccccccagatgtgcaggagctgctggcccctgagtttgcccaggagctgcagctgtatggccacatctacatgtaccgcttctgcccagacatcgagatgagggcctaccccatcgagcagtacccctgccagaccaaggtggccgccgccatcatgcacatgatcatgaacaacctggaccctgctgtggcccagttcccccaggagctggtgacctatggaggaaatggccaggtgttcagcaactgggcccagttctggctgaccatgttctacctgagcaagatgacagaggagcagaccctggtgatgtacagcggccaccccctgggcctcttccccagcagccgcagcgccccccggctggtgatcaccaacggcatggtgatccccaactacagcagcaggacagaatatgagaagctgtttgccctgggcgtgaccatgtatggccagatgacagctggcagctactgctacatcggcccccagggcatcgtgcacggcaccgtgctgactgtgctgaatgctgcccggcgctacctgggcatcgaggacctggccggcaaggtgtttgtgaccagcggcctgggcggcatgtctggggcccaggccaaggccgccgtcatcgtgggctgcatcggcgtgattgctgaggtggacaaggccgccctggagaagaggcaccggcagggctggctgatggaggtgacagacagcctggaccgctgcatccagaggctgcgggtgctgcagctgggcctgcagcaggccctgggctgggccggcctgcctgctgccctgggcctgtgtgtgctgagctgctttgtgaacctggcccccctgggggagggccgctgcctggcccccagcggcttcagccggcccctgctgggcgcccctgtgctgctgctgtgccccagccgggaggccaggaagaagaaggaggtgctgagcctgggctaccatggaaatgtggtggccctgtgggagcggctggtgcatgagctggacaccaccggggagtgcctggtggacctgggcagtgaccagaccagctgccacaaccccttcaatggaggctactaccctgtgcagctgtccttcacagaggcccagagcctgatggccagcaacccagctgtgttcaaggacctggtgcaggagagcctgcggcggcaggtgtctgccatcaaccggctggccgaggagaagttcttcttctgggactatggaaatgccttcctgctggaggcccagagagctggagcagatgtggagaagaagggagctggccgcacagagttccgctaccccagctatgtgcagcacatcatgggagacatcttcagccagggcttcggccccttccgctgggtgtgcaccagcggggacccccaggacctggccgtgacagatgagctggccacctctgtgctggaggaggccatcgcagatggagtgaaggtgtctgtgaagctgcagtacatggacaacatccgctggatccgggaggccgcccggcaccggctggtggtgggcagccaggcccgcatcctgtacagcgaccagaagggccgggtggccatcgctgtggccatcaaccaggccatcgcctgccgccgcatcaaggcccctgtggtgctgagccgggaccaccatgatgtgtctggaacagacagccccttccgggagaccagcaacatctatgatggcagcgccttctgtgccgacatggctgtgcagaactttgtgggagatgcctgccgcggggccacctgggtggccctgcacaatggaggcggcgtgggctggggcgaggtgatcaatggaggcttcggcctggtgctggatggcaccccagaggccgagggccgggcccggctgatgctgtcctgggatgtgtccaatggagtggcccggcgctgctggagcggcaaccagaaggcctatgagatcatctgccagaccatgcaggagaacagcaccctggtggtgaccctgccccacaaggtggaggatgagcgggtgctgcagcaggccctgcagctgtag

SEQ ID NO: 175569 - DNA, 375 bp, synthetic construct
  misc_feature 1..375: note = Description of Artificial Sequence: Synthetic coding sequence
  source 1..375: mol_type = other DNA
atgaggcaggccggccgggccgccctgctggccgccctgctgctgctggtgcagctgtgccccggcagcagccagaggagccctgaggccgccggcgtgcaggaccccagcctgcgctggagccctggggccaggaaccagggcggcggggcccgggccctgctgctgctgctggccgagcgcttcccccggcgggccggccctggccgcctgggcctgggcacagctggggagcggccccggcgggacaaccccagcctgagcattgacctgaccttccacctgctgcggaccctgctggagctggcccggacccagagccagcgggagcgggcagagcagaaccgcatcatctttgattctgtgggcaagtag

SEQ ID NO: 175570 - DNA, 339 bp, synthetic construct
  misc_feature 1..339: note = Description of Artificial Sequence: Synthetic coding sequence
  source 1..339: mol_type = other DNA
atgacccgctgtgccctgctgctgctgatggtgctgatgctgggccgggtgctggtggtgcctgtgacccccatccccaccttccagctgcggccccagaacagcccccagaccacccccaggcctgctgccagcgagagccccagcgctgcccccacctggccctgggccgcccagagccactgcagccccaccaggcaccctggcagccgcatcgtgctgagcctggatgtgcccatcggcctgctgcagatcctgctggagcaggcccgggcccgggccgcccgggagcaggccaccaccaatgcccgcatcctggcccgggtgggccactgctag

SEQ ID NO: 175571 - DNA, 1923 bp, synthetic construct
  misc_feature 1..1923: note = Description of Artificial Sequence: Synthetic coding sequence
  source 1..1923: mol_type = other DNA
atgggccagcccagcctgacctggatgctgatggtggtggtggcctcctggttcatcaccacagctgccacagacaccagcgaggcccgctggtgcagcgagtgccacagcaatgccacctgcacagaagatgaggccgtgaccacctgcacctgccaggagggcttcaccggagatggcctgacctgtgtggacctggatgaatgtgccatccctggggcccacaactgcagcgccaacagcagctgtgtgaacaccccaggcagcttcagctgtgtgtgcccagagggcttccggctgagccctggcctgggctgcacagatgtggatgaatgtgccgagcccggcctgagccactgccacgccctggccacctgtgtgaatgtggtgggcagctacctgtgtgtgtgcccagctggctacagaggagatggctggcactgtgaatgttctcctggcagctgtggccctggcctggactgtgtgcctgaaggagatgccctggtgtgtgccgacccctgccaggcccacaggaccctggatgagtactggaggagcacagaatatggagagggctacgcctgtgacacagacctgcggggctggtacagatttgtgggccagggcggggccaggatggccgagacctgtgtgcctgtgctgcgctgcaacacagctgcccccatgtggctgaatggcacccaccccagcagtgatgagggcatcgtgtccaggaaggcctgtgcccactggagcggccactgctgcctgtgggatgcctctgtgcaggtgaaggcctgtgccggcggctactacgtgtacaacctgacagcccccccagagtgccacctggcctactgcacagaccccagctctgtggagggcacctgtgaagaatgttccattgatgaggactgcaagagcaacaacggccgctggcactgccagtgcaagcaggacttcaacatcacagacatcagcctgctggagcaccggctggagtgtggggccaatgacatgaaggtgtccctgggcaagtgccagctgaagagcctgggctttgacaaggtgttcatgtacctgagtgacagccgctgcagcggcttcaatgaccgggacaacagagactgggtgtctgtggtgaccccagccagagatggcccctgtggcaccgtgctgaccagaaatgagacccacgccacctacagcaacaccctgtacctggctgatgagatcatcatccgggacctgaacatcaagatcaactttgcctgcagctaccccctggacatgaaggtgtccctgaagacagccctgcagcccatggtgtctgccctgaacatccgggtgggcggcaccggcatgttcaccgtgaggatggccctcttccagacccccagctacacccagccctaccagggcagctctgtgaccctgagcacagaggccttcctgtatgtgggcaccatgctggatggaggagacctgagcagatttgccctgctgatgaccaactgctacgccacccccagcagcaatgccacagaccccctgaagtacttcatcatccaggaccgctgcccccacacccgggacagcaccatccaggtggtggagaatggagagagcagccagggccgcttctctgtgcagatgttccgctttgctggcaactatgacctggtgtacctgcactgtgaggtgtacctgtgtgacaccatgaatgagaagtgcaagcccacctgcagcggcacccgcttccgcagcggctctgtgattgaccagagccgggtgctgaacctgggccccatcaccaggaaaggagtgcaggccaccgtgtcccgggccttcagcagcctgggcctgctgaaggtgtggctgcccctgctgctgagcgccaccctgaccctgaccttccagtag

SEQ ID NO: 175572 - DNA, 2022 bp, synthetic construct
  misc_feature 1..2022: note = Description of Artificial Sequence: Synthetic coding sequence
  source 1..2022: mol_type = other DNA
atgggccagcccagcctgacctggatgctgatggtggtggtggcctcctggttcatcaccacagctgccacagacaccagcgaggcccggaccaagtacaactgcccagcccgctggagctggaggaccccccagagaggaggagacacagagcagggcccagatgaggacttcaccagccagggccgctggtgcagcgagtgccacagcaatgccacctgcacagaagatgaagctgtgaccacctgcacctgccaggagggcttcaccggagatggcctgacctgtgtggacctggatgaatgtgccatccctggggcccacaactgcagcgccaacagcagctgtgtgaacaccccaggcagcttcagctgtgtgtgcccagagggcttccggctgagccctggcctgggctgcacagatgtggatgaatgtgccgagcccggcctgagccactgccacgccctggccacctgtgtgaatgtggtgggcagctacctgtgtgtgtgcccagctggctacagaggagatggctggcactgtgagtgcagccctggcagctgtggccctggcctggactgtgtgcctgaaggagatgccctggtgtgtgccgacccctgccaggcccacaggaccctggatgagtactggaggagcacagaatatggagagggctacgcctgtgacacagacctgcggggctggtacagatttgtgggccagggcggggccaggatggccgagacctgtgtgcctgtgctgcgctgcaacacagctgcccccatgtggctgaatggcacccaccccagcagtgatgagggcatcgtgtccaggaaggcctgtgcccactggagcggccactgctgcctgtgggatgcctctgtgcaggtgaaggcctgtgccggcggctactacgtgtacaacctgacagcccctcctgagtgccacctggcctactgcacagaccccagctctgtggagggcacctgtgaggagtgcagcattgatgaggactgcaagagcaacaacggccgctggcactgccagtgcaagcaggacttcaacatcacagacatcagcctgctggagcaccggctggagtgtggggccaatgacatgaaggtgtccctgggcaagtgccagctgaagagcctgggctttgacaaggtgttcatgtacctgagtgacagccgctgcagcggcttcaatgaccgggacaacagagactgggtgtctgtggtgaccccagccagagatggcccctgtggcaccgtgctgaccagaaatgagacccacgccacctacagcaacaccctgtacctggctgatgagatcatcatccgggacctgaacatcaagatcaactttgcctgcagctaccccctggacatgaaggtgtccctgaagacagccctgcagcccatggtgtctgccctgaacatccgggtgggcggcaccggcatgttcaccgtgaggatggccctcttccagacccccagctacacccagccctaccagggcagctctgtgaccctgagcacagaggccttcctgtatgtgggcaccatgctggatggaggagacctgagcagatttgccctgctgatgaccaactgctacgccacccccagcagcaatgccacagaccccctgaagtacttcatcatccaggaccgctgcccccacacccgggacagcaccatccaggtggtggagaatggagagagcagccagggccgcttctctgtgcagatgttccgctttgctggcaactatgacctggtgtacctgcactgtgaggtgtacctgtgtgacaccatgaatgagaagtgcaagcccacctgcagcggcacccgcttccgcagcggcagcgtcatcgaccagagccgggtgctgaacctgggccccatcaccaggaagggcgtgcaggccaccgtgtcccgggccttcagcagcctgggcctgctgaaggtgtggctgcccctgctgctgagcgccaccctgaccctgaccttccagtag

SEQ ID NO: 175573 - DNA, 1923 bp, synthetic construct; identical to SEQ ID NO: 175571
  misc_feature 1..1923: note = Description of Artificial Sequence: Synthetic coding sequence
  source 1..1923: mol_type = other DNA

SEQ ID NO: 175574 - DNA, 1923 bp, synthetic construct; identical to SEQ ID NO: 175571
  misc_feature 1..1923: note = Description of Artificial Sequence: Synthetic coding sequence
  source 1..1923: mol_type = other DNA

SEQ ID NO: 175575 - DNA, 2022 bp, synthetic construct; identical to SEQ ID NO: 175572
  misc_feature 1..2022: note = Description of Artificial Sequence: Synthetic coding sequence
  source 1..2022: mol_type = other DNA

SEQ ID NO: 175576 - DNA, 1857 bp, synthetic construct
  misc_feature 1..1857: note = Description of Artificial Sequence: Synthetic coding sequence
  source 1..1857: mol_type = other DNA
atgggccagcccagcctgacctggatgctgatggtggtggtggcctcctggttcatcaccacagctgccacagacaccagcgaggcccgctggtgcagcgagtgccacagcaatgccacctgcacagaagatgaggccgtgaccacctgcacctgccaggagggcttcaccggagatggcctgacctgtgtggacctggatgaatgtgccatccctggggcccacaactgcagcgccaacagcagctgtgtgaacaccccaggcagcttcagctgtgtgtgcccagagggcttccggctgagccctggcctgggctgcacagatgtggatgaatgtgccgagcccggcctgagccactgccacgccctggccacctgtgtgaatgtggtgggcagctgtggccctggcctggactgtgtgcctgaaggagatgccctggtgtgtgccgacccctgccaggcccacaggaccctggatgagtactggaggagcacagaatatggagagggctacgcctgtgacacagacctgcggggctggtacagatttgtgggccagggcggggccaggatggccgagacctgtgtgcctgtgctgcgctgcaacacagctgcccccatgtggctgaatggcacccaccccagcagtgatgagggcatcgtgtccaggaaggcctgtgcccactggagcggccactgctgcctgtgggatgcctctgtgcaggtgaaggcctgtgccggcggctactacgtgtacaacctgacagcccccccagagtgccacctggcctactgcacagaccccagctctgtggagggcacctgtgaagaatgttccattgatgaggactgcaagagcaacaacggccgctggcactgccagtgcaagcaggacttcaacatcacagacatcagcctgctggagcaccggctggagtgtggggccaatgacatgaaggtgtccctgggcaagtgccagctgaagagcctgggctttgacaaggtgttcatgtacctgagtgacagccgctgcagcggcttcaatgaccgggacaacagagactgggtgtctgtggtgaccccagccagagatggcccctgtggcaccgtgctgaccagaaatgagacccacgccacctacagcaacaccctgtacctggctgatgagatcatcatccgggacctgaacatcaagatcaactttgcctgcagctaccccctggacatgaaggtgtccctgaagacagccctgcagcccatggtgtctgccctgaacatccgggtgggcggcaccggcatgttcaccgtgaggatggccctcttccagacccccagctacacccagccctaccagggcagctctgtgaccctgagcacagaggccttcctgtatgtgggcaccatgctggatggaggagacctgagcagatttgccctgctgatgaccaactgctacgccacccccagcagcaatgccacagaccccctgaagtacttcatcatccaggaccgctgcccccacacccgggacagcaccatccaggtggtggagaatggagagagcagccagggccgcttctctgtgcagatgttccgctttgctggcaactatgacctggtgtacctgcactgtgaggtgtacctgtgtgacaccatgaatgagaagtgcaagcccacctgcagcggcacccgcttccgcagcggctctgtgattgaccagagccgggtgctgaacctgggccccatcaccaggaaaggagtgcaggccaccgtgtcccgggccttcagcagcctgggcctgctgaaggtgtggctgcccctgctgctgagcgccaccctgaccctgaccttccagtag

SEQ ID NO: 175577 - DNA, 759 bp, synthetic construct
  misc_feature 1..759: note = Description of Artificial Sequence: Synthetic coding sequence
  source 1..759: mol_type = other DNA
atggccccagccccccaggcccctgagcgggaccctgtgggctcctggtacaacgtgaccatcctggtgaagatggacttcaaggagctgcagcaggtggacccccggctgctgaaccacatgaggctgctgcacagcctggtgaccagcgccctgcagcccatggccagcacagtgcaccacctgcacagcgcccctggaaatgccagcaccaccgtgtcccggctgctgctgggcctgccccggcccctgcctgtggctgatgtgtccaccctgctgggggacatcgccaagagggtgtatgaagtcatctctgtgcaggtgcaggatgtgaatgaatgcttctatgaggagctgaatgcctgcagcggccgggagctgtgtgccaacctggagggcagctactggtgtgtgtgccaccaggaggccccagccaccagccccaggaagctgaacctggagtgggaggactgcccccctgtgtctgactatgtggtgctgaatgtgaccagtgacagcttccaggtgtcctggaggctgaacagcacccagaaccacaccttccacgtgcgggtgtaccggggcatggagctgctgcggagcgcccggacccagagccaggccctggccgtggccggcctggaggccggcgtgctgtacagagtgaagaccagctaccagggctgtggggctgatgtgtccaccaccctgaccatcaagaccaagtatgtgctggagaagctggacttccagagctag

SEQ ID NO: 175578 - DNA, 555 bp, synthetic construct
  misc_feature 1..555: note = Description of Artificial Sequence: Synthetic coding sequence
  source 1..555: mol_type = other DNA
atggccccagccccccaggcccctgagcgggaccctgtgggctcctggtacaacgtgaccatcctggtgaagatggacttcaaggagctgcagcaggtggacccccggctgctgaaccacatgaggctgctgcacagcctggtgaccagcgccctgcagcccatggccagcacagtgcaccacctgcacagcgcccctggaaatgccagcaccaccgtgtcccggctgctgctgggcctgccccggcccctgcctgtggctgatgtgtccaccctgctgggggacatcgccaagagggtgtatgaagtcatctctgtgcaggtgcaggatgtgaatgaatgcttctatgaggagctgaatgcctgcagcggccgggagctgtgtgccaacctggagggcagctactggtgtgtgtgccaccaggaggccccagccaccagccccaggaagctgaacctggagtgggaggcccggggcctggagatccacctggagctgcgggccaccagcaccagccacggcacccccctgagcagcgctgagaactgcctgtag

SEQ ID NO: 175579 - DNA, 3741 bp, synthetic construct
  misc_feature 1..3741: note = Description of Artificial Sequence: Synthetic coding sequence
  source 1..3741: mol_type = other DNA
atggtgtaccgcacccagtacctggtggtggaggtgcctgagagcagaaatgtgacagactgctgtgagggctatgagcagctgggcctgtactgtgtgctgcccctgaaccagagcggccagttcaccagcaggcctggggcctgcccagctgagggccctgagcccagcaccagcccctgcagcctggacatcgactgccccggcctggagaagtgctgcccctggagcggcggccgctactgcatggccccagccccccaggcccctgagcgggaccctgtgggctcctggtacaacgtgaccatcctggtgaagatggacttcaaggagctgcagcaggtggacccccggctgctgaaccacatgaggctgctgcacagcctggtgaccagcgccctgcagcccatggccagcacagtgcaccacctgcacagcgcccctggaaatgccagcaccaccgtgtcccggctgctgctgggcctgccccggcccctgcctgtggctgatgtgtccaccctgctgggggacatcgccaagagggtgtatgaagtcatctctgtgcaggtgcaggatgtgaatgaatgcttctatgaggagctgaatgcctgcagcggccgggagctgtgtgccaacctggagggcagctactggtgtgtgtgccaccaggaggccccagccaccagccccaggaagctgaacctggagtgggaggactgcccccctgtgtctgactatgtggtgctgaatgtgaccagtgacagcttccaggtgtcctggaggctgaacagcacccagaaccacaccttccacgtgcgggtgtaccggggcatggagctgctgcggagcgcccggacccagagccaggccctggccgtggccggcctggaggccggcgtgctgtacagagtgaagaccagctaccagggctgtggggctgatgtgtccaccaccctgaccatcaagaccaatgcccaggtgtttgaggtgaccatcaagatcgtgaaccacaacctgacagagaagctgctgaacagaagctctgtggagtaccaggacttcagccggcagctgctgcacgaggtggagagcagcttcccccctgtggtgtctgacctgtaccgcagcggcaagctgaggatgcagatcgtgtccctgcaggccggctctgtggtggtgcggctgaagctgactgtgcaggaccccggcttccccatgggcatcagcaccctggcccccatcctgcagcccctgctggccagcaccgtcttccagattgaccggcagggcaccagggtgcaggactgggatgaatgtgtggacagcgctgagcatgactgcagccctgctgcctggtgcatcaacctggagggcagctacacctgccagtgcaggaccaccagagatgccacccccagcagagctggccgggcctgtgagggggacctggtgagccccatgggcggcggcctgtctgctgccactggagtgacagtgcccggcctgggcaccggcacagctgccctgggcctggagaacttcaccctgagccccagccctggctacccccagggcaccccagctgctggccaggcctggaccccagagcccagcccccggcggggcggcagcaatgtggtgggctatgacaggaacaacacaggcaagggcgtggagcaggagctgcagggcaacagcatcatggagccccccagctggcccagccccacagaggaccccaccggccacttcctgtggcacgccaccaggagcacccgggagaccctgctgaaccccacctggctgagaaatgaagattctggccccagcggctctgtggacctgcccctgaccagcaccctgacagccctgaagaccccagcctgtgtgcctgtgtccatcggccgcatcatggtgtccaatgtgaccagcacaggcttccacctggcctgggaggccgacctggccatggacagcaccttccagctgaccctgacctccatgtggagccctgctgtggtgctggagacctggaacacctctgtgaccctgagcggcctggagcccggggtgctgcacctggtggagatcatggccaaggcctgtgggaaggagggcgcccgggcccacctgaaggtgaggacagctgccaggaagctgattggcaaggtgcgcatcaagaatgtgcgctacagcgagagcttcagaaatgccagcagccaggagtacagagacttcctggagctgttcttcaggatggtgcggggcagcctgcctgccaccatgtgccagcacatggatgctgggggcgtgaggatggaggtggtgtctgtgaccaacggcagcatcgtggtggagttccacctgctgatcatcgcagatgtggatgtgcaggaggtgtctgctgccttcctgacagccttccagacagtgcccctgctggaggtgatccggggggacaccttcatccaggactatgatgaatgtgagaggaaagaagatgactgtgtgcccggcaccagctgcaggaacaccctgggcagcttcacctgcagctgtgagggcggggccccagacttccctgtggagtacagcgagcggccctgtgagggggacagccctggaaatgagacctgggccaccagccctgagcggcccctgaccacagctggcaccaaggccgcctttgtgcagggcaccagccccaccccccagggcctgccccagaggctgaacctgaccggggctgtgcgggtgctgtgtgaaattgagaaggtggtggtggccatccagaagcgcttcctgcagcaggagagcatccctgagagcagcctgtacctgagccaccccagctgcaatgtgagccacagcaatggcacccacgtgctgctggaggccggctggagcgaatgtggcaccctgatgcagagcaacatgaccaacacagtggtgaggaccaccctgagaaatgacctgagccaggagggcatcatccaccacctgaagatcctgagccccatctactgtgccttccagaatgacctgctgaccagcagcggcttcaccctggagtggggcgtgtacaccatcatcgaggacctgcatggagctggcaactttgtgacagagatgcagctgttcatcggggacagccccatcccccagaactacagcgtgtctgccagtgatgatgtgagaattgaggtgggcctgtaccggcagaagagcaacctgaaggtggtgctgacagagtgctgggccacccccagcagcaatgcccgggaccccatcaccttctccttcatcaacaacagctgccctgtgcccaacacctacaccaacgtgattgaaaatggaaacagcaacaaggcccagttcaagctgcgcatcttctccttcatcaatgacagcatcgtgtacctgcactgcaagctgcgggtgtgcatggagagccctggggccacctgcaagatcaactgcaacaacttccggctgctgcagaacagcgagaccagcgccacccaccagatgtcctggggccccctcatccgctctgagggggagccccctcatgctgaggccggcctgggcgccggctacgtggtgctgattgtggtggccatctttgtgctggtggccggcacagccaccctgctgattgtgcgctaccagaggatgaatggccgctacaacttcaagatccagagcaacaacttctcctaccaggtgttctatgaatag

SEQ ID NO: 175580 - DNA, 4125 bp, synthetic construct
  misc_feature 1..4125: note = Description of Artificial Sequence: Synthetic coding sequence
  source 1..4125: mol_type = other DNA
atggtgtaccgcacccagtacctggtggtggaggtgcctgagagcagaaatgtgacagactgctgtgagggctatgagcagctgggcctgtactgtgtgctgcccctgaaccagagcggccagttcaccagcaggcctggggcctgcccagctgagggccctgagcccagcaccagcccctgcagcctggacatcgactgccccggcctggagaagtgctgcccctggagcggcggccgctactgcatggccccagccccccaggcccctgagcgggaccctgtgggctcctggtacaacgtgaccatcctggtgaagatggacttcaaggagctgcagcaggtggacccccggctgctgaaccacatgaggctgctgcacagcctggtgaccagcgccctgcagcccatggccagcacagtgcaccacctgcacagcgcccctggaaatgccagcaccaccgtgtcccggctgctgctgggcctgccccggcccctgcctgtggctgatgtgtccaccctgctgggggacatcgccaagagggtgtatgaagtcatctctgtgcaggtgcaggatgtgaatgaatgcttctatgaggagctgaatgcctgcagcggccgggagctgtgtgccaacctggagggcagctactggtgtgtgtgccaccaggaggccccagccaccagccccaggaagctgaacctggagtgggaggactgcccccctgtgtctgactatgtggtgctgaatgtgaccagtgacagcttccaggtgtcctggaggctgaacagcacccagaaccacaccttccacgtgcgggtgtaccggggcatggagctgctgcggagcgcccggacccagagccaggccctggccgtggccggcctggaggccggcgtgctgtacagagtgaagaccagctaccagggctgtggggctgatgtgtccaccaccctgaccatcaagaccaatgcccaggtgtttgaggtgaccatcaagatcgtgaaccacaacctgacagagaagctgctgaacagaagctctgtggagtaccaggacttcagccggcagctgctgcacgaggtggagagcagcttcccccctgtggtgtctgacctgtaccgcagcggcaagctgaggatgcagatcgtgtccctgcaggccggctctgtggtggtgcggctgaagctgactgtgcaggaccccggcttccccatgggcatcagcaccctggcccccatcctgcagcccctgctggccagcaccgtcttccagattgaccggcagggcaccagggtgcaggactgggatgaatgtgtggacagcgctgagcatgactgcagccctgctgcctggtgcatcaacctggagggcagctacacctgccagtgcaggaccaccagagatgccacccccagcagagctggccgggcctgtgagggggacctggtgagccccatgggcggcggcctgtctgctgccactggagtgacagtgcccggcctgggcaccggcacagctgccctgggcctggagaacttcaccctgagccccagccctggctacccccagggcaccccagctgctggccaggcctggaccccagagcccagcccccggcggggcggcagcaatgtggtgggctatgacaggaacaacacaggcaagggcgtggagcaggaggtgcccagcacagcccctggcctgggcatggaccagggcagccccagccaggtgaaccccagccagggcagccccagccagggcagcctgcggcaggagagcaccagccaggccagccccagccagaggagcaccagccagggcagccccagccaggtgaaccccagccagaggagcaccagccacgccaacagcagccagggcagccccagccagggcagccccagccaggagagccccagccagggcagcaccagccaggccagccccagccacaggaacaccatcggggtcatcggcaccaccagcagccccaaggccaccggcagcacccacagcttccccccaggggccacagatggccccctggccctgcccggccagctgcagggcaacagcatcatggagccccccagctggcccagccccacagaggaccccaccggccacttcctgtggcacgccaccaggagcacccgggagaccctgctgaaccccacctggctgagaaatgaagattctggccccagcggctctgtggacctgcccctgaccagcaccctgacagccctgaagaccccagcctgtgtgcctgtgtccatcggccgcatcatggtgtccaatgtgaccagcacaggcttccacctggcctgggaggccgacctggccatggacagcaccttccagctgaccctgacctccatgtggagccctgctgtggtgctggagacctggaacacctctgtgaccctgagcggcctggagcccggggtgctgcacctggtggagatcatggccaaggcctgtgggaaggagggcgcccgggcccacctgaaggtgaggacagctgccaggaagctgattggcaaggtgcgcatcaagaatgtgcgctacagcgagagcttcagaaatgccagcagccaggagtacagagacttcctggagctgttcttcaggatggtgcggggcagcctgcctgccaccatgtgccagcacatggatgctgggggcgtgaggatggaggtggtgtctgtgaccaacggcagcatcgtggtggagttccacctgctgatcatcgcagatgtggatgtgcaggaggtgtctgctgccttcctgacagccttccagacagtgcccctgctggaggtgatccggggggacaccttcatccaggactatgatgaatgtgagaggaaagaagatgactgtgtgcccggcaccagctgcaggaacaccctgggcagcttcacctgcagctgtgagggcggggccccagacttccctgtggagtacagcgagcggccctgtgagggggacagccctggaaatgagacctgggccaccagccctgagcggcccctgaccacagctggcaccaaggccgcctttgtgcagggcaccagccccaccccccagggcctgccccagaggctgaacctgaccggggctgtgcgggtgctgtgtgaaattgagaaggtggtggtggccatccagaagcgcttcctgcagcaggagagcatccctgagagcagcctgtacctgagccaccccagctgcaatgtgagccacagcaatggcacccacgtgctgctggaggccggctggagcgaatgtggcaccctgatgcagagcaacatgaccaacacagtggtgaggaccaccctgagaaatgacctgagccaggagggcatcatccaccacctgaagatcctgagccccatctactgtgccttccagaatgacctgctgaccagcagcggcttcaccctggagtggggcgtgtacaccatcatcgaggacctgcatggagctggcaactttgtgacagagatgcagctgttcatcggggacagccccatcccccagaactacagcgtgtctgccagtgatgatgtgagaattgaggtgggcctgtaccggcagaagagcaacctgaaggtggtgctgacagagtgctgggccacccccagcagcaatgcccgggaccccatcaccttctccttcatcaacaacagctgccctgtgcccaacacctacaccaacgtgattgaaaatggaaacagcaacaaggcccagttcaagctgcgcatcttctccttcatcaatgacagcatcgtgtacctgcactgcaagctgcgggtgtgcatggagagccctggggccacctgcaagatcaactgcaacaacttccggctgctgcagaacagcgagaccagcgccacccaccagatgtcctggggccccctcatccgctctgagggggagccccctcatgctgaggccggcctgggcgccggctacgtggtgctgattgtggtggccatctttgtgctggtggccggcacagccaccctgctgattgtgcgctaccagaggatgaatggccgctacaacttcaagatccagagcaacaacttctcctaccaggtgttctatgaatag

SEQ ID NO: 175581 - DNA, 3957 bp, synthetic construct
  misc_feature 1..3957: note = Description of Artificial Sequence: Synthetic coding sequence
  source 1..3957: mol_type = other DNA
atgctgcggaccagcggcctggccctgctggccctggtgtctgctgtgggccccagccaggccagcggcttcacagagaagggcctgagcctgctgggctaccagctgtgcagccaccgggtgacccacacagtgcagaaggtggaggccgtgcagaccagctacaccagctatgtgtcctgtggcggctggatcccctggaggcgctgccccaagatggtgtaccgcacccagtacctggtggtggaggtgcctgagagcagaaatgtgacagactgctgtgagggctatgagcagctgggcctgtactgtgtgctgcccctgaaccagagcggccagttcaccagcaggcctggggcctgcccagctgagggccctgagcccagcaccagcccctgcagcctggacatcgactgccccggcctggagaagtgctgcccctggagcggcggccgctactgcatggccccagccccccaggcccctgagcgggaccctgtgggctcctggtacaacgtgaccatcctggtgaagatggacttcaaggagctgcagcaggtggacccccggctgctgaaccacatgaggctgctgcacagcctggtgaccagcgccctgcagcccatggccagcacagtgcaccacctgcacagcgcccctggaaatgccagcaccaccgtgtcccggctgctgctgggcctgccccggcccctgcctgtggctgatgtgtccaccctgctgggggacatcgccaagagggtgtatgaagtcatctctgtgcaggtgcaggatgtgaatgaatgcttctatgaggagctgaatgcctgcagcggccgggagctgtgtgccaacctggagggcagctactggtgtgtgtgccaccaggaggccccagccaccagccccaggaagctgaacctggagtgggaggactgcccccctgtgtctgactatgtggtgctgaatgtgaccagtgacagcttccaggtgtcctggaggctgaacagcacccagaaccacaccttccacgtgcgggtgtaccggggcatggagctgctgcggagcgcccggacccagagccaggccctggccgtggccggcctggaggccggcgtgctgtacagagtgaagaccagctaccagggctgtggggctgatgtgtccaccaccctgaccatcaagaccaatgcccaggtgtttgaggtgaccatcaagatcgtgaaccacaacctgacagagaagctgctgaacagaagctctgtggagtaccaggacttcagccggcagctgctgcacgaggtggagagcagcttcccccctgtggtgtctgacctgtaccgcagcggcaagctgaggatgcagatcgtgtccctgcaggccggctctgtggtggtgcggctgaagctgactgtgcaggaccccggcttccccatgggcatcagcaccctggcccccatcctgcagcccctgctggccagcaccgtcttccagattgaccggcagggcaccagggtgcaggactgggatgaatgtgtggacagcgctgagcatgactgcagccctgctgcctggtgcatcaacctggagggcagctacacctgccagtgcaggaccaccagagatgccacccccagcagagctggccgggcctgtgagggggacctggtgagccccatgggcggcggcctgtctgctgccactggagtgacagtgcccggcctgggcaccggcacagctgccctgggcctggagaacttcaccctgagccccagccctggctacccccagggcaccccagctgctggccaggcctggaccccagagcccagcccccggcggggcggcagcaatgtggtgggctatgacaggaacaacacaggcaagggcgtggagcaggagctgcagggcaacagcatcatggagccccccagctggcccagccccacagaggaccccaccggccacttcctgtggcacgccaccaggagcacccgggagaccctgctgaaccccacctggctgagaaatgaagattctggccccagcggctctgtggacctgcccctgaccagcaccctgacagccctgaagaccccagcctgtgtgcctgtgtccatcggccgcatcatggtgtccaatgtgaccagcacaggcttccacctggcctgggaggccgacctggccatggacagcaccttccagctgaccctgacctccatgtggagccctgctgtggtgctggagacctggaacacctctgtgaccctgagcggcctggagcccggggtgctgcacctggtggagatcatggccaaggcctgtgggaaggagggcgcccgggcccacctgaaggtgaggacagctgccaggaagctgattggcaaggtgcgcatcaagaatgtgcgctacagcgagagcttcagaaatgccagcagccaggagtacagagacttcctggagctgttcttcaggatggtgcggggcagcctgcctgccaccatgtgccagcacatggatgctgggggcgtgaggatggaggtggtgtctgtgaccaacggcagcatcgtggtggagttccacctgctgatcatcgcagatgtggatgtgcaggaggtgtctgctgccttcctgacagccttccagacagtgcccctgctggaggtgatccggggggacaccttcatccaggactatgatgaatgtgagaggaaagaagatgactgtgtgcccggcaccagctgcaggaacaccctgggcagcttcacctgcagctgtgagggcggggccccagacttccctgtggagtacagcgagcggccctgtgagggggacagccctggaaatgagacctgggccaccagccctgagcggcccctgaccacagctggcaccaaggccgcctttgtgcagggcaccagccccaccccccagggcctgccccagaggctgaacctgaccggggctgtgcgggtgctgtgtgaaattgagaaggtggtggtggccatccagaagcgcttcctgcagcaggagagcatccctgagagcagcctgtacctgagccaccccagctgcaatgtgagccacagcaatggcacccacgtgctgctggaggccggctggagcgaatgtggcaccctgatgcagagcaacatgaccaacacagtggtgaggaccaccctgagaaatgacctgagccaggagggcatcatccaccacctgaagatcctgagccccatctactgtgccttccagaatgacctgctgaccagcagcggcttcaccctggagtggggcgtgtacaccatcatcgaggacctgcatggagctggcaactttgtgacagagatgcagctgttcatcggggacagccccatcccccagaactacagcgtgtctgccagtgatgatgtgagaattgaggtgggcctgtaccggcagaagagcaacctgaaggtggtgctgacagagtgctgggccacccccagcagcaatgcccgggaccccatcaccttctccttcatcaacaacagctgccctgtgcccaacacctacaccaacgtgattgaaaatggaaacagcaacaaggcccagttcaagctgcgcatcttctccttcatcaatgacagcatcgtgtacctgcactgcaagctgcgggtgtgcatggagagccctggggccacctgcaagatcaactgcaacaacttccggctgctgcagaacagcgagaccagcgccacccaccagatgtcctggggccccctcatccgctctgagggggagccccctcatgctgaggccggcctgggcgccggctacgtggtgctgattgtggtggccatctttgtgctggtggccggcacagccaccctgctgattgtgcgctaccagaggatgaatggccgctacaacttcaagatccagagcaacaacttctcctaccaggtgttctatgaatag

SEQ ID NO: 175582 - DNA, 4341 bp, synthetic construct
  misc_feature 1..4341: note = Description of Artificial Sequence: Synthetic coding sequence
  source 1..4341: mol_type = other DNA
atgctgcggaccagcggcctggccctgctggccctggtgtctgctgtgggccccagccaggccagcggcttcacagagaagggcctgagcctgctgggctaccagctgtgcagccaccgggtgacccacacagtgcagaaggtggaggccgtgcagaccagctacaccagctatgtgtcctgtggcggctggatcccctggaggcgctgccccaagatggtgtaccgcacccagtacctggtggtggaggtgcctgagagcagaaatgtgacagactgctgtgagggctatgagcagctgggcctgtactgtgtgctgcccctgaaccagagcggccagttcaccagcaggcctggggcctgcccagctgagggccctgagcccagcaccagcccctgcagcctggacatcgactgccccggcctggagaagtgctgcccctggagcggcggccgctactgcatggccccagccccccaggcccctgagcgggaccctgtgggctcctggtacaacgtgaccatcctggtgaagatggacttcaaggagctgcagcaggtggacccccggctgctgaaccacatgaggctgctgcacagcctggtgaccagcgccctgcagcccatggccagcacagtgcaccacctgcacagcgcccctggaaatgccagcaccaccgtgtcccggctgctgctgggcctgccccggcccctgcctgtggctgatgtgtccaccctgctgggggacatcgccaagagggtgtatgaagtcatctctgtgcaggtgcaggatgtgaatgaatgcttctatgaggagctgaatgcctgcagcggccgggagctgtgtgccaacctggagggcagctactggtgtgtgtgccaccaggaggccccagccaccagccccaggaagctgaacctggagtgggaggactgcccccctgtgtctgactatgtggtgctgaatgtgaccagtgacagcttccaggtgtcctggaggctgaacagcacccagaaccacaccttccacgtgcgggtgtaccggggcatggagctgctgcggagcgcccggacccagagccaggccctggccgtggccggcctggaggccggcgtgctgtacagagtgaagaccagctaccagggctgtggggctgatgtgtccaccaccctgaccatcaagaccaatgcccaggtgtttgaggtgaccatcaagatcgtgaaccacaacctgacagagaagctgctgaacagaagctctgtggagtaccaggacttcagccggcagctgctgcacgaggtggagagcagcttcccccctgtggtgtctgacctgtaccgcagcggcaagctgaggatgcagatcgtgtccctgcaggccggctctgtggtggtgcggctgaagctgactgtgcaggaccccggcttccccatgggcatcagcaccctggcccccatcctgcagcccctgctggccagcaccgtcttccagattgaccggcagggcaccagggtgcaggactgggatgaatgtgtggacagcgctgagcatgactgcagccctgctgcctggtgcatcaacctggagggcagctacacctgccagtgcaggaccaccagagatgccacccccagcagagctggccgggcctgtgagggggacctggtgagccccatgggcggcggcctgtctgctgccactggagtgacagtgcccggcctgggcaccggcacagctgccctgggcctggagaacttcaccctgagccccagccctggctacccccagggcaccccagctgctggccaggcctggaccccagagcccagcccccggcggggcggcagcaatgtggtgggctatgacaggaacaacacaggcaagggcgtggagcaggaggtgcccagcacagcccctggcctgggcatggaccagggcagccccagccaggtgaaccccagccagggcagccccagccagggcagcctgcggcaggagagcaccagccaggccagccccagccagaggagcaccagccagggcagccccagccaggtgaaccccagccagaggagcaccagccacgccaacagcagccagggcagccccagccagggcagccccagccaggagagccccagccagggcagcaccagccaggccagccccagccacaggaacaccatcggggtcatcggcaccaccagcagccccaaggccaccggcagcacccacagcttccccccaggggccacagatggccccctggccctgcccggccagctgcagggcaacagcatcatggagccccccagctggcccagccccacagaggaccccaccggccacttcctgtggcacgccaccaggagcacccgggagaccctgctgaaccccacctggctgagaaatgaagattctggccccagcggctctgtggacctgcccctgaccagcaccctgacagccctgaagaccccagcctgtgtgcctgtgtccatcggccgcatcatggtgtccaatgtgaccagcacaggcttccacctggcctgggaggccgacctggccatggacagcaccttccagctgaccctgacctccatgtggagccctgctgtggtgctggagacctggaacacctctgtgaccctgagcggcctggagcccggggtgctgcacctggtggagatcatggccaaggcctgtgggaaggagggcgcccgggcccacctgaaggtgaggacagctgccaggaagctgattggcaaggtgcgcatcaagaatgtgcgctacagcgagagcttcagaaatgccagcagccaggagtacagagacttcctggagctgttcttcaggatggtgcggggcagcctgcctgccaccatgtgccagcacatggatgctgggggcgtgaggatggaggtggtgtctgtgaccaacggcagcatcgtggtggagttccacctgctgatcatcgcagatgtggatgtgcaggaggtgtctgctgccttcctgacagccttccagacagtgcccctgctggaggtgatccggggggacaccttcatccaggactatgatgaatgtgagaggaaagaagatgactgtgtgcccggcaccagctgcaggaacaccctgggcagcttcacctgcagctgtgagggcggggccccagacttccctgtggagtacagcgagcggccctgtgagggggacagccctggaaatgagacctgggccaccagccctgagcggcccctgaccacagctggcaccaaggccgcctttgtgcagggcaccagccccaccccccagggcctgccccagaggctgaacctgaccggggctgtgcgggtgctgtgtgaaattgagaaggtggtggtggccatccagaagcgcttcctgcagcaggagagcatccctgagagcagcctgtacctgagccaccccagctgcaatgtgagccacagcaatggcacccacgtgctgctggaggccggctggagcgaatgtggcaccctgatgcagagcaacatgaccaacacagtggtgaggaccaccctgagaaatgacctgagccaggagggcatcatccaccacctgaagatcctgagccccatctactgtgccttccagaatgacctgctgaccagcagcggcttcaccctggagtggggcgtgtacaccatcatcgaggacctgcatggagctggcaactttgtgacagagatgcagctgttcatcggggacagccccatcccccagaactacagcgtgtctgccagtgatgatgtgagaattgaggtgggcctgtaccggcagaagagcaacctgaaggtggtgctgacagagtgctgggccacccccagcagcaatgcccgggaccccatcaccttctccttcatcaacaacagctgccctgtgcccaacacctacaccaacgtgattgaaaatggaaacagcaacaaggcccagttcaagctgcgcatcttctccttcatcaatgacagcatcgtgtacctgcactgcaagctgcgggtgtgcatggagagccctggggccacctgcaagatcaactgcaacaacttccggctgctgcagaacagcgagaccagcgccacccaccagatgtcctggggccccctcatccgctctgagggggagccccctcatgctgaggccggcctgggcgccggctacgtggtgctgattgtggtggccatctttgtgctggtggccggcacagccaccctgctgattgtgcgctaccagaggatgaatggccgctacaacttcaagatccagagcaacaacttctcctaccaggtgttctatgaatag

SEQ ID NO: 175583 - DNA, 234 bp, synthetic construct
  misc_feature 1..234: note = Description of Artificial Sequence: Synthetic coding sequence
  source 1..234: mol_type = other DNA
cctgtgggctcctggtacaacgtgaccatcctggtgaagatggacttcaaggagctgcagcaggtggacccccggctgctgaaccacatgaggctgctgcacagcctgatgtccatgtctgtgtccatgaggagctccatgcctgccctggagggcaactgtgcccagacctggagggccaggactggagcctctgtgaccaggaagctgcagccccggctgcacggcagctag

SEQ ID NO: 175584 - DNA, 411 bp, synthetic construct
  misc_feature 1..411: note = Description of Artificial Sequence: Synthetic coding sequence
  source 1..411: mol_type = other DNA
atgcagctgttcatcggggacagccccatcccccagaactacagcgtgtctgccagtgatgatgtgcgcatcgaggtgggcctgtaccggcagaagagcaacctgaaggtggtgctgacagagtgctgggccacccccagcagcaatgcccgggaccccatcaccttctccttcatcaacaacagctgccctgtgcccaacacctacaccaacgtgattgaaaatggaaacagcaacaaggcccagttcaagctgcgcatcttctccttcatcaatgacagcatcgtgtacctgcactgcaagctgcgggtgtgcatggagagccctggggccacctgcaagattgctgccctgggccgccgcacccacgtggactggtgggccttccccatcagccagtggctgtcctag

SEQ ID NO: 175585 - DNA, 1221 bp, synthetic construct
  misc_feature 1..1221: note = Description of Artificial Sequence: Synthetic coding sequence
  source 1..1221: mol_type = other DNA
atgaagaagaagcagcagcaccctgggggcggcgctgacccctggccccatggagcccccatgggcggggcccctcctggcctgggctcctggaagagaagagtgcccctgctgcccttcctgcgcttcagcctgcgggactatggcttctgcatggccaccctgctggtgttctgcctgggcagcctgctgtaccagctgagcggcggccccccacgcttcctgctggacctgcggcagtacctgggcaacagcacctacctggatgaccacggccccccacccagcaaggtgctgcccttccccagccaggtggtgtacaacagagtgggcaaatgtggcagcaggacagtggtgctgctgctgcgcatcctgtctgagaagcacggcttcaacctggtgaccagtgacatccacaacaagacccggctgaccaagaatgagcagatggagctgatcaagaacatcagcacagctgagcagccctacctgttcaccaggcatgtgcacttcctgaacttcagcagatttggaggagaccagcctgtgtacatcaacatcatccgggaccctgtgaaccgcttcctgagcaactacttcttccgccgctttggagactggagaggagagcagaaccacatgatccgcacccccagcatgaggcaggaggagcgctacctggacatcaatgaatgcatcctggagaactacccagaatgtagcaaccccaggctcttctacatcatcccctacttctgtggccagcacccccgctgccgggagcccggggagtgggccctggagcgggccaagctgaatgtgaatgaaaacttcctgctggtgggcatcctggaggagctggaggatgtgctgctgctgctggagcgcttcctgccccactacttcaagggcgtgctgagcatctacaaggaccctgagcacaggaagctgggcaacatgacagtgacagtgaagaagacagtgcccagccctgaggccgtgcagatcctgtaccagaggatgagatatgaatatgagttctaccactacgtgaaggagcagttccacctgctgaagaggaagtttggcctgaagagccacgtgtccaagccacccctgcggccccacttcttcatccccacccccctggagacagaggagcccattgatgatgaggagcaggatgatgagaagtggctggaggacatctacaagaggtag

SEQ ID NO: 175586 - DNA, 2274 bp, synthetic construct
  misc_feature 1..2274: note = Description of Artificial Sequence: Synthetic coding sequence
  source 1..2274: mol_type = other DNA
atggtgcctgacacagcctgtgtgctgctgctgaccctggccgccctgggcgccagcggccagggccagagccccctgggcagtgacctgggcccccagatgctgcgggagctgcaggagaccaatgctgccctgcaggatgtgcgggagctgctgcggcagcaggtgcgggagatcaccttcctgaagaacacagtgatggagtgtgatgcctgtggcatgcagcagagcgtgaggacaggcctgcccagcgtgcggcccctgctgcactgtgcccctggcttctgcttccctggggtggcctgcatccagacagaaagtggggcccgctgtggcccctgcccagctggcttcaccggaaatggcagccactgcacagatgtgaatgaatgtaatgcccacccctgcttcccccgggtgcgctgcatcaacaccagccctggcttccgctgtgaggcctgccccccaggctacagcggccccacccaccagggcgtgggcctggcctttgccaaggccaacaagcaggtgtgcacagacatcaatgaatgtgagaccggccagcacaactgtgtgcccaacagcgtgtgcatcaacacccggggcagcttccagtgtggcccctgccagcccggctttgtgggggaccaggccagcggctgccagaggcgggcccagcgcttctgcccagatggcagccccagcgagtgccacgagcacgccgactgtgtgctggagagagatggcagccgcagctgtgtgtgtgctgtgggctgggccggaaatggcatcctgtgtggccgggacacagacctggatggcttcccagatgagaagctgcgctgcccagagcggcagtgcaggaaggacaactgtgtgacagtgcccaacagcggccaggaggatgtggacagagatggcattggagatgcctgtgaccctgatgctgatggagatggagtgcccaatgagaaggacaactgccccctggtgaggaacccagaccagaggaacacagatgaggacaagtggggagatgcctgtgacaactgccgcagccagaagaatgatgaccagaaggacacagaccaggacggcagaggagatgcctgtgatgatgacattgatggagaccgcatccggaaccaggccgacaactgcccccgggtgcccaacagcgaccagaaggacagtgatggagatggcattggagatgcctgtgacaactgcccccagaagagcaacccagaccaggctgatgtggaccatgactttgtgggagatgcctgtgacagcgaccaggaccaggatggagatggccaccaggacagccgggacaactgccccaccgtgcccaacagcgcccaggaggacagcgaccatgatggccagggagatgcctgtgatgatgatgatgacaatgatggagtgcctgacagccgggacaactgccgcctggtgcccaaccctggccaggaggatgctgacagagatggagtgggagatgtgtgccaggatgactttgatgctgacaaggtggtggacaagattgatgtgtgcccagaaaatgctgaggtgaccctgacagacttccgggccttccagacagtggtgctggaccctgaaggagatgcccagattgaccccaactgggtggtgctgaaccagggccgggagatcgtgcagaccatgaacagcgaccccggcctggccgtgggctacacagccttcaacggggtggactttgagggcaccttccacgtgaacacagtgacagatgatgattatgccggcttcatcttcggctaccaggacagcagcagcttctacgtggtgatgtggaagcagatggagcagacctactggcaggccaaccccttccgggctgtggccgagcccggcatccagctgaaggctgtgaagagcagcacaggccctggagagcagctgagaaatgccctgtggcacactggagacacagagagccaggtgcggctgctgtggaaggaccccagaaatgtgggctggaaggacaagaagagctaccgctggttcctgcagcaccggccccaggtgggctacatccgggtgcgcttctatgagggccctgagctggtggccgacagcaatgtggtgctggacaccaccatgagaggaggccgcctgggcgtcttctgcttcagccaggagaacatcatctgggccaacctgcgctaccgctgcaatgacaccatcccagaagattatgagacccaccagctgcggcaggcctag

SEQ ID NO: 175587 - DNA, 822 bp, synthetic construct
  misc_feature 1..822: note = Description of Artificial Sequence: Synthetic coding sequence
  source 1..822: mol_type = other DNA
atggccagcgctgctgctgctgaggccgagaagggcagccctgtggtggtgggcctgctggtggtgggcaacatcatcatcctgctgagcggcctgagcctgtttgctgagaccatctgggtgacagctgaccagtacagagtgtaccccctgatgggcgtgtctgggaaggatgatgtgtttgctggggcctggatcgccatcttctgtggcttctccttcttcatggtggccagctttggagtgggcgccgccctgtgcagaagaagatccatggtgctgacctacctggtgctgatgctgattgtgtacatctttgaatgtgccagctgcatcaccagctacacccaccgggactacatggtgagcaaccccagcctcatcaccaagcagatgctgaccttctacagcgctgacacagaccagggccaggagctgacccggctgtgggacagagtgatgattgagcaggagtgctgcggcaccagcggccccatggactgggtgaacttcaccagcgccttccgggccgccaccccagaggtggtgttcccctggccacccctgtgctgcagaagaacaggcaacttcatccccctgaatgaggagggctgccgcctgggccacatggactacctgttcaccaaggccggcgtgcagtggcacaacctgagcagcctgcagaggctgcccccaggcttcaagggcttcagccacctgtccttccagagctcctgggactaccgggccgccagcaacaccagcgccacccccagcacagccacccggggcgtgtcccggggcctgggcctgcccagctag

SEQ ID NO: 175588 - DNA, 783 bp, synthetic construct
  misc_feature 1..783: note = Description of Artificial Sequence: Synthetic coding sequence
  source 1..783: mol_type = other DNA
atggccaaggacaacagcacagtgcgctgcttccagggcctgctgatctttggaaatgtcatcatcggctgctgcggcatcgccctgacagctgagtgcatcttctttgtgtctgaccagcacagcctgtaccccctgctggaggccacagacaatgatgacatctacggggccgcctggattggcatctttgtgggcatctgcctcttctgcctgtctgtgctgggcatcgtgggcatcatgaagagcagcaggaagatcctgctggcctacttcatcctgatgtttattgtgtatgcctttgaggtggccagctgcatcacagctgccacccagcaggacttcttcacccccaacctcttcctgaagcagatgctggagcgctaccagaacaacagcccccccaacaatgatgaccagtggaagaacaacggggtgaccaagacctgggaccggctgatgctgcaggacaactgctgcggcgtgaatggccccagcgactggcagaagtacaccagcgccttcagaacagagaacaatgatgctgactacccctggccccggcagtgctgcgtgatgaacaacctgaaggagcccctgaacctggaggcctgcaagctgggcgtgcccggcttctaccacaaccagggctgctatgagctgatcagcggccccatgaacagacatgcctggggcgtggcctggtttggatttgccatcctgtgctggaccttctgggtgctgctgggcaccatgttctactggagccgcatcgagtactag

SEQ ID NO: 175589 - DNA, 510 bp, synthetic construct
  misc_feature 1..510: note = Description of Artificial Sequence: Synthetic coding sequence
  source 1..510: mol_type = other DNA
atggccaaggacaacagcacagtgcgctgcttccagggcctgctgatctttggaaatgtcatcatcggctgctgcggcatcgccctgacagctgagtgcatcttctttgtgtctgaccagcacagcctgtaccccctgctggaggccacagacaatgatgacatctacggggccgcctggattggcatctttgtgggcatctgcctcttctgcctgtctgtgctgggcatcgtgggcatcatgaagagcagcaggaagatcctgctggcctacttcatcctgatgtttattgtgtatgcctttgaggtggccagctgcatcacagctgccacccagcaggacttcttcacccccaacctcttcctgaagcagatgctggagcgctaccagaacaacagcccccccaacaatgatgaccagtggaagaacaacggggtgaccaagacctgggaccggctgatgctgcaggacaactgctgcggcgtgaatggccccagcgactggcagtag

SEQ ID NO: 175590 - DNA, 570 bp, synthetic construct
  misc_feature 1..570: note = Description of Artificial Sequence: Synthetic coding sequence
  source 1..570: mol_type = other DNA
atggccaaggacaacagcacagtgcgctgcttccagggcctgctgatctttggaaatgtcatcatcggctgctgcggcatcgccctgacagctgagtgcatcttctttgtgtctgaccagcacagcctgtaccccctgctggaggccacagacaatgatgacatctacggggccgcctggattggcatctttgtgggcatctgcctcttctgcctgtctgtgctgggcatcgtgggcatcatgaagagcagcaggaagatcctgctggcctacttcatcctgatgtttattgtgtatgcctttgaggtggccagctgcatcacagctgccacccagcaggacttcttcacccccaacctcttcctgaagcagatgctggagcgctaccagaacaacagcccccccaacaatgatgaccagtggaagaacaacggggtgaccaagacctgggaccggctgatgctgcaggacaactgctgcggcgtgaatggccccagcgactggcagaagtacaccagcgccttcagaacagagaacaatgatgctgactacccctggccccggcagtag

SEQ ID NO: 175591 - DNA, 555 bp, synthetic construct
  misc_feature 1..555: note = Description of Artificial Sequence: Synthetic coding sequence
  source 1..555: mol_type = other DNA
atggcccccctgctgcccatccgcaccctgcccctcatcctgatcctgctggccctgctgagccctggagctgctgacttcaacatcagcagcctgagcggcctgctgagccctgccctgacagagagcctgctggtggccctgcccccctgccacctgaccggcggcaatgccaccctgatggtgagaagagccaatgacagcaaggtggtgaccagcagctttgtggtgcccccctgccggggcagaagagagctggtgtctgtggtggacagcggggccggcttcaccgtgacccggctgagcgcctaccaggtgaccaacctggtgcccggcaccaagttctacatctcctacctggtgaagaagggcacagccacagagagcagccgggagatccccatgagcaccctgcccaggaggaacatggagagcatcggcctgggcatggccaggactggaggcatggtggtgatcaccgtgctgctgtctgtggccatgttcctgctggtgctgggcttcatcatcgccctggccctgggcagcaggaagtag

SEQ ID NO: 175592 - DNA, 333 bp, synthetic construct; identical to SEQ ID NO: 163314
  misc_feature 1..333: note = Description of Artificial Sequence: Synthetic coding sequence
  source 1..333: mol_type = other DNA

SEQ ID NO: 175593 - DNA, 501 bp, synthetic construct
  misc_feature 1..501: note = Description of Artificial Sequence: Synthetic coding sequence
  source 1..501: mol_type = other DNA
atgccacccctgtgggccctgctggccctgggctgcctgcgctttggatctgctgtgaacctgcagccccagctggcctctgtgacctttgccaccaacaaccccaccctgaccaccgtggccctggagaagcccctgtgcatgtttgacagcaaggaggccctgaccggcacccatgaggtgtacctgtatgtgctggtggacagcgtgaccccctacagcaccatcgacacctggccaggccgccgcagcggcggcatgatcgtcatcaccagcatcctgggcagcctgcccttcttcctgctggtgggctttgctggggccatcgccctgagcctggtggacatgggcagcagtgatggagagaccacccatgacagccagatcacccaggaggccgtgcccaagagcctgggcgccagcgagagcagctacacctctgtgaacagaggcccccccctggacagagctgaggtgtacagcagcaagctgcaggactag

SEQ ID NO: 175594 - DNA, 963 bp, synthetic construct
  misc_feature 1..963: note = Description of Artificial Sequence: Synthetic coding sequence
  source 1..963: mol_type = other DNA
atgggcctgccctggggccagccccacctgggcctgcagatgctgctgctggccctgaactgcctgcggcccagcctgagcctgggggagtggggctcctggatggatgccagcagccagacccagggcgctgggggccctgctggggtgattggcccctgggccccagcccccctgcggctgggggaggccgcccctggcacccccacccctgtgtctgtggcccacctgctgagccctgtggccacagagctggtgccctacaccccccagatcacagcctgggacctggagggcaaggtgacagccaccaccttcagcctggagcagccccgctgtgtgtttgatggcctggccagcgccagtgacacagtgtggctggtggtggccttcagcaatgccagccggggcttccagaaccctgagaccctggccgacatcccagccagcccccagctgctgacagatggccactacatgaccctgcccctgagcccagaccagctgccctgtggggaccccatggccggcagcggcggggcccctgtgctgcgggtgggccatgaccacggctgccaccagcagcccttctgcaatgcccccctgcccggccctggcccctaccgggaggacccccgcatccaccgccacctggcccgggccgccaagtggcagcacgacagacactacctgcaccccctcttcagcggccggccccccaccctgggcctgctgggcagcctgtaccacgccctgctgcagcctgtggtggccggcggcggccctggagctgctgctgaccggctgctgcacggccaggccctgcatgaccccccccaccccacccagaggggccgccacacagctgggggcctgcaggcctggccaggccccccaccccagccccagcccctggcctggcccctgtgcatgggcctgggggagatgggccgctgggagtag

SEQ ID NO: 175595 - DNA, 831 bp, synthetic construct
  misc_feature 1..831: note = Description of Artificial Sequence: Synthetic coding sequence
  source 1..831: mol_type = other DNA
atgggcctgccctggggccagccccacctgggcctgcagatgctgctgctggccctgaactgcctgcggcccagcctgagcctggagctggtgccctacaccccccagatcacagcctgggacctggagggcaaggtgacagccaccaccttcagcctggagcagccccgctgtgtgtttgatggcctggccagcgccagtgacacagtgtggctggtggtggccttcagcaatgccagccggggcttccagaaccctgagaccctggccgacatcccagccagcccccagctgctgacagatggccactacatgaccctgcccctgagcccagaccagctgccctgtggggaccccatggccggcagcggcggggcccctgtgctgcgggtgggccatgaccacggctgccaccagcagcccttctgcaatgcccccctgcccggccctggcccctacagagtgaagttcctgctgatggacacccggggcagccccagggctgagaccaagtggagcgaccccatcaccctgcaccagggcaagaccccaggcagcattgacacctggccaggaagaagaagtggctccatgatcgtcatcaccagcatcctgagcagcctggccggcctgctgctgctggccttcctggccgccagcaccatgaggttcagcagcctgtggtggccagaggaggcccctgagcagctgagaattggcagcttcatgggcaagcgctacatgacccaccacatccccccccgggaggccgccaccctgcctgtgggctgcaagccaggcctggaccccctgcccagcctgagcccctag

SEQ ID NO: 175596 - DNA, 963 bp, synthetic construct; identical to SEQ ID NO: 175594
  misc_feature 1..963: note = Description of Artificial Sequence: Synthetic coding sequence
  source 1..963: mol_type = other DNA

SEQ ID NO: 175597 - DNA, 831 bp, synthetic construct; identical to SEQ ID NO: 175595
  misc_feature 1..831: note = Description of Artificial Sequence: Synthetic coding sequence
  source 1..831: mol_type = other DNA

SEQ ID NO: 175598 - DNA, 963 bp, synthetic construct; identical to SEQ ID NO: 175594
  misc_feature 1..963: note = Description of Artificial Sequence: Synthetic coding sequence
  source 1..963: mol_type = other DNA

SEQ ID NO: 175599 - DNA, 1104 bp, synthetic construct
  misc_feature 1..1104: note = Description of Artificial Sequence: Synthetic coding sequence
  source 1..1104: mol_type = other DNA
atggaggccaacggcctgggcccccagggcttccctgagctgaagaatgacaccttcctgcgggccgcctggggcgaggagacagactacacccctgtgtggtgcatgaggcaggccggccgctacctgcctgagttccgggagaccagggctgcccaggacttcttcagcacctgccgcagccctgaggcctgctgtgagctgaccctgcagcccctgcggcgcttccccctggatgctgccatcatcttcagtgacatcctggtggtgccccaggccctgggcatggaggtgaccatggtgcctgggaagggccccagcttccctgagcccctgcgggaggagcaggacctggagcggctgcgggaccctgaggtggtggccagcgagctgggctacgtgttccaggccatcaccctgacccggcagaggctggccggccgggtgcccctcatcggctttgctggggccccctggaccctgatgacctacatggtggagggcggcggcagcagcaccatggcccaggccaagcgctggctgtaccagaggccccaggccagccaccagctgctgcgcatcctgacagatgccctggtgccctacctggtgggccaggtggtggccggggcccaggccctgcagctgtttgagagccatgctggccacctgggcccccagctgttcaacaagtttgccctgccctacatcagagatgtggccaagcaggtgaaggcccggctgcgggaggccggcctggcccctgtgcccatgatcatctttgccaaggatggccactttgccctggaggagctggcccaggccggctatgaggtggtgggcctggactggacagtggcccccaagaaggccagagaatgtgtgggcaagacagtgaccctgcagggcaacctggacccctgtgccctgtatgccagcgaggaggagatcggccagctggtgaagcagatgctggatgactttggcccccaccgctacatcgccaacctgggccacggcctgtacccagacatggaccctgagcacgtgggcgcctttgtggatgctgtgcacaagcacagccggctgctgcggcagaactag

SEQ ID NO: 175600 - DNA, 582 bp, synthetic construct
  misc_feature 1..582: note = Description of Artificial Sequence: Synthetic coding sequence
  source 1..582: mol_type = other DNA
atggaggccaacggcctgggcccccagggcttccctgagctgaagaatgacaccttcctgcgggccgcctggggcgaggagacagactacacccctgtgtggtgcatgaggcaggccggccgctacctgcctgagttccgggagaccagggctgcccaggacttcttcagcacctgccgcagccctgaggcctgctgtgagctgaccctgcaggccctgggcatggaggtgaccatggtgcctgggaagggccccagcttccctgagcccctgcgggaggagcaggacctggagcggctgcgggaccctgaggtggtggccagcgagctgggctacgtgttccaggccatcaccctgacccggcagaggctggccggccgggtgcccctgattggatttgctggggccccctggaccctgatgacctacatggtggagggcggcggcagcagcaccatggcccaggccaagcgctggctgtaccagaggccccaggccagccaccagctgctgcgcatcctgacagatgccctggtgccctacctggtgggccaggtggtggccggggcccaggccctgtag

SEQ ID NO: 175601 - DNA, 684 bp, synthetic construct
  misc_feature 1..684: note = Description of Artificial Sequence: Synthetic coding sequence
  source 1..684: mol_type = other DNA
ccccagggcttccctgagctgaagaatgacaccttcctgcgggccgcctggggcgaggagacagactacacccctgtgtggtgcatgaggcaggccggccgctacctgcctgagttccgggagacccgggccgcccaggacttcttcagcacctgccgcagccctgaggcctgctgtgagctgaccctgcagcccctgcggcgcttccccctggatgctgccatcatcttcagtgacatcctggtggtgccccaggccctgggcatggaggtgaccatggtgcctgggaagggccccagcttccctgagcccctgcgggaggagcaggacctggagcggctgcgggaccctgaggtggtggccagcgagctgggctacgtgttccaggccatcaccctgacccggcagaggctggccggccgggtgcccctgattggatttgctggggccccagccctgcagctgtttgagagccacgccggccacctgggcccccagctgttcaacaagtttgccctgccctacatcagagatgtggccaagcaggtgaaggcccggctgcgggaggccggcctggcccctgtgcccatgatcatctttgccaaggatggccactttgccctggaggagctggcccaggccggctatgaggtggtgggcctggactggacagtggccccctag

SEQ ID NO: 175602 - DNA, 687 bp, synthetic construct
  misc_feature 1..687: note = Description of Artificial Sequence: Synthetic coding sequence
  source 1..687: mol_type = other DNA
tgaccccagggcttccctgagctgaagaatgacaccttcctgcgggccgcctggggcgaggagacagactacacccctgtgtggtgcatgaggcaggccggccgctacctgcctgagttccgggagaccagggctgcccaggacttcttcagcacctgccgcagccctgaggcctgctgtgagctgaccctgcagcccctgcggcgcttccccctggatgctgccatcatcttcagtgacatcctggtggtgccccaggccctgggcatggaggtgaccatggtgcctgggaagggccccagcttccctgagcccctgcgggaggagcaggacctggagcggctgcgggaccctgaggtggtggccagcgagctgggctacgtgttccaggccatcaccctgacccggcagaggctggccggccgggtgcccctcatcggctttgctggggccccagccctgcagctgtttgagagccatgctggccacctgggcccccagctgttcaacaagtttgccctgccctacatcagagatgtggccaagcaggtgaaggcccggctgcgggaggccggcctggcccctgtgcccatgatcatctttgccaaggatggccactttgccctggaggagctggcccaggccggctatgaggtggtgggcctggactggacagtggccccctag

SEQ ID NO: 175603 - DNA, 582 bp, synthetic construct; identical to SEQ ID NO: 175600
  misc_feature 1..582: note = Description of Artificial Sequence: Synthetic coding sequence
  source 1..582: mol_type = other DNA

SEQ ID NO: 175604 - DNA, 402 bp, synthetic construct
  misc_feature 1..402: note = Description of Artificial Sequence: Synthetic coding sequence
  source 1..402: mol_type = other DNA
atgaaggtgctgctgctgaaggatgccaaggaggatgactgtggccaggacccctacatccgggagctgggcctgtatggcctggaggccaccctcatccctgtgctgagctttgagttcctgagcctgcccagcttcagcgagaagctgagccaccctgaggactatggaggcctcatcttcaccagccccagggctgtggaggccgctgagctgtgcctggagcagaacaacaagacagaggtgtgggagaggagcctgaaggagaagtggaatgccaagtctgtgtatgtggtgggcaatgccacagccagcctggtgtccaagattggcctggacacagaaggagagacctgtggaaatgctgagaagctggccgagtacatctgcagcagcaagtag

SEQ ID NO: 175605 - DNA, 420 bp, synthetic construct
  misc_feature 1..420: note = Description of Artificial Sequence: Synthetic coding sequence
  source 1..420: mol_type = other DNA
atgaaggtgctgctgctgaaggatgccaaggaggatgactgtggccaggacccctacatccgggagctgggcctgtatggcctggaggccaccctcatccctgtgctgagctttgagttcctgagcctgcccagcttcagcgagaagctgagccaccctgaggactatggaggcctcatcttcaccagccccagggctgtggaggccgctgagctgtgcctggagcagaacaacaagacagaggtgtgggagaggagcctgaaggagaagtggaatgccaagtctgtgtatgtggtgggcaatgccacagccagcctggtgtccaagattggcctggacacagaaggagagacctgtggaaatgctgagaagctggccgagtacatctgcagcagcgaggaggtgaagggcatcttctag

SEQ ID NO: 175606 - DNA, 798 bp, synthetic construct
  misc_feature 1..798: note = Description of Artificial Sequence: Synthetic coding sequence
  source 1..798: mol_type = other DNA
atgaaggtgctgctgctgaaggatgccaaggaggatgactgtggccaggacccctacatccgggagctgggcctgtatggcctggaggccaccctcatccctgtgctgagctttgagttcctgagcctgcccagcttcagcgagaagctgagccaccctgaggactatggaggcctcatcttcaccagccccagggctgtggaggccgctgagctgtgcctggagcagaacaacaagacagaggtgtgggagaggagcctgaaggagaagtggaatgccaagtctgtgtatgtggtgggcaatgccacagccagcctggtgtccaagattggcctggacacagaaggagagacctgtggaaatgctgagaagctggccgagtacatctgcagccgggagagcagcgccctgcccctgctcttcccctgtggcaacctgaagcgggagatcctgcccaaggccctgaaggacaagggcatcgccatggagagcatcaccgtgtaccagacagtggcccaccctggcatccagggcaacctgaacagctactacagccagcagggcgtgcctgccagcatcaccttcttcagccccagcggcctgacctacagcctgaagcacatccaggagctgagcggggacaacatcgaccagatcaagtttgctgccatcggccccaccacagcccgggccctggccgcccagggcctgcctgtgtcctgcacagctgagagccccaccccccaggccctggccaccggcatcaggaaggccctgcagccccacggctgctgctag

SEQ ID NO: 175607 - DNA, 798 bp, synthetic construct; identical to SEQ ID NO: 175606
  misc_feature 1..798: note = Description of Artificial Sequence: Synthetic coding sequence
  source 1..798: mol_type = other DNA

SEQ ID NO: 175608 - DNA, 558 bp, synthetic construct
  misc_feature 1..558: note = Description of Artificial Sequence: Synthetic coding sequence
  source 1..558: mol_type = other DNA
atgaaggtgctgctgctgaaggatgccaaggaggatgactgtggccaggacccctacatccggctgagccaccctgaggactatggaggcctcatcttcaccagccccagggctgtggaggccgctgagctgtgcctggagcagaacaacaagacagaggtgtgggagaggagcctgaaggagaagtggaatgccaagtctgtgtatgtggtgggcaatgccacagccagcctggtgtccaagattggcctggacacagaaggagagacctgtggaaatgctgagaagctggccgagtacatctgcagccgggagagcagcgccctgcccctgctcttcccctgtggcaacctgaagcgggagatcctgcccaaggccctgaaggacaagggcatcgccatggagagcatcaccgtgtaccagacagtggcccaccctggcatccagggcaacctgaacagctactacagccagcagggcgtgcctgccagcatcaccttcttcagccccagcggcctgacctacagcctgaagcacatccaggagctgagcggctag
